United States Patent Application Publication US 2022/0031776 A1 - sequence listing, part 5

SEQ ID NO: 135 - DNA, 113580 bp, Unknown
  source: /note="Description of Unknown: MKP2_2161_1 Mutant Bacteria sequence"
gcgcgagtgcgacgggcgctacttgacgtctttctcgactcgcccgccgcccacctggttcacagctggctgctccgcgggaggcgtaagatgtggataagggacaggccgagaacctcgggcacctgaaggccgtcgccgggatgaccgggcgcaatatggacccgtacatggggcgcgccttcgtcggcgacgggctggcgaccatgctctccggttcggtgggcggcagcggggtcaccacctatgcggagaacatcggcgtcatggcggtgaccaaggtctactcaacgctggtgtttgtcgccgcggcgctgattgccatgctgttgggtttctcgccgaagttcggcgcattaatccacaccattcccgggccggtgatcggcggcgcctcgatcgtggtatttggcttaattgccgtcgccggggcgcggatctgggtgcaaaaccgggtggatctgagtcaaaacagcaatttgatcatggtgtcggtgaccctggtgctgggcgccggcgatttcgcgctgtcgctgggcggctttacgctgggcgggattggcacagccaccttcggggcgatcctgctgcacgcgctgcttcatcgcgggacgcgcgaggcgaaggaggccagggtaacgccggtgtaagccacattagcgcggcgttggcgcagggagcggtgtgggcctgggtggtgtgatcctgtaggccggataaggcatttatgccgccatccggcaccaccacgggcacggaacctgaccgcccggcggcgctgcgcttgcacgggcctggagacaatcagagccggacgagtaccagccaggataagcgccgctgtcgggtcagaaggaaaatattatggctcgcggcgatcggccaggtccgtgagcggctgcgcatcgtcgtttgtggaaacctgcggcggcgacttgcgcttccacttcagctcgctcaccagcactcccgcgaggatcaaaacgcagccgagcagggccagcagcggcagacgctcaccggccagccggccaaaaataccggcccataccggttcaccggtataaataagggtggcccgcgtcggcgagacgctgcgctgcgcccagttcatggtcacctgaatgatcgcgctgaaaatccccagccccagcgcgacgccgagcagggccggcgtcaacgacggcaccgattcacccgccggcttcatggcggcgaaagccaccagcgacgcggtcgccagctgcaccaccgtcacccggcggacatcgactttcccggcccaggcgctgataaggataatctccgccgcgatcgccaccgcgcttgccagagtgatcatctcccccacgccaagcgccagcagattattttccggcccggccagcagaattaaaccaataaaggccagcacaatccccacgcaggacatcacccccggcatacgtcccaggcacagccactgcagcagcggcaccagcggcacatacatcgcggtgataaaggcagatttactgctggagatggtctgtagtccccaggtctgcaggccataccccagcgcaatcgccacgccaatcgctaccccggccttcacctccagccacgtcagaccgcgcagagtgcgcagcgaaagcaggcccaccgacagcgcggcagtcgcaaaacgcaaaccgacaaaaaacagcggcccgctgaggctcaccgcgtactgtacggcaaggaacgtccctccccagaacatggtgatcatgataaggagcgcttcctggcggctaacggagaattttaacgaagacataagacagccatgacgattaacgggcgaccagtgtgcaatccgcccggcgggagcgcaaccaccgacagataaaaaaaccgccggcagatgccggcggcgagggcgatgcggttgggtcggggagattaacaccgcatcaaagagaacagtgcgagtcgcgcgttaactttcacgactaccatgactgtttttacccccttttttgccagcctctgaggcgcgctgagggtcatttttaaaattccccccgctatgctggccacctttacgtcctgcttctgatgctctttcacggtcttcggcaaagttgccggaaccgccacgatggtttgccattactgacctccattaggttagacatcatagtgcattacgcgggagcggcgacgccgctgtcctgccgcgtatctataaggttagtgaatgactgcggctgacggcggcgaatgtaatatccagaaacaaagccgggcgaaaaaagcttcctcgcgccgcgaacagctcctaaccgactctgctggcgaagaaaaaatagtcagcaaaaatgtatcctgatgctacatcctcgccgcagcggccaaaatagcaggcgcaacgcttcctccttcacttcctttcaggccgcgcggtgcaaggaaaagtaaataacgctttgtcattttgttataaatcaaacaaatgcccgttggatttgcactctccggcggaggctttatctttaaaggtaccagctattttgctggcttataatgcaaccgaggagtgatggaaatggctaaaattctggtgctttattattccatgtatggacacattgaaaccatggctcacgccgtcgccgatggggcgaaccgggtggacggcgttgaggtggttgtgaagcgcgtgccggaaaccatgcaggctgaagcattcgccaaagcaggcgggaaaacgcaaaacgcgcccgtcgccacgccgcaggagctggcagagtatgacgccatcatctttggtaccccgacgcgcttcggcaacatgtccggtcagatgcgtactttcctcgatcaaaccggcggtctgtgggcgtccggcgctctgtatggcaaaatcgccagcgtatttagctcaaccggtaccggcggcggccaggaacaaaccattacctcgacctggacgacgctggcccaccacggcatgatcatcgtcccgatcggctatggcgcccaggagctattcgatatctcccaggtacgcggcggtaccccttatggcgcaaccaccatcgccggcggcgacggctcgcggcagccgagcgaggaagagttagccatcgcccgctatcagggtgaacatgtcgccaaactggccgttaaactgcacggctaatcttctgcaggaggagcactatgccaactcaagaagcaaaagcacatcgcgtcggcgaatgggcaagtttacgtaacacctcaccggaaattgccgaggcgattttcgaagtcgcccactacgatgagaaactggcggagcaaatctgggaggaaggcagcgacgaagtgctggcgctggcctttgccaaaaccgataaagacagcctgttctggggcgaacagacgattgagcgtaaaaacgtctaggaggtttatccccacctgggctcaccctaacctgctaaaaaaacccggagtgctccgggtttttttcgttatttcgccgcctcgttgatcacctttttaaaggtctccagcgggcagaatccctggtcatcaaccggacagccgttaagcgccagagtgatccgctgcggcggggcctgcagggttaacgcgtcggcgttacgcagttgctcggtactttgatagacatactcaatcttcatcagatcgcgattaccggcgctgtcatgccagcgctgaaacagcagtttgccgccgataggagtgcgctcatactggccgggcagttgatagggcttaaaatccagggcggtgagcagcgaagcgatattcgagtcgtgtcccaccagcagcgtgactttcgccttgctggctccctcgcccaccagcgcgttatcgatatatttaaccagcggtttggcgacgttttgcgccaccgccaccgaggtaaacagactatcctgatagccatttttcagcttcgacagcacttgccactgcttatcgctggcgatctccccccacgccacctgatctttcgggaagccttcataatattgcagggtgaaggcgtctaccagcgagttgcccaccttcaacggtccggacactcccggctcctgctgataaccggcgctaaaggtatctttaccctcgctcagggaacagaccttcttctctttgcaggagggcgagttgcggtaatcgatcatcgtctccagcagcttgtagctctcggtcaactgcattccctggcgctctttttccatcgcctgcagcgctttctcgcgaaacgccggggagtcgtcggtaataaccgggttgaaggtcgggtccatggtgcccatctgcggctggtgatgcaccgggatgccgcagcccgggaacgcgccggtgataaagaactgcgcggtggcgacggtgcgctgcaggctgttagcgtaggcataaaccgcgttttccggcgggcactcgccgctggtcaccagcttctgctgcgccagccattcgcgcatatagtggcccatatacacctccagcacaccgcctttggtggtcagctggccgcccggcacatcccactgcggccaggccttggcggtggactgctccagcacgctgccgttattggccaacggcgcacacaagttgtgacgactcatgatcagcacctgctgcagctgatacccctccggggcggccgtgtcctgcgcctgagcgccagcggataacatcaccgcgccggcaacggcggcggcaagtagacggtttttcatcccttcatccttagtcatttattatcatcgcgttaattgtgccggatttatgacatttttcctggtaatcgctcgcaaacttagaccgtagccgaaaatttcccctgcagggcaaagagttttataatgaaacaattaacctggaggctttcgtgaaacgtacccgtctggaaaacagctgttgccctatcgcccgctccctcgacgttatcggtgactggtggtcgctgctgatcgtccgcgatgctctgcgcggggtgcgccgttttagcgaattccagaaaaacctcggtatcgccaaaaacatgctcgccgggcggctgaaaatgctggtggatgaaggcatcctgcgcctgcagccggcctccgacggcagcgcctggcaggagtatgtcctgaccgataagggccgtgccctgcaaacggtgctggtcgccctctcccagtgggcagacgactatctgttcgatcctgacgaaccggcgacccggctcattgaccgccagcagcgccagcccctgcgtaagctggtcctgcaggcggcggatggccgtgagctggccccggcggacatcaccatcgctatcccgctgaacgactaaacgctgccctcgacaggcaaaaatgaaaaagtcctggcaaaatggttgcattattaaacctaatatctcatgctgaatttggtttaataatgcaaccttttacgaggcatttctcatgacccaaccatcgcacacagcttttatcaccggcgcgtcctcaggtatcggcgcgatctatgccgaacgactcgccgcccgcggctacaacctgatcctcgccgcccgtcgtgaagaccgtctgcaggcgctcgccgaccagctgcaggcgcgctacgccatccaggcaagcatcctcaaagccgatcttagcgaagagcacgggattgccgccgtagagcagcgtctgcagcaggatcccgccatcgacctgttcattaacaacgccggcaccgcgaaattggcgggttttctcgccagtacgccacgcgagcaccaggcgattcatacgctcaacaccaccgcgctgctgcgtctgagctatgccgcgctggccgctttcaccccacgacaccgggggacgctgatcaatattgcctctatcctcgcgctgcatacgctgccgggcagcgcagtctacagcgccagcaaagcctgggtgttgagcttcacccgcggcctgcaggaggagtttgccgacagcggcgtgcgtattcaggcggtattgccggcggcgaccgctaccgatctgtggccgacctccggcgtggcgctggacgctctgcccagcggcacggtaatgaccaccgaggatctggttgacgccgctctcagggggctggagatgggggaacaggtcaccttaccaccggttcatgacctgggactgtgggagacttttgagcagtccagagtggcgctgtttaccagcgcgcgaaccggacagcctgcgccgcggtatcgataagcggcaccgtgcggcgggcgctactccggtagcggaaccgccgtcagggtacagatcgcctcgtgctcgccgccgcggcgatcggtaatcaccaccttatcgcccgcctttttgccttcacacggcttgaggacctgctccacgatccgctcgcggctcgcctgacgttcactttcagcctgactggcgaaggcagacagcgccaacgctacgcccagcaggctgagggttttcttatacatgactgactctcagatcgttcttattcgcggtcagcgtaactcgctgtaggccgcacttctgtaaaatcacttaacggagtgttacgccatttcagctgaaacccaggcggtcacatccctgcgggaaacattttatcacaaccccgccgccggatattctcgcgatgaggcgtcatctttcagacatatcccgatgttatcttcacacagagccctgtatctttttccctttccaaacagaatattaggttggtctatgtcgggtcttattctctttatcgtcgcggtggcgctgctgggcgtcgccatctacagcctggtgtcgtacctcaaagagcggcgcgccagtcagttacctgtccataaaaagaagaaataataccttccgttccccaccgttttctgctgatttctttaccgtcctgtactgtcccttaccgaagccaaaacgaaagcaggcctgcgggcctgccttcgttcagtttatgcctcagaacctatgactcccaggcctgctccgctttagcggcatcaaactgcggcggcggtttgcggaagcgtcgggtcagataagtcaggtacagcagaccaagcgccgcccacaccaggccgagcgtcagggaggtggcctcgagattgatccacaataccccgaccgtcaacgccccgaccatcggcagcagcagataatgcagtcgatccttccaggttttgttgtaccccttgcgccgccagaagtggttgaacaccgacaggttaacgaaggtgaaggccaccagcgcgccgaaattaatcaacgcggtggcggtcaccaggtcgaagaacagcgccgacagcgcaacgatgcccaccataatcacgttcagcgctggggtacgccatttcggatgcacatagccaaaaatgcgctccgggaagacgttgtcgcggcccatcacgtacagcagacgggagacgctggcatgggaggccaggccggacgccagggtgttaacaaaggtggtgcacaggaaaatcgactggaacagcttgccgcccacgtacagcgcaatctccggcagcgcggcatcggggtctttaaagcgatgaatatccgggaagaacagctgcataaagaacgacgcgacgataaagataatgccgccgtacatcgcggtgagaaaaattgccttcgggatcacccgcgcggcgtcaggggtctcttccgacagggtggtcaccgcgtcgaagccgagaaacgagaagcagacaatggtcgcgccggtaataatcgggatcagatgcgcattctggctgataaacggctgcagcgaccagacggtacccaccccctcgcctttatgcagcccctgcaccaccagaatgacaaacaccaccatgatcgaaatctgcaccagcacgaacagggtattgaagttggccaccaggttaacgcttttcaggttcgcggcggtcagaatagcgacaaaggtcactacccacacccacggcggcacttcggggaacaaggccgagagatagatcttcgccagcaggacgttgatcatcggcagaaacagataatccagcagcgacgaccagccaaccataaagccgacgtgcggactgatggatttttgcgcgtaggtataggcggaaccggcttccggaaactgacgcaccagtttgccgtagctgatggcggtgaacagcacgccagccagcgccagcagataagacgccggaacgtggccattgctgatgccggagacgatgccgaaggtatcaaacaccgtcattggcgtcagataggccagccccatcatcaccacttgccagagtttgagggatttacgcagacgcggtctgcccgcctgagcggcgttatgcgccggaggattaatagccatcgcccatcccccccttgctgttaacagtttgcgggcccaacgtccgcgtgacaaacctgcttagcaaaggggtaaggcatagataaaagggtaagacggaccggtaagcggtagctggctggcatccaatgcggcctgagcggcctccctctccctgcggatatttgaacatctgcatcatctcatttcctcgtcacacactgtgtcgttaactgaagccccgttgccgcctgcgctccttaacgcgacatccgggaaatggctgggctcccagcaaaaacgtcggccaggctccgctcaggccgtatgatgctactgattaccaaacttatgggcccctcgcggggcgaccatcaggcgtttttcaacatccactcaatttcggtttctgtgataagacgctcaaactgcagtaattcatcatgcttacaggcatggaaaacatggcagaaacgctcgccgaggcgctcacgcaagtgatcgttctgcataaactcccacagcgcatcgctctggcggatcgggaatggcaggccctcttgttccagaccgttaccttccacctcttcctgtaaaggcagctgggggttatccagcccgtgcagaatgccggcaaaaatcgccgccatcaccagatacgggttggcgtccgcccccgcgacgcgatactccacgcggtggttctgccgctcgccgcacggaatacgcagcgcgacggtgcggttgttatgcccccacgaagcctgcgtcgggacgtacatccccggctggaagcggcgatacgagttcacgttcggcgccagcagcgccatcgaggccggcatcagatcgatcatcccggccagcgcgcgtttgagcagcgcagagtcttccccatcgccgtccaccagcacgttttcccctttattgttcagcatgctgatgtggatatgcatcccactgccggcatgctcttcataaggcttcgccataaaagtggcgtgcatcttatgcttctccgccatcaaacgcacgagacgttttaacgccagcgcatcatcgcaggcgtccagcacgttatcggtatggtgaaggttgatttcaaactggcccggcgaggcttccgccaccgcgccatcggcggggatcagctgcagtttggccagctcgtcgatgtcgttgagcacgtcggcgaagtggttaaggttatcgaccgagtagacctggctttgggtgttgcgatcgtcagtgcccggcgcacacggcggctgcaggtagccttcggcatcgcgtttgcggtccagtaaatagaactccagctctaccgctaccacggggaacagcccgcgctggcgcaactgctgccagaggcggttgagtacgttccgcggctcaacgtcaaagggagcgccatcttcatcaaccatggttagctgtacctgggctatcgattgtgggtcagccgccgaaggggttaaggtgccgggtaccgggatgcagctgcgatccggctcgcccatctcctggcccagaccggcctcttccaccacattgccgagaatatccatcgcaaacaccgaggccgggaaataacagcctttctccagtttgctcaggccggcaaccgggatgcgcttgccgcggaagcagccgttcaggtcagtgaggaggacatcgacatactgggtatcagggtaggtttcgaggtagcgcttcacttctttcgcgaacgcgctaacccgtctctcttccgtttgctgaacaaaattctcaacttctacgatattggtttccatgattcaccgccgttggttgggtttcggtcctgcactcagaccgttaaatataatgtccaccccatcgactgtgtatgcaaataaattgtttgtcaaatgttaaattaagtttgcaaagggctatttccactgctagattgagaaaatattgaacgatatggccgttaaacccgctatagcggtcataatttagtccactttgtgagggcgatcatggaaaatataatgtacaagccagttattggcgtcgtgatgtgtagaaacaggcttaagggtcaccagacccagaccttgcaagaaaagtacctgaatgcaattgttaacgccggcggactgccgattgccctgccgcatgcgctggcggagccggagctactgaacgcggtcgttgataaactggacgggatctacctgccaggcagccccagcaatgtgcagccgcacctttatggtgaaaacggcgatgagcctgacgccgaccccgggcgtgatcttctgagcatggcgctgattaacgccgcgctcgaaaggcgcatccccattttcgccatctgtcgtggactgcaggaactggttgtcgccaccggcgggactctgtatcgtcgtctgttcgagcagcctgagctccttgaacatcgcgaagatcctgaactgcccgtcgagcagcagtatgcgccgtcccatcaggttgaggttcaggaaggaggattgctgtcgcaattgataccgggctgcaacacgttttgggtaaactcgctacatgggcaaggggcaaaaaccctcagtccgcagctgcgcgtggaggcgcgagcgccggatggactggtggaagcggtcagcgtgaacgatcatcctttcgcgctgggcgtacagtggcatccagaatggaacagtagcgaatacgccctgtcgcgtatgttgtttgatggttttatcaccgcctgtcagggccatcatgctgaaaagcggcggcgctgaccactaccgttaaggaaatgcaaatatgagcgatgacggactggcgccagggaaacgtctgtcagagatccgccagcagctgggtctctcacagcgtcgtgccgccgaactgtctgggttaacacatagtgccatcagcaccatagagcaggataaagtcagtcctgccatcagtacgctgcaaaagctgctgaaagtctatgggctgtcgctctcggaattcttttctgaacccgaaaagccggacgaaccccaggtggtcattaatcaggatgacctgattgagatgggaagtcagggcgtttccatgaagctggttcataacggaaatccgaaccgtacgctggcgatgatttttgaaacttaccagcctggaaccacgaccggggagaggattaagcatcagggtgaggagataggcaccatactggaaggtgagatcgtgctgaccattaacggtcagtcgtaccacctggtggctggacaaagctatgccattaataccggcattccgcacagcttcagcaacacctcggcaggcatctgccgcatcatcagtgcccacacccccaccacattctgattatttcgcctgaacgaggttcaggcttacttcaggcctgtcgcgacggaaaatctattttcgtcgcggcgaagaactcgtagtaataacgtctgcgccgtacggaatattatttcctgttggccctgaaataattaacgccagtgaatggcgactcgctcctgaataattcgggttgcaaacaacctgtcaaaactccggagaataaaacggtattcaactccggggatacgctatgccctgcgcccggcgcagtgccccgtgcagcctgaaaacgccgcactgattattttgccgataatgtttttaaggagtcatgatgaattttcagcacctggcttactggcaggaaaaagcgaaaaacctggccattgaaacacgcttatttattaacagcgaatattgcgccgcggccgataataccacctttgagactatcgaccctgccgcgcagcagacattagcccaggtcgcccgcggtaaaaaagccgacgtcgaacgggcggtgaaagccgcgcgccaggcttttgataacggcgactggtcgcaggcctcccccgcacagcgtaaagcgatcctcactcgctttgctgatctgatggaggcccatcgtgaagagctggcgctgctggaaacgctggataccggcaaaccgattcgccacagcctgcgcgacgatattcccggcgccgcccgcgccattcgctggtatgccgaagcgctggataaagtctatggcgaagtggcccccaccggcagcaacgagctggcgatgatcgttcgcgaaccaattggcgtgatcgccgcggtggtgccgtggaacttcccgctgctgctggcctgctggaaactcggcccggcgctggcggcgggcaatagcgtaatcctcaaaccctcggaaaaatcgccgcttaccgccctgcgtctggccgggctggcgaaagaggccggcctgccggacggcgtgttgaacgtggtcagcggctttggccacgaggccgggcaggcgctggccctgcatcctgatgttgaagtcatcaccttcaccggctccacccgcaccggcaagcagctgctgaaagacgccggcgacagcaatatgaagcgcgtgtggctggaagcgggcggcaagagcgccaacattgtcttcgccgattgcccggatctgcaacaagcggttcgcgccaccgccggcggcatcttctacaaccagggacaggtgtgcatcgccgggacccgtctgctgctcgaggagagcatcgctgacgaattcctggcgcggctgaaagatgaggcacaacactggcagccgggcaacccgctcgatccggacaccaccatgggcatgctgattgacaatacccatgccgacaacgtgcatagctttattcgcggcggcgaaagccaaagcaccctgttcctcgacggacggaaaaacccgtggcctgccgccgttggcccgaccattttcgttgacgtcgacccggcatcaaccctcagccgggaagagatcttcggcccggtgctggtggtgacccgcttcaaaagcgaagaagaggcgctaaagctcgccaatgacagcgactacggcttgggcgccgcggtgtggacccgcgatctctcccgcgcccaccgcatgagccgccgcctgaaggccggctcggtcttcgtcaacaactataacgatggtgatatgaccgttccgttcggcggctacaagcagagcggcaacgggcgcgataaatcgctgcacgcgctggaaaaattcaccgaactgaaaaccatctggattgccctggagtcttgatcatgactgaacataccactagctactatgccgccagcgccaacaagtatgaaccgttcccgacgctggagggatccatcaactgtgacgtctgcgtcgtcggcggcggctacaccggcctctcgtctgccctgcatctggccgaaatgggctacgacgtggtggtgctggaaggggcgcgcatcggcttcggcgccagcggccgcaacggcgggcagctggtcaactcctatagccgcgatatcgacgtcattgaaaagaactacggcccggatgcggcaaaaatgctcggcagtatgatgttcgaaggtggcgatatcatccgcgaacgcatccagcggtatcagatccagtgcgattaccgcccgggcggcctgttcgtggcgatgaaccataaacagctggaaaccctggaagagcagaaagccaactgggagcgctacggcaacacccagctggagctgctggacagagaagccattcgtcgcgaagtggacagcgaccgctacgtcggcgccctgctcgaccacagcggcggccatattcacccgctgaacctcgccatcggcgaagcggatgccattcgcctgaacggcggccgggtgtatgagcagtcgccggtcacccgcatccagcacaccagcccggcggtggtcagcaccgcgcgcggccaggtcaccgcgcgctacgtgatcgtcgccggcaacgcctatctcggcgataaactggagccggagctggcgaaacgcagcatgccgtgcggcacccaggtggtcactaccgctccgctgtcggaagaggtcgcccgctcgctgatcccgaaaaactactgtgtggaagactgtaactacctgctggactactaccgtctgaccggcgacaaccgtctgctgtacggcggcggcgtggtctacggcgcgcgcgatccggacgacgtggagcggctgattatgccgaaactgctgaaaaccttcccgcagctgcagggggtgaagattgactaccgctggacgggcaacttcctgctaaccctgtcgcggatgccgcagttcgggcgtctcgataacaatatttactacatgcagggctacagcggccacggcgtgacctgtacccaccttgccggacgcttgatttcagagctgctgcgcggcgacgccgagcgtttcgacgccttcgccaaactgccgcactacccgttcccgggcggccgcagcctgcgcattccttttaccgccatgggcgccgcctactacagcctgcgcgaccgccttggggtttaatcgcctctgccgacggcgctggccgtcggctcatgctgcggatagtgcagctgaaagtagtggcgcagaaactccacggtggtgcggattttggccgacgtcgccagccgggagacgtaaaccgcccagacgttggccggctgccagtagtccggcagcacctgcaccagatgtccgctggcgatattctcccggacgtcccaccacgaacggagcgcaatcccctgcccgtccagacaccactgatgcacaatttcaccatggttggaggagagcggcccggttaccttgatggcgtgctggccctctttgctatgcaattgccagacgccgaacggatgatcgcgctctttaatcaccaggcagggtaacgcggccagatcgctcagctgtttcggcggcgcatggcgggcaaggaactgcggcgaggcgcagagtacgcggtgattggccgccagctggcgggcaatcagattcggtgcgatatcgtcgccgacgcgaatatcgagatccaccccttcattgactaaatccaccagccggtcctggacatcgaaacgcagctccagctgcgggtactggagagccagcgccgacagcgccggggcgacaacccgacggccaaagccgaagctactgataatacgcagcgttccctgcggcacctggcgcacgtcggaaagctcatccatcatctcatcgacatcctgcaaaatgcgctgcgcccattcatagatccgctccccctcttcggtaatggtgacccgacgggtggtccggtgcagcaacatcacattcagggtttgctccagcagcgaaacccgcttgctgacgaacgccggcgatacgccaagctcctcggcggcggcggcgaacccggcccggcgagcgaccagcataaagacgcgtaaatcatttagcagcggcagattattcatgatctgtgttttatgtttcaccagttagcgtgattaattatgaaccagtcaattataggataggcaggtggtcaaacatcatcgttaaaaagtgagaaccggaatgaaaaaaacctgtcgtattgccgccatcccgggtgacggaattggcaaagaagttctgcctgaagggattcgcgtgctgcaagccgccgcacagcgttgggatctgtcgctgagcttcgagcagatggagtgggcaagctgcgaatattacgcccattatggcaagatgatgccggacgactggcgcgagcagctgcagggcttcgatgccatctacttcggcgccgtcggctggccggataccgttcccgaccacatttcgctgtgggggtcgctgctgaagttccgccgcgagtttgaccaatacgtcaacctgcgcccggtgcgcctgttccccggcgtcccctgcccgctggcgggtaaaaaggccggcgatattgatttttacgtggtgcgcgaaaataccgaaggcgaatattccgccctgggcggccgcgccaatgaaggcaccgagcatgaagtggtgattcaggagtcggtctttacccgccgcggcgtggaccggatcctgcgctacgccttcgaactggcgcaaagccgcccacgcaaaacgctgacctccgcaaccaaatccaatggcctggcgatcagcatgccctactgggatgagcgggtggaagagatggccaaaaactatcccgaaattcgctgggacaagcagcatatcgatatcctgtgcgcccgtttcgtgctgcagccggagcgtttcgacgtggtagtgggttctaacctgttcggcgatattctctccgatctcggcccggcctgtaccggcactatcggtattgcgccatcggccaatctcaatccggagcgcaatttcccgtcgctgttcgaaccggttcacgggtcggcgccggatatttacggtaaaaatatcgccaacccgatcgccaccgtttgggccggggcgatgatgctcgatttcctcggcaacggcgatgagcgctaccacgccgctcacgatggcattctggctgcgattgagcagacgatcgcctgtggaccgaaaactccggacatgaaaggcagtgcctcaacgcagcaggttagcgaggctatctgcaaggccattttggcgtaattaccccgccgctccccggtggcgctgcgcttaccggggctacaatggcacgataatgtagtgagtagcccgggtaaggcgcagccgctacccggcaaaaaacggcacagcaagtagcccgggtaaggcgcagccgctacccgggaaaacccgcgcgcctggtccgccaactcccctctcttttcgctatgcagaataccccacgattgacaagtgaaccgcatcacagcggtgaaccttattaattcctgaaaggacagaacctgcgccaattcaccttttattatttccgtttcgtgttttattgcttcacgaaacggccaattgtttaattcatgtaacgaagaaataatccaattgttaatagcatcttgctgcgaaccctgaccctacagcgtgataacaacgacaggctaaagccaccgacgggcaatcatgcccaggagatcactcatgttgagcaacgtaaagaaaaaagatgtgccgctgattgccatcagcctggcggccattgttttcatcgccgctacattaagtctcttcccccagcaaaccgcgcaggcggctgattcgatttttaacggcgtgacccgcctgctgggttccacggtacaggtactggtgctgctggcgctgggactggtgttgtatctggccaccagcaaatacggcaatatccgtctcggcgaaggtaaagtcgaatacagtaccctctcatggctgtttatgtttatctgcgccggtctcggctcctccacgctgtactggggcgttgccgaatgggcttattactaccagaccccgggccttaacattgccccgcaatcgccgaaagcgctggaatacagcatcccttactctttcttccactggggcgtaagcgcctgggcaacctataccctcgcctcgctgatcatggcctatcacttccacgtgcggaaaaataaaggcctcagcctctccgggatcgtttcggcgatcaccggcgttaatccgcaaggtttctggggccgtctggtcgatctgatgttcctgatcgctaccgtcggcgcgttaaccatttcgctggtagtcacctccgccaccttcacccgcggcctgtcagcgctgacaggactgccggataacttcaccgtgcaggcatttgtgatcctgctctccggcggtattttctgcatgagttcgtggattggcatcaacaacggcctgcagcgcctgagcaaaatggtcggctggggggcgtttctgctgccgttggtggtattactggttggtccgaccgaattcatcaccaataacgtcattaacgccgtcggcctgacgacccaaaacttcctgcagatgagcctgtttaccgacccgctcggcgacggcgcctttacccgcaactggaccgtcttctactggctgtggtggatctcctacaccccaggcgtggcgatgttcgtcacccgcgtctcccgcgggcgcaaaatcaaagaggtgatctggggactgctcctcggtagcaccgccggctgctggtttttcttcggggtgatggaaagctacgccatgcaccagttcgttaacggcgtgattaacgtaccacaggtgatgcagactctcggcggcgaaaccgccgtccagcaggtcctgatgtcgctgccggcaggtaagctgttcctcgccgcctatctgttcgtgatgattgtattcctcgcctcgcacatggatgcggtggcctacaccatggcggcgaccagtacccgcaacctgcgcgaaggcgaggatccggatcgcggcatgcgcctgttctggtgcgtggtgatcaccctcatcccgctgtcgattctgtttaccggcgcttcgcttgagaccatgaaaaccaccgtggtgctgaccgccctaccgttcctggccattttactgattaaaaccggcggcttcgtgcgctggttaaaacaggactacgcccacgttccggtccatcagatagaaacccatacccccgagcccattattaaagccgagacgctgccggttggcgcggtactcaaaggcgacggccagtcgctgtaaaacctcttactgacaataatcacaaggagaccctacatgagcaatttgagccctgacttcaccctgccgattaacttttgcgctaatccgcaggatgcctggaccattccggcccgtttttataccgacagccaggcgtttgagcacgagaaagagcgcatcttcgccaatagctggatttgcgtcgcccacggcagcgaggtcgcccggccgaacgattacattacccgggagatcatcggcgaaaatatcgttatcgtccgcggccgcgacaacattctgcgcgccttctataacgtctgcccgcaccgcggccaccagctactgagcggcgaaggcaaagccaaaaacgtgattacctgcccctatcacgcctgggccttcaagctggacggcaatctcgcccacgcccgcaactgcgaaaacgtggcgaatttcgatagcgaaaaggcaacgctggtgccggttcgcctggaagagtatgccggctttgtgtttatcaatatgaatccggaagcggagagtgtggaaacgcagctaccggggctgcaggacaaagtgctggaagcctgtccggacgtgcatgatctgaaactggcggcgcgctttaccaccctcaccccggcgaactggaaaaatatcgtcgataactatctggaatgttaccactgcggtccggcgcacccgggcttctcggattccgtccaggttgaccgctactggcacaccatgcacggcaaatggacgctgcagtatggcttcgccaaaccgtccgagcagtcgtttaaattcgaagagggtaccgacgccgcgtttcacggtttctggctgtggccgtgcaccatgttcaacgtcacgccgatcaagggcatgatgaccgttatctatgaattcccggtggatgaagagaccactctgcagaattacgacatctatttcaccaacgaagagctgactgacgatcagaaagcgctgattgagtggtatcgcgacgtgttccgcccggaagatttacgcctggtggaaagcgtgcagaaggggctgaagtcccgcggctatcgcggccaggggcgcattatggcggataacagcggcagcggtatctccgagcacgggatcgcgcatttccacaatctggtcgcccaggtattccagccgtaattattgaaggagttggccatgtccgtatttcactcaaatctgtttcgccagcaggcgctgattgccggaagctggcgcgacgccgcagacggtacaacgcttgccgtcagcaatccctccaccggcgcgacgctcggccagatccccaatatggggcgtgcggaagcgcaacaggcagtggatgccgccgcggccgcgctgccgggctggcgcgcgttcaccgccgcccagcgcgccgcgctattgaaaaactggcaccgcctgatcctcgaaaacaaaaccgcgctggcgcagataatgaccgccgagcagggcaagccgctggcggaagcggaaggcgaaatcgcctatgccgcctcgtttatcgagtggtttgccgaacaagggaaacgcgccaacggcgagataatcccctcccccggcgccgataaacgcctgatggtgatccgccagggggtaggcgtctgcgcggcgatcaccccgtggaacttcccggcggcgatgatcacccggaaggccggcccggcgctggccgcgggttgtacgatggtgattaagccggctaacgaaacgccgtttaccgcgctggcgatggcggagctggcgaatcaggccgggatcccgcagggcgtcattaacgtcgttaccggccagtcgcgagagattggcgcggtgttcaccggcgatgagcgggtgcgtaagctctcctttaccggttcgaccgaagttggccgcgtgctgatgcgccagtgcgcggaatccatcaaaaagctctccttagagctcggcggtaacgcgccgtttatcgtctttaacgacgccgatatcgataaagcggtcgagggcgcgctgatcgccaagttccgtaacgccgggcaaacctgcgtctgcgtcaaccgcttctatattcatcgcgccatctacgaccaattctgcgataaattcgtcgcccgcgtcgccgccctgaaagtgggcgatggcagcgagtccgatgtacagattggcccgctgatcaacgccgacgccgggcgcaaagtgcagtccctgctcgacgacgccctgagccgcggcgccacgctgttaactggcggtaaagcgcatccgctgggcggtaatttcttcacccctacggtgatcggcgacgtacagccggggtcactgctgctgcaggaagagatcttcggcccggtggccgctttggtgaaatttgacgatgagcagcaggtcatcaaacaggcgaataacaccatctacggcctcgcctcctatttttacagcaacgatgccgcccgtatctggcgcgtctccgagcagctggaatacgggatggtcggtatcaataccgggctaatttccaacgaagtcgcaccgtttggcggggtaaagcagtccggtcttggccgcgaagggtcggaacacggaatcgaagattacctggagatgaagtatctctgccaggggttgtaaatctgctctcccggcgatggcgctagccacgccgggattttttaatggagttcagcgatgtctgattatcaaatgtttgaggcggtcgttcgcgatgttgaacagatcacccctcttgtgaagcgtttttcgctggtgtcgccgaccggcgccccgctgccggcattcagcggcggcagccatattatcgtccagatgcaggatggcgagcagcgctacagtaacgcctattcgctgatgagctcgccgctggatacctccagctggcagattgcggtgcgtcttgagtcgccttccaaaggcggctcgcgttttatgcaccagcgggtgcgcccgggcgataccctgacggtgtccacgcccaacaatctgttcgccatcgaaccacaggcgcgaaaacatctgctgatcgccggcggcatcggcattacgccattcttatcgcatattccggaactggaacagcggcaggccgactggcagctgcattactgttttcacgacgccgacagtaatgctttcgtcgatgcgctcagcgctgcgccatggcgcgatcgggtcaatgttcatgtatcagcgctcggcagccgtctcgacctaccgcgcctgttcgccgacctcgagccaggaacccacgtgtatacctgcggcccagcggcgcttaacgaggcggtgaaagccgccgccgaacgccatcaggtgcccgccagccagctgcactttgagcagtttatccttgaggataaaagcggagaggcatttaccctggtgctggcgcgttccggacgcgaatttaccgtgccgcaggatatgaccattttgcaggtgatcgagaataacaaagcggcgaaggtcgaatgcctgtgccgagaaggggtgtgcggcacctgcgaaacgatgattctggagggggaagccgaccaccgcgatcagtattacagcgaggaagagaaagccagccagcagagtatgctgatctgctgctcgcgcgccaaaggcggccggttagtgctggatttgtaaagcgcacaccggcaaaacggcggtgagatggactgaccccgcggaattgttccaacgtactaccactccatggcgacgaggtcagtggcgcggatactatcggcttcatcctccgcctgattagctttctgtgcggcaccggcgatagccggcgccgcctgctcagggattagccgctaaatacccgcgccttgccgctgaccgtcagtcgcaccatcgcgccgggctgccacgccggctggctgacggtgcgatcgccaagaaacaacgccgtctcttcatccaccggctgcgagtgattgccttttccctggcgctgatggtatttcttgctggcgtgttcgtcattaactggcaaccgggtcctgacacttagccctgagtctttgcctgatgaccctctgttactgctcccggccagaatgatggtcaataagcggccggtgctgatctatcagacgcgcttagcgccgatcagggtgattgtcacgatcagcgacatccatctgcgcgatgcgctatatagcgataccgatgacaacgggctggcactctgggtgcagaaccaaatgattgccagatatggcgatgttaagccgctggctgcggacccacaccaggaggtatttacctcgcccgctggcaaaacagcacgacgccagcgcgctcgcccgcggaatttattccgctggccgaacgtaccggcttaattattcccctaacccgcagcctgatggcgcaggtcaacgcgcagatgagaccacactttagtaaactaccggatgggtttcatattggcctgaatatcagcgtgtcatatattaacgcgccgacgtttatcgatgactgcctgcactatcagcgcggctttgagggtaaagcggtgaagctgatgctggagatcacggagcaggagccgctgttgctcaacggggcggttgtggacaagctcaatacgttacactcccgcgggttttccatcgcgctggacaactttggcaccggctattccgggctttcctgtctccacgagctggttttcgactatatcaaaatcgatcagagttttgtcggccgggtaaccggggaggcgccgacaagcaagctgctggactgcgtgatagagatggcgcggacgctgtcactgcgcatcattgccgagggcgtcgaaaccgaggcccaacgggattatcttaatcgccagaatattcatctgctgcagggctactatttctggaagccgatgccctacgtcgcgctggtcatgctcctgctgagcaaaccgaaggcgcggattgtcgaagaataagcgggcgttgtgaaaagtcctgccatgcgacgggctatgtatccgtcagcgctgtgggaatgaaaacgtcgtcggtcgctgtccgggtcatgcacgaccgaccggacaaagcaagaaggggttacctttcggtaaccccttcttttatatggcggaagcgcagagattcgaactctggaaccctttcgggtcgccggttttcaagaccggtgccttcaaccgctcggccacacttccggtgtgaggcgcactataaacacctcggcggatgctgtaaagcatcattttgatcaactgccttaaaaacaaacaattttgtgttattcgtctgaatttcaggcagtttgcacagaaaatcaacgcccatcgccgctggcggatgggtgttttttaatgtacatgtctttggtgtagtaataccccagcttatccggcgtgaagccccctacccaaggtttcaccagatgggtacgtacatagtgatagaccggaatggcgggaacatcctgcgccagcagatcttccgcctgctgatagtatttgccccgggtcgccacgtcggaggctttcgccgcattgcgcagggcctcatcgtaagcagggttgctgtactgactggtgttctcgctatccccggtacggaaagtattgaggaaggtggcggcatcgtcgtagtcggcaatccacgcgtagcggacggcgtcgaagttatgcgtatgcatggtatccagcatcgtcttccactcctggttctgtagcttcgcctcgacgccgaggtttttcttccacatagagctggcggcaatggcgatacgctggtgcgactcagaggtgttatagagcagggtaaagaccagcggatggctttcatcataccccgcctgcgccagcagttttttcgcctcggcaatccgtttctcacgcggccagctggcgtagtccgggttatgcagcgtcacgccgccgatatccggctgaccgatcagccaggccgggcgctggccctggccaagcactttttcggcaatgatatctttatcaagcgccatattcagcgcgcgacgcacacgggcttcgttaaacggcggccgggtagtattgaattcgtagtaataggtcgccagctgcggcgaaacgtccagctggtcgcccatggttttctgcaactgcgcaaactgattgatcggcaccgtatagacaatatcaatctcccctgctttgtagcggttgacatcggcggcctccgaagagattggcaggtaagtcactttattaataacggtatgcgcattatcccagtactttgcattacgttcagccaccagccgctcattcaccacccattgggacagcttatacgggccgctggtgacgatatgctctggtcgggtccatttatcggcataccgctccaccagcactttgtcgatcggtaccagcgaagggtgcgccagcatcgccaggaaggcggcattcggctgggtcagagtgacctgcagcgtggtgtcgttcagcgctttcacccccaacgtctcgggtcccttttgcccgagggcaatctcgcgggcgttggcgatatgcatattgccagggtagctcgcgtagggggaggctgttgccggcgagaccagccgttgccagctccagacgatatcctgcgctgtaatggcagtgccgtcggaccaggtcagaccggggcgtaaatgaaaggtccataacaggttgtctttgttttcccagcgttccgccagtcgcggctggatcgcccccgctggcgacacgttaaccagcccttcaaagagatcgctaatgatattgaattcaacatcgctctcgactttatgcggatcgagtgacgccggttcactgccgttatttctgaccagctcctgcttttccgccagctgggtgcccggcggcacctgcgccgccagcgccccgccgctcatagccagcatactgacagccaggagtgttcgggtgatgtgattttttttgtgtaatgtcatttccctttgcctttgacgtacggggtaatccccctcttccacacttagtcgcagaactgccataaggcaatatttttcagtgacctataagatttcgatcggctcagcgacgcgaaaagcgaaaatatatcgcttttccctatctatatagaattttatgccaggcaaaagcggtaaaaactaagtaaagatgggtaaaagcattagggcttcacgcttgtttttcttattctttatccctaattacatctgtcataagagagtgactcatggatcgcataattacatcatcgcgtgaccgttcctcgctgctcagcacgcacaaggttctgcgtaacacctacttcctgctcagcctgacgctggcgttttccgctatcaccgccaccgccagcacagtgctgatgctcccttcgccgggtctcattttgaccctcgtggggatgtacggtctgatgttcctgacctacaaaacggcgaataaacccaccgggattatttccgccttcgccttcaccgggttcctcggctatatccttgggccgatgctgaacgcgtatctttctgccggcatgggcgatttaatcggcctggcgctgggcggcacggcgctggtcttcttctgctgctcggcctatgtgctgacgacgcgtaaagacatgtcattccttggcgggatgctgatggccggcgtggtggtcgtcctgattggtatggtcgctaacctgttcctgcagctgccggcgctgcacctggcgattagcgcggtgttcatcctgatctcttcgggcgccatcctgttcgagaccagcaacattatccgcggcggtgaaaccaactatatccgcgcgacggtcagtctgtatgtctcgctgtacaacatttttgtcagcctgctgagcatcctgggcttcgccagccgggactaaccgctcccctgcttaacagaggcctcgcttatgcggggcctttttttttgctacactgcggccagtttcaggcggtatgtgaaaaatcatgtttatttttgaaggcaacgaaattgaaacggatagcgaaggctatctgaaagataccacccagtggagcgaggcgatggcggaagtcattgccgcgcaggaagggataacgctcgccgttgaacactgggaagtagtgcgctttgtgcgcgagttttaccttgaatttaacacctctccggcgatccgtatgctggtcaaggcgatggccaacaagtttggcgaagagaaaggcaacagccgctatctctatcgcctgttcccgaaaggacccgccaaacaggcgactaaaatcgccggcttgccgaagccggtgaagtgcatctaatagaggatcgcgaatttgtcccagctgcgggtgggttgatggggctcggttaacactcggtcaacccgcgcgctgcgcggccccccggctttcagccaggcgatgagtttttccacctgctccgcctcgccgcaggcaagcacttccaccccgccgtcatccagattacgggcataaccggtcacccccagctgcagcgcttcccgctgcgtggaatagcgaaatcccacgccctgaaccgaaccgtaaacccatgccattgtgcagatactggccataatcatctccttttcgctcacgctatacgctgaggatagcaaattcgctcagcgtacatgcttcggcagtaaaccataatgctgacggaagcgcgcggtaaagcgcgatcccgactgatatccgctgttctgcgcaatttcgcctattggccgcgaggtggtctgcagctgccccagggcgtgggccatccgcacctcctcgacgatctggcgaaaactctgcgattcctgctgcagccgacggcgcagcgtggactcgccgagaaagagcattttcgccacccgcgacacgctccatgcctgcgccggcgacagcataatcagctgccgcacctgcgccgacagatcctgctgccgctcgacgagcagcgggcccgcatagccagcctcatgcagggccagcagcagccccatggtctggtgctgctgcagcgcgacggacaatccctcccgcaccgcctgcagaacgctttgccacataaacgccagctctgtcgtcaccggtgcgcagagcgaggtcaggcgccctggcggtggttcgctgagataacgagtcttaaacctcgtcagcagctcgggcgtcagcgatagcagatcggagcaaaataggccattctccggctggttaatcacctccagttccacgtcagctggcaaaacaatcagctgttgcggagtcgccagcacccggctctccccttgcacaatcactttgctgccgcgtttcacccgacagagcgccggggagaacagccgcacgcgatgcagtctgcatagccgtcgggtggtgatctccgccgcggttaaggcgttatgctgaaagtggatactctccatcagaccgaccttttattttaacgcccggccatcgccgtcaactgtgcgctggcgagagcatggctatgtaacagatagccgaccagcgccccgctggccccggcatccaccggcagcgtggggacatccagcgcccataccgtaaagcgatagcggtgcggtttatctcccgccggcggacaggcgccgccgaagccggcatagccaaaatcgttgcggccctggaccgctccgcccggcagtgtagcgctgtttttatctcccgcgccagcgggcagcgaaaagacgctgctggcgatattgaccaccgtccagtgccaccagccgctgccggtaggcgcatcgggatcccggacggtgaccgcgaagctgcgcgtgcccgccggggcgtttttccatgccagctgcggagagacattgcctccggtacagccgaaaccggcaaaccagtgctgctgggccagcggctgcccgtcacgcatatcattgctgcttacgctaaacggcgcggccatcgcgccgctgctcacagccgctaccatcgccacagccatgcggatatcttttttcatcgtctgctcctcgttggggtgagaaaacagggtatgagagtccgcaccagctgaatgtgccgaagcgcctgcattttgtgccgaaacgctcacctgtgccagccgggcgaaagatgcttgcgtgcgccaggtgtgctaatctacgcgccatttttcggtgccgacattcccgttgcttaaaggtagccccatgacagattccctattcccccgcttagtgttagccaaaggacgcgagaaatccctgctgcgtcgccatccgtggatattctccggcggcgtcgcccgcatggaaggtaaagcccgcagcggtgaaaccatcgatatcgttgaccatcagggaaaatggctggcccgcggcgcttactcgccgtcgtcgcagatccgcgcccgcgtgtggaccttcgaccgcaatgaagccatcgatagcgccttctttgaacgccgtctgcagcaggcgcaaacctggcgtgcctggctggccgagcgcgatggcctcgacagctaccgcctgatcgccggcgagtccgatggcctgccgggcgtcactatcgaccgctttggcaactttttcgtgctgcagctgctcagcgcaggcgccgaataccagcgcgccgccatcatcagcgccctgcagaacctgttcccggactgcgccatttacgatcgcagcgatgtcgccgtgcgtaaaaaagagggactggagctggcccaggggccggtggtgggcgaactgcccccggcgctgctgccgatcaccgagcacggcatgaagctgttagtcgatatccagggcgggcacaagaccggctactacctcgaccagcgcgacagccgcctggccacccgccgctatgtcgcggataaacgggtgctgaactgcttctcctacaccggcggctttgcggtgtcggcgctgatgggcggctgccgccaggtcaccagcgtggatacctctcaggaggcgctcgacgttgcccgccagaacgtggagatcaacggactggatctgtccaaagcggagtttgtgcgcgacgacgtgttcaaactgctgcgtaaataccgcgatcagggagagaaattcgacgtgatcgtgatggatccgccgaagttcgtggaaaataaaagccagctgatgggcgcctgccgcggctataaagatatcaatatgctggcgatccagctgctgaaccccggcggcgtgctgctgacattctcctgctccgggctgatgaccaccgatttatttcagaaaatcatcgccgatgccgcaattgatgccgggcgtgatgtacaatttatagaacagttccgtcaggctgccgaccacccggtgatcgcaacctacccggaagggctgtatctgaaggggtttgcctgtcgcgtcatgtaacttgaaaaacgaaacatgagcctcatatagggagtattcatgtttcccaggaggtgcctatgatagccagcaaattcggtatcggccaacaggtccgccatacgctcttgggctacctgggcgtcatcgtcgatgtcgatcccgagtattcgctcgcggagccggaagaggatgaaattgccgccaatgacgaattgcgcgcggcgccctggtaccatgtggtgatggaagatgatgatggccagccgattcacacctatctggcagaagcgcagctgagcagcgaaacccgcgacgaacacccggaacagccgtccctcgacgaactggccaaaacgattcgtcagcagctgcaggctccgcgccttcgcaactaaaacaaaaccccgccaggcggggttttttgttattttgctaatcccagtcgcggtagctcaatggccgggcaacgatccatcaccacgttcaatccggcttccctggccagcaccgcagcctgctcattgatcacccccagctgcagccatagcgttttcgcgccgatggctatcgcctcctgcgctacaccccacgccgcttctgaattacggaagacatcaaccatgtcgaccttttccggaacgtcggcgagcgtcgcatacccctgttgtcccagcagcgtcttgcccgccaccttcggcgaaaccgggataacgtgatacccctgatccagcagatacttcatgacccggtagctcggacggtcaggcttgtcgctggctccgaccagcgcaatcgtccgtgtcgaggtcaggatgccagcaatatcattctctttcatggtttcctcctgctatttcacttaagtgtatgctaatccgcagcagggggccatccagcctaacccacagattcagcaaaattttcatccccgatgcttgcagcgacagccacattcagtaatctgtttgcaggtcaaaatgtggaatgaaaatatggaactgacaacacgtaccctgcctgcgcaaaaacatatcgcgctggtggctcacgatcactgcaaagatatgctgatgaaatgggttgctcgccatcaggcgctgctggcgcaacatattttgtatgctaccggcactaccgggaatctcgtctcccgggctaccggcctggaggttaatgccatgctgagcggtccgatgggcggcgaccagcaggtgggtgccctcatttcagaaggcaaaatcgacgtgctgatcttcttctgggatccgctgaccgccgttccccacgacccggatgtcaaagcgttgctgcgcctggccaccgtctggaacattccggtcgccactaacgtctccaccgctgactttattatccagtcgccgcacttcggtcaaccgctcgatattctgatcccggattatccacgctatcttgccgagcgcctgaaataatcgagccgcgattacggcttcctggccatgggcacatccagcgcctgcaggatctcgacaaacggcgaaggttgcgccttgttaaataacagccatacccggtgacgagcgcgggtgagcgccacgtacaacagtctacgctcctccgcatccggaaaatcttccggctgcggcaggagcgcctgctccataatcgactcgcgcgccggggccggaaacgcatcctccccatcctgtagtcccaacacaatgacaaagtcagcctgctgacctttgctggcatgaatcgtcataaaatcaagctgcaggtgcggccagcgcgtcgccgctttgttgagcgcctcaggcttcagatggtgataacgggcaagcagcaggatgcgctgcccgggcttaacgtaaccgctcagcttatccagaagatcgtccagcttgtcgtcggctaacagcgtgacggcctttttatcacctgccataaggctgttcagcggtttgcttaactgatgcggattttgctggataaagccattggctatttcgccgatacgcccgttaaagcgataggtggtatccagcgcacagcaatccccttcgccaaagtagtggttgaatgcggtggtcagagaaagctgcgccccgctgaaccggtagatcgcctgccagtcatccccgacggcaaagagcgtggtttggctattctgccggcgtaacgcggccaacagcgaggctcgctgcggcgaaatatcttgaaattcatccaccagaatgtgtttccatgggctgacgaagcggcctttatcgagaatattgaccgcctgatggatcaggccggaaaaatcgaccgcattctcggccttgagcgccgctttccagtctttcatcagaggcgacatcagcttcacccgtttactgaacaggtcgcgtaccgcttccggcgccccggcaatcatctccgcctgggagtcgccgtgcatgcgcatcaggctcacccagcggtcaagccggctggccatccgccgctgcacctttttgtcctgccagaagtccccctccggcagttgccagcccatctcttcttccagccacaggcgccaacctttcgcctgcgcttttttctcctggcactgcttttgccagcttttcagcagcaatgcgtggcgggccgcagtatcgctttccagcttactgatagtgggcacttttttgctgccctgctgaataatatgcaacgccagcgaatggaaagtacgcgcggtaatatcatctgatgccagacgctcgcggatccgctcatccatttcctgcgccgcctggcggccgaatgccagcagcaaaatttgatctgccgcggcttctccccgcgccagcagccagcccgctcgcgccaccagcaccgaggttttaccgctgcccgctcccgccagcaccagcagggagcgctcgccgttcactaccgcacgcgcttgtgacgcattgagcggggacgactcaacgctatcaaaaaattcgcgatattgctccagcatcgcctcggtaaaggcctggttatgggccagacgcgtcgcttcaatatcgcctaaccagcgctgacactcccgccacagctcccggcagttatcaaaggcatcaagccgactggtgggcatcggcaaaccagtcaacgcatggcgtatattatcctgaacatccgccacctgctgacgggttagccacttgccttctgcgcgagtgtgctcgatcgtcgccagctgctgcttcagcacgccggcggcgatatcgctcatctccgtgctccactgctgccagagcgtatgtaaatgatgataaaagcgctgcgtttcgctccactcggtaccgtgcaaacgcacgactttcccgtccggtagcacaaactccagttcgccccagaccagaccgcgcttacaatgcactgacaataactgattgaaagggataagatactcatgacgatcgccggaaacttttaccccggcgttcagtagctgcacccgatcataagggtgctgagccatgcgtttgcccaatgttgtcgctttaagttccatataatgtcgattttcaatcagggtggattgtttttcagtttaaccgccccggaccaggtgctccagcgcaaaaaaacgttacaatcatcaggtcttattatccaccgggcaaaaccgaggctttatgcgtaccattctgaatattttgaactttatccttggcggtttcgccaccactctaggctggctactcgccaccctggtcagcatcattctgattgtcacgctgccgctgactcgttcctgctgggaaatcactcgcctttcgttatttccctacggtaacgaggcgattcatgttgacgagctcgagccggggcgcaaaaacggtctactgaacgccggcggtaccgttctgaacattctgtggttcatttttttcggctggtggctctgcctgatgcacattttcagcggtatagctcagtgcctgactatcataggcatcccggtggggatcgcgaatttcaaaatcgccgccatcgccctctggccggtgggtcgccgggtcgtttctgtggaaaccgcgcgtgctgcgcgtgaagccaatgcgcgtcgtcgctttcagtaaccgaacggaacacggacatgattagccccctgctacgccgctacacctggaacagcgcctggctttataacgtacgaatttttatcgcgctctgcggcacaacgctgtttccctggtggatcggcgaagtcaaactgaccatccccctcaccctcggcgtcgtggctgcggctctgaccgaccttgacgaccgtctggctggccgtctgcgtaatcttgccattactctggtttgcttttttatcgcctccgcctccgtggagctgctgtttccgtggccgccgctgtttgcccttggtttaaccgtgtctaccatcggctttattttgcttggcggcctcggtcagcgctatgcgaccattgccttcggcgccctgcttatcgccatctacaccatgctcggcgtcacgctgtacgatcattggtatctgcagccgttgttcctgctggcgggggccgtgtggtacaacctgctgacgctgtccgggcacctgatctttccgattcgtccattgcaggacaacctggcgcgtagctatgagcaactggcccgctatcttgagctcaaatcccggctgtttgatcctgaccttgaggatgagagccaggcgccgctgtacgatctggcgctcgctaatggccagctggtagctacgcttaaccaaaccaaggtctcgctgctaacccgactgcgaggcgatcggggccagcgcggcacccgccgcaccctgcagtactactttgtggcccaggatattcatgaacgcgccagctcatcgcatattcagtatcaaaccctacgcgatcaatttcgctatagcgatgtgatgttccgtttccagcgaatgctttcgatgcaggcgcaggcctgccagaaactgtcgcgggcgattctgttacgcgaaccctatcagcatgatgcccattttgaacgggcgttcatgcatctcgatgcggcacttgagcgcgtgcgcgccggcggcgcatccgacgagcagctcaacgccctagggtatttactgaataacctgcgcgctatcgatgctcagctggccaccattgaatcggtgcaaaccaccgcgcctgccgggagtaataccgagacgctgctggccgacgacagacttggcggtctgagcgatatctggctgcgcctgcagcgcaatatgtcgccagagtcggcccttttccgccacgcagtacgtatgtcgttggtgctctgcgccggctatgcctttatccagtttaccggactccagcatggctactggatcctgctaaccagcctgttcgtctgtcagccgaactataacgccacccgccatcgcctggcgctgaggattatcggcacgctggttggggtggcgatcggcctgccggtcctgctgctggttccctctgttgaaggacaactgctgttgatcgtcctgaccggcgtgctgttttttgccttccgtaacgtgcagtacgcccatgccacgatgtttattacgctgctggtgctgctgtgctttaacctgcttggcgagggctttgaagtcgcgctgccgcgtatcattgatacgctgatcggctgcgccatcgcctgggcagctgtcagcttcatctggccggactggaaattccgcaacctgccgcgggtgctggaccgggcaatgaacgcgaactgccgctatctggacgcgattctggagcagtatcatcagggccgcgacaaccggctggcctaccgtgtcgcgcgtcgtgacgcctacaaccgtgatgctgagctggcctccgtcgtctcgaacttatcgactgaaccacgcgcggatgccacccagcgagaaaccgcctttcgtctgctatgccttaaccacacgttcaccagctacatctccgctcttggcgcgcatcgggaaaaactgtccacgccggaaatcctcgccctgctggatgatgcagtctgttatgtggatgacgccttgcaccatacccccgcggatgaacagcgggtgcaacaggctttgaacagcctgcaaagccggatccatcatctggaaccgcgcgcggacagtaaggaacccttggtcttacagcagattggcctgctgctggcgctgctgcctgaaatctgccgcctgcagcaacgggtccacgcccaaaccgaataacaaggcttttccgctaccgggtagccgcccattcgagaagctcctgacgccgtggcgtcgggagcgcggcggcatgtaccccggcaatcgccccctccagcgccagcaatacgctcagcgataaagaagcattatttacgcgtagcctcaaccatgcctcctgcgcaccaacttcccgcaacgtcctaacgtccggtttgcccgcgtgaatcagctgcaattccatatgaaagctgatattaggtaaatccttcaggcggcccgacgcccgtcggtagttcttttcgcgctgcgcactctgccacgacagtagcgatagccgaaaaagctgctgctcatcgcgccataaagtgtcgtcaatttgataatacttcagcggcactatgcggccgtgtcggcgcagcgttaacagaggattacgatgttccacccgataagcagcgctctgctcgcaggccttcagataaatgttcccctcggccaccatcgcaaacaccgtatcatcaatagccaggctgtagccgccaaagagcggacgagtatgcagttgacccagcggtgagacgcaggcctgaaattgcgggagccgcggacaaactagttttctcatgatcattcctttgttaatcatgtaattaaacttaagttgttaacggatccgctaagagaaaacataagggacttcccgggcagcagcaagatgattttcgccgactttttcaccagaatgcggttttgcgagacgctttcagaaaatcgcaagcgttgcagcaatcgacagggagaaatgaaaccattagcgcgcgttaaggattggataatgcaggggcttcttttgacagataaggaaccacgagaagcgattaaattcccggcagcaaaatggcaaattgcggttgatcttttcccctggcgaagatactgtatatgcatacagtaactaaaggcgggatagactatgtttacttcagctcacgcaaaccgttcagcacaggcttctgctccggcaggccactacgctcatcgttctggcgaacagaacaccaatgggctgatcagtgaaattgtctatcgtgaagatcaacccatgatgacgcagttattgctgctacctttattacagcagctgggtcaacagtcgcgctggcagctgtggctcacgccgcaacaaaagctcagccgcgaatgggttcagtccgccggtctgccgctgtccaaggtcatgcaaattagccagctctctcccagccataccatagactcaatgatccgtgccctgcgcacaggtaattatagtgtggttatctgctggctggcggaggagttaaccgctgacgaacacgaacgtctcgttaacgctgcccaggtagggtccgcgatgggattcatcatgcgcccggtgcgaaatcagggcacgctcggcagacaactcagcgggctaaaaattcactcaaatttgtatcattgagtgaaattaggattattcctggaattttttttaccgctgggaaaggtacagcgttttttatggtctttttcgcggaatgcctgccacacggggatttctgtctttttttcgtgtacgaaaatcaaccatatttgttaaatattgtgtacacaacccttttttttcatatgcctgacagagttcacacttgtaagtttcgaactaagttgtagactttacatcgccaggggtgatcggcttacgctgcatgtatcagcatagttaacaacaagtcacgcccccggtgaaggatttaaccgtgaggtcttttgtaacttcatggcgaattttggatgataatgaggcgcaaaaaatgaaaaagacagctatcgcgattgcagtggcactggctggcttcgctaccgtagcgcaggccgctccgaaagataacacctggtatgcaggtggtaaactgggttggtcccagtatcacgacaccggtttctacggtaacggtttccagaacaacaacggtccgacccgtaacgatcagcttggtgctggtgcgttcggtggttaccaggttaacccgtacctcggtttcgaaatgggttatgactggctgggccgtatggcatataaaggcagcgttgacaacggtgctttcaaagctcagggcgttcagctgaccgctaaactgggttacccgatcactgacgatctggacatctacacccgtctgggcggcatggtttggcgcgctgactccaaaggcaactacgcttctaccggcgtttcccgtagcgaacacgacactggcgtttccccagtatttgctggcggcgtagagtgggctgttactcgtgacatcgctacccgtctggaataccagtgggttaacaacatcggcgacgcgggcaccgtgggtacccgtcctgataacggcatgctgagcctgggcgtttcctaccgcttcggtcaggaagatgctgcaccggttgttgctccggctccggctccggctccggaagtggctaccaagcacttcaccctgaagtctgacgttctgttcaacttcaacaaagctaccctgaaaccggaaggtcagcaggctctggatcagctgtacactcagctgagcaacatggatccgaaagacggttccgctgttgttctgggctacaccgaccgcatcggttccgaagcttacaaccagcagctgtctgagaaacgtgctcagtccgttgttgactacctggttgctaaaggcatcccggctggcaaaatctccgctcgcggcatgggtgaatccaacccggttactggcaacacctgtgacaacgtgaaagctcgcgctgccctgatcgattgcctggctccggatcgtcgtgtagagatcgaagttaaaggctacaaagaagttgtaactcagccggcggcttaagttataaccgataaaaaaacccgcttcggcgggttttttttatgccctctcgcccactttagcggctgagagctgtgaagcagcccccggccagggcaaccaccagcaggcgggtcgacgatcctacctggctattctttccctaacagtacctgcagatcgtgcttcaggctcgacattttgctggcatatttctctttgtgctcggcatcttcaatcagctggacgatggtttcagacaaggttttgccccgccgctgcgccaggccagcaagacgctgccaaacgacaaactcaaggtcgatagacttcttacgcgtatgctgatgctcagcgttaaaatgacgtttccgtcgcgcgcggatagtctgcttcatgcggttcatcagcgccggattcatatgctgctcaatccaggcatgcaccagcacaggttcattctcgagcgtcagcaagtcatctaccgcagcttgcgcagcgctggcctcaatgtagcgggtaatcagctcaccttcccggtgcttctttaccagatatttccatttccagccgctttcaagattttccagttgttgatatttcattgcgatctcaatgtgaccgtgtaactcatttcaggatatcagtttttttctgatgtgctgaatataaatcattattcgtgaagtctgcgaccgggtaataatcagggtaaccataatcctccgtgtgctcggtcgcggcatcaggtataattgcgcgctttacatctaactaaaaaacagcgactttgaccattacgaaactgacccgaaccgaccttgcgcctgatctggaagcttaccaggcgctgtttgctcaagctgaactttcccatccggccccctccctctcgggcgatctgcagccgcgtttgttctatgggcttgagcagctgctgtacacgccggcagtctcctccttcatgctggtgaaagcccctgaagagccggaatatctgcaatggctggcggctgaaacccggactctgcacgagcctgccgcaccgctttacggcgtccgctatgaggtaaccgacgctcaggtgacgctcgcaccggcgcagggcgctgaggataatttcgccagcactgccccggtcgtgatggccgattgggtagaagcggaacagctgtttggctgcgtacgccagtttaacggtgcaatcaccctccagcctgggctggtccatcaggccaacggcggcgtgcttgtgctttcgctacgtacactgctggcgcaaccgctgctgtgggtgcgtctgaaaaatatggtgactcgtcagcgctttgactggctttctatggatgaatcgcgtccgctgccggtcagcattccctccatgccgctgagtctgaaaatcatcctggtgggcgaacgcgaatcgctggccgatttccaggaaatggagccggagctggctgcgcaggcgatctatagcgagtatgaagacactctgcagtttgctgacgccgacacgctaaaggcctggtgccagtgggtatggcagaatgcgcagcagctggagctgccgggcccggcagccgatgcctggcctctgctgatcgatgagggaacgcgctataccggcgatcaggagaccctgccgctcagtccgctatggataacccgccagctgcgggaggctgccgccttctgcgaaggcgaggagattaccggcgaagcgatgcagaccatgctggcgcgccgggtatggcgtgaaggctacctggcggagcgtatgcaggatgaaatcctgcaggaacagatcctgattgaaaccgaaggcgaatgcgtcgggcagatcaacgccctgtcggtgatcgaattccccggtcatccacgcgcgttcggtgaaccttcacgcatcagctgcgtcgtgcacattggcgatggcgaatttatcgacgtcgaacgtaaagccgagctgggcggtaacattcatgcgaaaggcatgatgatcatgcaggcttttctgatgtccgagctggagctggagcagcagcttcccttcactgcttcgctgacctttgagcagtcctacagtgaagtggatggcgacagcgcctccatggcggaactctgcgccttaatcagcgccctggccaacgtaccgataaatcagagcatcgcgatcaccggctccgtcgaccagtttggtcgcgtgcagccggtcggcggcctgaacgagaaaattgaaggcttcttcactatctgtcagcagcgcggtttaaccggcaaacagggagtgattatccctgccgccaacgttcgtcatctcagcctgagccacgagctacgtcaggccgttgccgacaaccagtttgctatctgggccattgacgatattaccgaagcgctgccgatgttgacccagctgatgtgggacggtgaaggacagacgctgcgacaaaccattcaggagcggatagcgcaggcgacccagcaagagactcgccatcgttttccgtggccgctacgctggttaggtgggacaagttctaactgatcggacttgttcagcttacacgtgttagctatcctgcgtcccgaacttaaaataaggcttactgaaaacatggtagataaacgcgaatcctatacaaaagaagatcttcttgcctctggtcgtggtgaactgttcggcgcgaaaggcccgcagttaccggcaccaaacatgctgatgatggaccgcgtcatcaaaatgaccgaaaccggtggtaactacgataaaggttatgttgaggcagaactcgacatcaatcctgacctgtggttcttcggttgccactttatcggcgatccggtgatgccgggctgcctgggcctggatgctatgtggcagctggtcgggttctatcttggctggctgggcggcgaaggcaaaggccgcgcgctgggcgttggcgaagtgaaatttaccggtcaggttctgccgaccgcgaaaaaagtcacctaccgtatccacttcaagcgcattgttaaccgtcgtctgattatgggacttgcggatggtgaagtgctggttgacgatcgtctgatctacaccgcgaacgatctgaaagtgggtctgttccaggatacttccgctttctgataacattcagcagcgattaaaaggcgaagcccccgctatgcggaggcttcttttttaaagagacagtgtcaggccgttagtaccctgtcctccatggcttctcgccagcctcccagccaccatgagcgttgattcaggctctggtatggacacatttctttcgatcttcccgcgatacccgcctgatatccgcgttggtgtgcccgttccaggcgatctcgtttttgtctcttcatgcctcgtttccctcattctttgatctggtggaaaagaaaacagtggtcgcaaattgtgcagccacgggttacgaataccgcgaaaagaaggcaacgtcaatgcgcaaaattcacgccagtgtcatatttgtgacctatataagagttcattttttgttcgctcggcgtagccgccggtaacaaactgacctggcaaaaaaaaatgccgcgcggcccaggtgaaccgcgcggcaggtcattatgatgaattttactgatggcagacgattaagctcgctggcaatggcagccgcctcctggctccacgcctgcgccagggtcttgaccatcgcgtcataaccatcctgttcctgcctgaggacgatgttaaacgggcgcttaatcagctgtccctgatgcttcagcagccactcaccgctaacgataacccgcccgtcatagcgaccatgaaagccattgaccgcaacgttgagggtatcctgctcgctccccagcggctgggacgacactacccagccgggcaactgctggctgagatttgccaccagcgtagtgcgcagctgctgatccagcggactggcccacagattattattggcgatcacatactgcacgtcggtggtctgatagaccaccccgttacccgccagataatccgggatgctgacctgctctacccacagcagacgtgccccctgactggcgtcgctctgcgcgccgccctgcacacccggtagctgatagtatgtcttgctttccccgccgctactgcacgccgtcagtacgcatacggctgccgccagtaaccattttttcattgtttcgctcccttcggctgtggatcttttttatccttcgcctcaaataccagcgcattgctcttatcatttagcgttttcagaaccggctgcagctcacgcagcacctgatccagacgctgcatatcggccaccatcttattgtaggccgcagagccaggctggaagccctgcatgctacggttcagctcacgcagcgtcgtctgcatatcggcgggcagctgctgcattgactggctggaggtgatcttattcagattatccagcgtggtctgcacgtgctgcatcgtcttctcgctctgcgccagggtactggtcgcctgctccagcagcggattaatcggcaggttattaatcttatccagcgcatccatcagacgctgctggatctgtgccagtccaccgctgatggtcgggataatcggatagccgttaaactcctgtattttcccgcgcgggggcgccttcggatagaagtcgagatcgatatacagcgcgccggtcaccaggttaccggttttcagcgagccgcgcagtccgcggttgatcagatcgtcaatgtgggcgcgaatattcggatcgccgccaagctgattaatcagccgttgcggttcaacccgcacttccactggaatacgatagtcatcgttcaaacgctgcttcagccccggaataaagaacggcactttgccgacggtgcccagacggataccgcggaactccaccggcgcgcccggctgcaggccgcgaaccgagtctttgaagaacatgacgtaatcgatatgctcggtaaagactgaatcctgaatgctcttttgatcgtcaaacagatggtattccgttttattcgccaccggctcgccgaggtccagtccttcaggaatatcgaagctcaccccgccgccaaacagcgtcgacagcgagcccatctcgacgcgcatccccgccgaggtcaaatctacagcgatcccgctgtccttccagaaacgaacgttggtggtcaccaggcgatcgttcggcgcattgatgaacagctggtaagttatacgacgtttctgcgtgtcgaaggtgctggtttccactgaccccacgcgatagccgcggaacaacaccggatcgcccggcgacagctggcccgccttgctgctttccagcagaatacggatccccttggcatccggcgaggccagcggcggagaatccagtagcggatactgcgctggcaccgaacctttcgttcccggctgcagttcaatataggccccggacaacaatgtcccaagaccgctgatcccctcgcgcccaacctgcggctttaccacccagaagacggaatcgttgtgcagcagcttctgcatcccggaattgaggcgggctttgatttccacgtgggtgagatcgtcggtcagcgttgcgctctccaccaccccaacgtctacgctgcggctcttgatccgggtttttcccccttcaatcccttccgcattggtggtgatcagcgtgacctcaggcccctgatggctgtaatgataaaacaggatccatgccccgatcagcgcagtgacgatagggaagatccacaccggtgaccagttcttcaccttctgcactttcgcttctccgctcttattttccatgttgttgtatttcctcatggcttgaatctggctcacgatcccacagtaaacggggatcaaatgtcatggctgaaaacatggtcatcaccaccaccagcgcaaacatgaccgcgccgatggctggatagatattcattaaccctcccatgcggaccagcgcagagagcacggcgatgacaaaaacgtcaatcattgaccagcggccaacaaattccaccacctcatagatcagatgcatgcgctccgaatctcgcgcgccgttgccgttggcgttccagcataaccaggcgatagcgatcatcttcagcgtcggcaccataatactggcgataaagatcaccagcgccaccggataagaaccttcgctccacagtaaaatcaccccggccataatggtcgatggcattttatcgcccagcagatcggtgatcatgatcggcataatgttggcagggagataaaggataaatgacgtcaccagcagcgccagcgtccactgcaggctatttttgcgccgcgccgttcctttactgttacagcgcgggcagacggtctgatcgaccggcaacaccgccgtacagcaggcacaggagcgcagcccctgacggataccggtcaccccgaccttcagcggctgggtaatggccggcatgggggcaatatcatcccatagccagcggcggtcgacgcactgaaaagtacgtaactgcagcaggcaaaacatacaccagggaacaaagctcagaccgatgccgatatcaccgtaggccatcagcttgacgaagctcaccagcacgccggcaagaaagatctccgccatgccccaggttttcagttgaaagagaattcgcgcaaggaacgtcttcaggccggcaggcattctgacccgattaaccagcagcaaaatggtgaccaggcaaaacgccggcactaattgaacaaagagtaaaaagaaagtcccgagactggcgtaatcctcggtaaacagtacgttgggaatttccagcagctctatttcgctactgatgccgcccactttcatatagataaaagggaacaggttggccagcagcagcataaacagcgcgaccagcgcatacgccgtgggacgctggcgaggcgcgtcccacgtggtggttaacgttgtaccgcagcgcgggcaggcggctttctggcgatgctcaagctgcggcaaagccaccagcaaatcacattggggacatagaatatgtcgcgcagcatgatgatgatcgcacatgacaactcctcggctcaggcgccgttctttaatccttcgagatattcccagcgttcaaaggccgcttccagcgcctgctccgcttcggccagctgcgccagcacctgctgcgtgcgatcgtgcggttgcccgaagaaatcgggatcggcaacctgatcctgcagcgtctgcagttcggcctcgagagcctccagcttctgcggcagttgttccagctcgcgctgcaggttatagcttagtttgttcccgccgcgtttgacagtttctgcttttggctgagcgacttccgtcgtttttttaacgaccgtctgcttttgcgccaaagactgggcctgctgaccgcgggcgtcgtgatagccgccgacgtactggccaatacgaccgccgccttcgaagatccagcactcggtcacggtattgtcgacaaactgacgatcgtggctcaccagcatcacggtcccctgatagccatcgatcagctcttccagcagctccagcgtttcaacatcgaggtcgttagtcggttcatcaaggatcagcagattgctgggtttcaggaacagccgggccagcagcaggcggttacgttcccctccggaaagcgcacgtaccggggtcatcgctcgttttggatggaacaggaagtcctgtagataacccagcacatggcgtggtttaccgttaaccattacctcctgtttgccttccgccaggttgtccatcaccgttttatccggatccaactccgcgcggtgctggtcgaagtaggcgacctccagcttggtgccaacatggatccgcccgctgtcggcctgcagctggccgagcatcagcttcagcaacgtggttttcccgcagccgttggggccgatcagggcgatcttgtcgccgcgctggatctgtgcggagaaatccttcaccagcactttgccgtcaacctgatagttgacgttttccatctcaaagacgattttgccggaacgggaagcctcctcaacctgcatcttcgcgctgcccatcacttcccgacgctcaccgcgctcgcggcgcatcgccttcagcgcgcggactcggccttcgttacgggtccggcgcgctttgataccctgacggatccacacctcttcctgggccagcttgcggtcaaattctgcattctgcagttcttcgacccgcagggcttcttctttatcgaggagatactgatcgtaatttcccggataggtcaccagcttgccacgatcgaggtcgacaatgcgcgtcgccatattgcggataaaggaacggtcatgcgaaataaagataatcgtgcctttaaaggttttcaggaaaccttccagccagtcgatggtttcgatatcgaggtggttagtgggctcatccagcagcagcacgcgcggcccactgaccagggcgcggcccagcgccgctttacgtagccagccaccggacagcgacgccagctgcgcattggcgtcaaggcccagctgctcaatcacttcgttaatgcggctgtccagctgccatagtcccaggttatcgagctgctcctgcaggcgcgccagttcatttaaatttttgtcgctcggatcggtcatcacctgatgcgacacgtcatggtaggctttcagataagccgcctgctcggcgatcccttcggcgacaaaatcgtacaccgtaccagcaacgttccgcggcggatcctgctgcagacgcgccacgatcaggtcctgttcataaatgatgcgtccgtcatccagcccctgttcgcggttgaggatcttcatcagggtagatttaccggcgccgttgcgtccgacgaggcagacgcgttcgttatcttcaatatgcagctcggcattatccagcagcggcgcatcgctgaaggaaagccaggcgccgtgcatactaatcagtgacattatttattcctttcaggctgcggtaatcagccagcagttgtggatctgacggttgcgggcaaaatcctgcgacagcgttttttgcgaaatctcttgcgccttcaggccaagcgccgccagcccgtcatgatccatacggaaaccgcgtttgttattcgagaacataatggtgccgcctttacgcagcagacgttttagatcggtcatcaggcgaatgtgatcgcgctggacgtcaaacgcatcttccattcgtttggagttggaaaaggtcggcggatcgataaagatcagatcgaactgctcggtgctctcccgcagccaacccagcacgtccgcctgcatcaggcgatgcgcgcggccggtcaggccattgagacgcaggttgcgttccgcccactccaggtaggtgcgtgacatatccaccgtggtggtggatcgcgcaccgccgaggcctgcgtggacgctggcgctgccggtataggagaacaggttcaggaagtccttacctttactcatctggccgagcatgcgacgggcgatacggtggtcgaggaacagaccggtatccaggtagtcggtgaggttgacccacaggcgcgcgttatactcctgtacctcaataaagtcgcccttctccgccatcttctgatactggtttttccccttctgccgttcacgggttttcagcaccagcttgttaggcgccatgtccagtacggcgatagtcgcagcgatgatgtcgaacagacgctggcgcgccttatgcgcgtcgacggttttcggcggggcatactcctggaccaccacccagtcggcatagcggtcaatggccacgttgtattccggtagatcagcatcgtacaggcgatagcattcgattccttcctggcgggcccatttttcaaacttcttcaggtttttacgcagacggttagcaaaatcctccgccagcatcgccggcttgccgctttcgctctccgccaggtgataattcttctgcacgcagtccagcgggccgttcttggctttaaactgcttgtcggcacgcagctgcaggcaactcagcagctccggcgaagcgctgaataccgacaggttccagccgccgaactgacttttcattatccggccaagcaggctgtgcagagcgatcagcgctggctcgctttccagacgttcgccgtacggcgggttactgatcaccgtcccgtacgggcctttcggcagcgggttgttcagttgggcgacgtctttcacgtcaaaatcgatcagctcgccaatgccggcgcggcgggcgttgcggcgcgcgcgctcgattacgcgcgcgtcgacgtctgagccgtagaagcgtgactcatacgctgccaatccctgacgagcgcgggtttgcgcttccgccttcacctctttccagatggcgtcatcgtgctgcgcccagccgccaaagccccagtggccgcggtgcaggcccggcgcgcggtcggtcgccagcatcgccgcttcaatcagcagggtaccggagccgcacatcggatcgagcagcggcgtacccggtacccagccagagcgcatgacgatcgccgccgcgaggttttctttgatcggcgccattccggtaccatcgcgatagccgcgcaggtgcaggccttcgccgctcagatccagcgagatgtgcgccgtctctttgttcagccagacgttgatccgcagatcgggcgactcacgatcgacgttcgggcgcggtagattcttacgggtgaagctgtcgacaatggcgtctttaaccttcagcgcgccgtactggctgttacggatctcgtcattgaggccgctaaaatgcaccgcgaaggtggcgccagggttaaacatctccgtccacggaatggcctgtacgccgaggtacagatccagatcgctgtatacgcgacattcgcccagcggcagcatgatgcgcgaagccagccggctccacatcaggctttgatacagcaggcgcgtatccccctgaaaatggaccccgccctggactacctggcagtccgtcgcgccaagcccttccagttcagtttttaacagctcttccagcccacgagccgtactggcaaacagagaattcatatcgtcacttttacttaaagaaaattggtgcgcattatagccaatatgtgccctatgtcataaagttataggcttatttttggaacccggaggcagcgtatggtaacgctatcgcgactttttattcatcctgttaaatccatgcgcggcatgggcctgacccacgcctttgctgatatcagcggcctggccttcgatcgcctgtttatggtcaccgaaaccgacgggacctttattaccgctcgccagtttccgcaaatggtgaaatttattccggcgccgctgcatgatggccttcacctgaccgcaccggacggcagcagcgccgtggtgcgttttagcgatttcgccacgcaggccgagccgaccgaagtctggggcaaccattttaccgccctcatcgcgcccgccgccgttaaccagtggctcagcggctttttcaagcgcgatgtccagctgcgctggctggggccgcagctaacccgccgggtaaagcgccatgatgcggtgccgctctccttcgccgacggctacccttacctgctggctaacgaggcctccctgcgcgatctgcaacagcgctgcccggccagcgtaagcatagaacagtttcgccctaaccttgtggtcaccggcgcggcggcctgggatgaagatagctggaaagtgatccgcatcggcgaggtggtgtttgatgtcgctaagccgtgcagccgctgcatttttaccaccgtcagcccggagcgcggtcagaagcatcccgccggggagccgctggaaaccttaaagcgttttcgtaccgcgctggacaatggcgatgtcgattttggccagaacctgattgcccgcaacagcggggtgatccgggtgggagatgaagtggaaatccttacccgcggcccggcgaaagcctacggggcaggtgaaagcgacgataccccggctcccgaggcgcagcagcaggctacggttgccatcgaatggcagggtcaacagtttaccggcaataaccagcaggtgctgctggagcaactggaacaacagggcattcgcgtaccctattcgtgtcgggcggggatctgcggcagcggccgcatccggctggaagagggagaagtgagtccgttaaagaaaaacgcggttgccggggatggcactattctcgcctgcagctgtgtaccgaaaacagcgctacgcctggcgccttaaaccgcctgccccagactgtagctgaccgcgctctgcgccggctgcagtctgtcattcatgattttaatgacatcgcccagctgcatgacgcggccggcaagggtgagacccggctgagccaacagacagagcgcggcgttatcgcccggctccaccaccagtaaattcacctgctcgccggtatcgctcagccaaacgcaggcggcgtcgccgccgctcggctgccagtgatgggtatgggcgataaagtgccagcttttcggcatctgcggtttgagaaaacggatggcggtgagcgcgttaaggactaattccgcccgctgctctttcgatagctcgagatcgcgacatttttcttcaaaagagaaatagagcgcggcgtcatcaacgcaaaatcccgaaggggcaaaggcatccggagtcagcatgcgccgggcgaagcgcgagcgaaataacatgccattggccagatcgagcatcatgcggtcgtgctcttcatcgtaataccaacgccagttatcgtcaggtttaatccgcatttttccccctgtcccctttcatacgcctctgcaaagttgttgcgacttaccgcagaatattttctaaaattaagaaaagtctaaaatgtttaaataagcaacagtgagggaatataaaacaaccagggccggaaataaagccctgggtgggattcagaggaggaaaagattagatgtgggtaacaatttctttaatcagcggcggacctttaaaaataaatccagaatagatctgcaccagcgatgccccggcggcaatcttttcccgcgcggcaatcaccgaatcaatgccgcccacgccgatgataggcaaacggccattcagctcagcggagagcatacggataatttcagtgctttttaattgtaatggacgaccgctaagcccgccggtctcatcgcaatgtttcattccctgaaccagggaacgatcgagggtggtattggttgcaatcacgccatcaatattatgacgcacgaggctatcggcaacctggatcaattcctcaggcaaaagatccggcgcgatctttacggcgaccgggacatatttttgatgcttctgctgcagctcgagctgcttatttttaataccggagagtaaatcatccagcgcttcgccgtattgcagcgtgcgcagccctggggtattcggcgaggagatattaatggcgatatacccggcgtacggatagactttttccatacaaatcaggtaatcatctttcccgtgctcaaccggcgtatctttatttttgccgatattgatacccagcacgccgtcaaaatgcgcctttttcacgttctcaaccaggttatcgacgccatggttattaaagcccatgcggttgatcaatccctcggcatcaaccagacggaagatccttggcttatcgttgcccggctgcggacgcggcgtcacggtgccgatctcaatcgaaccaaaccccatcgcgcccagcgcgtcaatgcattccccatttttatccagcccggccgccagacccagcgggtttttaaaggttagccccatgcaggtgacaggcctggccggtaccttctggcgaaccagcatttccagcggcgtcccggtgacacggcgtaattgttgaaaggtaacttcatgagcgcgctcaggatcgagctgaaaaagggctttacgaacgaaggggtagtacatgaactctcctggattcccggtgtgcaaaccgggggcgtattatgtgcgatctgttgcggaaagggaattgacctgcgacaaaaaatcccccatcagcgcaaacgattacctaccccgcgcgccattatgcgcttttcggctatctaaccgcggataaatcatttagggaaataatggccctctgtcacactcactataaatgttatcaattatagataaatgcaaacatttagttataaggagagagagatgcgcgtcattacgcttgcgggcagcccgcgttacccttcccgttccagtgccttgctggaatacgccagagagacgctcaccgccgccgatatcgaagtctgccactggcatctgcagaactttgccccggaagacctcctgtacgctcgttttgacaacccggcgctgcagacgctcaatgaacagctggccggggctgatggcctgatcatcgccacgccggtgtataaagcctcgttctccggcgcgctgaaaacgctgctcgacctgctgcctgagcgagcgctagagggcaaaattgtgctgccgctggccaccggcggcaccatcgctcacatgctggcggtggactacgcgctgaagccagtgctgaatgccctcaaggcccaggagatcctccatggcgtcttcgctgatgacagccaggtgaccgattaccagcataagccgcagtttaccgcgaatctgcagcggcgccttgatgacgccctggagaccttctggcaggcgctgcatcgccccagcagccgtgcgccgtcgttaacatctctgcgtggggtggagcatgcttaatcctctccgcgccctgactctgggcggactgctgctattctctacgctgggtcacgccgccccggcggcgcctgacgctctgcgcatcggctaccagaaaggcagcgtcagcatggtgctggcgaagagccatcagctgctggagcagcgctatccgcaaacccatatctcgtggattgagttcccggccggtccgcagatgctggaggcgctgaacgtcggcagcattgatatcggcagtaccggcgatattccgcctatctttgcccaggcggcaggcgccgatttggtctatatcggcgcggagccgcccaagcccaaggcggaggtgatcctggtggcgcagggcagcccgattcataacgttgctgagttaaaagggaaaaaggtcgcttttcagaaaggctccagctcccacaatctgctgctgcgcgccctgcagctcgcaggtctgaaatttagcgatattcagccggtttaccttgcccccgccgatgcgcgcgccgccttccagcagggcaatgtcgacgcatgggccatctgggatccgtactactccgccgcgctgctgcagggcggcgcccgggtactcactgacggaaccgatctgaaacagacgggatccttctatcttgcttcccggccctacgctgaacgcaatggcgctttcattgaaggcgtactcgacacctttactcaggccgatgccctgacccacagccaacgcgcgcaaagcattacgctgctggcgaaaacgatgggcttaccggaggcggtgatcgccagctatctggaccatcgtccccccaccgcggttaccccggtgagcgccgaaaccgccgctcgccagcagcagacggcagacctgttctacgagaacaagctggtgccaaaaaaagttgatatccgggcccgcatctggcagcccaccgccacacaaggagcgaaatcatgagtctgaatatgttctggtttttaccgacccatggtgatggtcgttatctgggtaccgaagagggtgcccgtccggtcgattatggctatctgcagcaaatcgcgcagacggcggatcggctgggcttcaccggcgtgctgatcccgaccggacgctcttgtgaggatgcgtggctggtcgcggcctcaatgatcccggtgacgcagcggctgaaattccttgtcgccctcaggccaagcgtggtatcgccgacggttgccgcgcgtcaggcggcgaccctggaccggctgtcaaacggccgggcgctgttcaatctggtcaccggcagcgatcctgccgaactggcaggcgacggcgtcttcctcgaccacaccgagcgctatgaggcctcggctgaatttacccacatctggcgcaagctgatggagggagaaaccgtcacctttaacggcaagcatcagcgcgttcgcgacgccaaactgctgtttccgccactgcagcagccgcgtccacccctctatttcggcggctcgtctgaggtggcgcaggagctggccgctgagcaggtcgatctttatcttacctggggagaaccgccggcccaggtggcagagaaaatagctcaggtgcgagagaaagccgcccggcatggtcgccaggtgcgttttggcatccgtctgcacgtgatcgtcagggaaaccaacgaggaagcgtggcaggcggcggacagccttatctcccatcttgacgacgagacgatcgcccgcgcccaggcggctttcgccagaaccgactccgtcggccagcaaaggatggcggccctgcacaacgggcgacgcgataagctggaaatcagccccaacctgtgggctggcgtgggtttagcgcgcggcggcgccgggaccgcgctggtgggcgatgccgccaccgttgccgaacggatcaatgaatacgccgcgctgggtatcgatagctttatcttttccggctatccgcatctggaagaggcgtaccgggtcggagagcttctgttccccctgcttgacgtcgcggtgccgtccatcccgcagccgcaaagcctgcgcctgcagggggaagcggtcgccaacgagtttattccgcgtaaagtagcgcaaagctgaggagaccgtgatggcaaaatcaacccatcccctgttgttacgcctcgccccctggctgctgccggtagggacggtcattgtctggcagctggcctcgtccgtcggctggctgtcgacgcgggtgctgccctcgccggagggggtattgaaagcgttctggaccctctcggccagcggtgagctgtggcagcatctggccatcagctcatggcgggcgctggtcggcttcgccatcggcggctcgatcgggctaatactcggcctgatcagcggcctgtctcgctggggcgagcgtctgctggatacctcgatccagatgctgcgcaatgtcccgcatctggcgctgatcccgctggtgatcttgtggttcggcatcgatgagaccgccaagatcttccttgtctcgctgggcaccctgttcccgatctatatcaacacctggcacgggatccgcaatattgaccgtgggctggttgagatggcgcgcagctatggcttatccggcttcgccctgttccgtcacgtgatattacccggcgccctgccctcagttatggtcggcgtgcgttttgcccttggtctgatgtggctgacgcttattgtcgccgaaactatctcggcgaatgccggcatcggttatctggcgatgaacgcgcgtgaatttctgcaaaccgacgtggtggtagtggcgatcattctttacgccatccttggcaaactggccgacgtctgcgcccagctgctggaacggctctggctgcgctggaatccggcgtatcatcttcaggaggctaacgcatgaacactgcccgtctcaacccaggtatcccgctgctgctgaacggggtgacgaaacgctatggcgacaacaccattcttaacgagctggatctgcatattcccagcggccagtttgtggcggtggtaggccgcagcggcggcggcaaaagtaccctgctgcgcctgttggcaggtctggaaaaaccaaacgccggcgaactgctggctggcgcgacgcccctggcggcgatccaggacgacacccggatgatgtttcaggatgcgcgcctgctgccgtggaaaacagtgattgataacgtggggctggggttaaaaggcgcctggcgcgacgccgccctgcaggcgttggccagcgtcggacttgaaagccgcgcacaggagtggccggccgcgctgtcgggtgggcagaagcagcgcgttgcgctggcccgcgcgctgatccatcgcccgcgcctgctgctgctcgacgccccgctgggggcgctggatgccctcacccgtctggagatgcaggagctgatcgtctccctgtggcaggagcatggctttacggtcctgctggtcacgcacgacgtcagtgaagcggtggccatggccgatcgggtgctgttaattgaagagaagaagattggcctcgatttaagcgtggatatcccgcgaccgcggcgcaccggttcggcgaagctggccgagctggaggctgaagtactggatcgggtgatgaaacgcggcgacagcgagcgtgcgccgcgtttgtttagtcatggctgaccggcgtaactgtctgctgtctgaacgggggcatatcgtcatccgacatgtccccggctcgcgcgttgcacagccgggctaccaacgccaaatcagccgtgtattccaggtcgggtaagcatcgcgccgcccgacaacatcaccacgctaacgggtaacccggacagggcgcaaggcgcgccgcaatccggggttatgccaccgttacgccagcgccttactgattttctcgaacaggtcgccagagagattctccagccccttcagctgctccagcgcggcgcgcatcagcgcctgtcgcttctcatcataacgcttcagacgaatcaacggctcaatcaggcgcgacgccacctgcgggttacgctggttaagctcggtcagcatctccaccaggaactgatagccgctgccatcttcagcatggaacgccgccgggttgctgctggcgaaagcgccgattaacgagcgcacacggttcgggttgctcatgctgaacgaacggtggttcagcagaccgcgcacggtttccaccacgttggctgccgggctggtggactgcaggataaaccacttatccatcaccagaccgtcctgatgccatttgtcatcgtactcctgcatcagcgcatcgcggcacggcaactcagcggcaaccgccgccgacagggcggccagcgcgtcggtcatgttatctgcctggtgatactgcgtcgccaccagcttatcgcccagcgtcggttccgcaaacgccagatagcgcaggcaggtattgcgcagagcacgtttaccaatatcggcgtgctccacccgatagctgtcgagcttattggcgttataaaccgcgaggaattcgtccgccagttcgttcgccagggtgcgggtgagcgcttcgcgcacggcggcgatggcgatcggatcgataatcgcgaacatctcggcgatttcgttggctgacggcagggttaagatctcagcggccagcgccggatcaatcttctcatccagcaggatggcgcggaaggcatccgctacgtgcaccggcagcgacagcggctgcccctgctgatggcggttgacgttcagcttgatgtaagtcgccagcaggctctgcgccgcatcccagcgcgagaaatcattccgcgcgtgacgcatcaggaaggtcagctgctgatcgctccacttgtattccagtttcacaggcgctgaaaattcgcacagcagcgccggcaccggctggaaataaacgttatcgaagacaaacgtctgctcggcctgggtcacattaagcaccgggtgtaccgggtggccacccttctgcagggggatcaccttgccctcgttatcgtacagctcaatggcaaacgggatatgcagcggctgcttctcggcctgctcggcggtcggcggcgtacgctggctgatggtcaacgtatactgctcggtctccggattatagtcgtcatgcacggtgacgattggcgtaccggactggctgtaccagaggcggaagtgcgacaggtcgacgttagaggcatcttccatcgcctgcacgaaatcgtcgcaggtggcggcgctgccgtcatggcgttcaaagtacagctgcatccctttctggaagttttcttcacccagcagggtgtgcaacatgcggatcacttcggcacccttttcatagaccgtcagggtgtagaagttgttcatctcgataaccatatccggacggatcgggtgcgccatcgggctggcgtcttcggcaaactgcagcccgcgcatggtgcgcacgttgttgatgcggttcaccgcccgtgagccgaggtcggaactgaactcctgatcgcggaacacggtcagcccctctttcaggctgagctggaaccagtcacgacaggtgacgcggttgccggtccagttatggaaatattcatgaccaatcacgcgctcaatatcgaggtagtctttatcggtggcggtatcggtacgggccagaacatatttggagttaaagacgttgagtcctttgttctccatggcacccatattaaagaagtcgacggcgacaatcatatagatatcgaggtcgtactcgaggccaaagcgctcctcatcccacttcatagagtttttcagcgaggtcatcgcccagggcgcgcgatcgaggttgccgcgatcgacgtacagctccagcgccacttcgcggccagagcgggtgcggaatgaatcgcgcaggacgtcaaaatcaccggccaccagcgcaaacagatagcacggcttcgggaacggatcctgccactgtacccagtgacgaccgttctccagctccccttccgccatacggttgccgttggaaagcaggaacgggtatttcgctttatcggcgataattttggtggtaaagcgcgctagcacatccggacggtccagataccaggtgatatggcggaaaccttccgcttcgcactgggtgcacagcgcttcgcctgactgatacaggccttccagcgcggtgttcgccgccgggctgatctcattgaagatggtcagggtgaaatgctccggcaggccgccgatcaccagctgcttgttttcttctttatagtcactccacggctggccgttcacctgcagagcgatcagggtcagatcttcgccgtccaggcgcaatggcacatcagacgcagccgcgtggcgggagaccttgctctcggccgtaacaacggtttttgcggcatccaggtcaaaggtcaaatcgatatcgctaatcagatactccggcgcacgatagtcgtggcggtatttggcttggggctgttgtgtcataaaaaacctttagcatcttcggtaaagtgtcgtcccagtctattcctgttgtgtcaatcgcgctatgcagaatcttcatcttttcaacgtgaaacacggaaatcgctacattttgttaacactcgcggcacgaaatgccctcgacccgacgcaaagcttgtggtgtgatccatgttcaatatattaaactaggcctcgcaaatgaccgtcagcgtcaccattgctcgccatcgcgggacagagtcgggtaataaaggtatactccgcctccattttccgcgttggtttcgatggaacgctccagtgagaggatgctactgcgcaccatgacacaattcacttctcctgtactgcactcgctgcttgatacggatgcctataagctgcacatgcagcaggctgtcttccaccgctacggcgatgtgcatgtggcggcggagtttcgctgccgcggagacgacctgctcggcatctatgccgacgcgatccgcgagcaggtggagtccatgcgcgacctgaggctgcgggatgatgaatatcgctggctgtccacccttcccttttttcgccaggattacctcaactggctgcgcgattttcgctatgacccgagccaggtaacggtcagcaatgacaatggtaagctgaacattcgccttaccggcccatggcgggaagccatcatgtgggaagtcccgctgctggcggtgataagcgagttggtccatcgctatcgttcaccagagatgggcgtcgatcaggcgctcaacacgctggaacataagctaggcgacttcgccaccatgaccgctgacctcgacatgagcgccttccgtctgatggacttcggcacccgccgtcgtttctcacgcgaggtgcaggaaggtattgtgcggcgtctgcagcaggaaccatggtttgtcggcaccagcaattacgatctggcgcgccgtctgaatttaaccccgatgggtacccaggcccatgagtggttccaggcccaccagcagatcagccccagccttgccagcagccagcgggcggcccttgccgcctggctggaagagtatcccgaccagctgggcatcgcgctgaccgactgcatcactatggatgcgttcctgcgcgatttcggtccggaattcgccacccgctatcaggggttgcgccacgattccggcgacccggtggaatggggagaaaaagctatcgcccattatcagaagctgggtatcgatccgctgagcaaagtgctggtcttctccgataatctcgacctggcgaaagccgtcgatctgtatcgccacttcgcctcgcgggtgaagctcagctttgggatcggcacccgattaacctgcgatctgccgcaggttaaaccgctcaatatcgtgattaagctggtggaatgtaacggcaagccggtggcgaaactctccgacagcccggggaaaaccatctgccacgataaggccttcgtccgcgccctgcgcgaagcgttcgacctgccgccgattaaaaaggcaagctaaaaaacatggcccgacggcattctgctatcgggccaatcaatatcactcctgcggcagacgggttctgacgacctcggcaaaatactccgcgccagttagcaatatctcatcattaaagtcgtagcaggcattatgcaacggtgtattgccctgagcatctgaactatcgccgttgcctaaaaagatgaaacagccggggattttttgcagaaaagcgccaaaatcttccgaaatcatcatctgtgcgacgttgccgtccaccttctcagcccctaccacgttaatcgcagcggtgaccgctacatcaacgcattgctgccagttcaccgttggcgcaaattcatgggtatagctgaactggcacgtcgcaccgtgcatcgcgcaaatcgcttcgctaatggtacgcattcgttcttcgagcagcatctgcacctccggtgcaaagctgcgcgtatcccctttgatttcgacgtgcgtcggaatcgcattgcggatgccatcggtgtgcagttcagtacaggaaatgaccgctggcacgttcggatcaacatttcgcgaaacaattgtctgcaaagccaggatgatttccgccgcaatgaccagcggatctttcgccatatgcggccgcgccgcatgcgctccctgccctttaatacgaataataaagttatcttcactggccataatgccaccgactcgcgtggcgatagtcccggctttcatacccggcatattatgcagaccgtagatttcctctatgccaaagcgttcaataacgccatcgtccatcatcgctctggcgccatagccaggttcctcagcaggctgaaaaacaaagcagaccgtgccgttaaaattctgccgctgcaataacaactgcgccgtgcccagcgcaatgcaggtatgaccatcatgtccgcagccgtgcatccgctcggcggtcatggagcggtaagaccagtctccctgttcggtcaattgaatggcatcgatatcggcacgaatagcgataacgcccttcccgtcgccgcatttcaatctccccaccaccccggttttgccaatatcgcggtgcacctcaatgcccatagcttcgagcttttcggcaataaaccgtgaagtattctgctcttcgaaggcgctttccggatgggcatgcaaatagtgacgccaggcgataagctgctgctttagctgttgctgattcattctctgctcctgtaaacattagtccatacgctgggcgcgctgtaaaaccacctgcagcagcacattggcgccagcaatcagatctttggctgcgctatgttctttgacgttatggctaatgccatcgacgcaggggacaaaaatcatcccggcgggacataccgacgccataaattgtgcatcgtgtccggcgccgcttggcaaacgtcggtaactgagcgcctgacgctccgcctcggcttccaccgcattgacgatctcatcggcaaaaatgaccggattaaagcgcaccagtgagcggctggttatctccacgccctcttcctgcgacgttttcgcgacaaattcggctaattgctgctccgccagacataagatcgcattatcggtattgcggagatccactgacatgacgacatggttgggaatgacgttgatcagattaggcttcacgctgaaatgtccaacggtagctacctgattaccaccaaggcttagcgccagctcacgggcaaaaacagcgattttcgcagccgccagcccggcatcacgtctcatggacattggggtagtacccgcatgattcgatacgcctctcagggtaaattcctgccacgaaataccctgtacgccggtaaccacgccaatatcaatctgctctttatcaagaattggtccctgttcgatatgcagctcaacgtagctatctaccgccatatctcccggctgacgttcgcctttataaccaatgttacgcagcgcttcatcgagcgtgataccgtcgagatcttttgccgcgagcgcctgcgccaacggatactcgccggcaaacaccacgctgcccatcatatcgggctgaaatcgcaccccctcctcgttagtaaagaaggttaccgccaacggtcgtcgggtgcggatcccggcatcctggagggtggcaatcacctcaaggccggccataacgccgtagttgccatcgtataacccaccggtggcgacggtatcgatatgtgaccccatcatcaccatcggcaacgtctcctcgccgtgataaacgccggtgacattgccgatagcatcaattgacacgctcaggcccagcgccttcatgcgggctacaacaaagtccctgccggctttatcttcggcagtcgctgccaggcggcatacgccgccgcctggcagcgcaccatgttcgccaagtgcatacagggaatcgataagccgttggccgttaatctgcagataatgactcatataacatctcgctaattatggtggttattggaacatgccgtaaaaaatggcagatacggtgataagaccgatcagggtgacgaaaacgttgctcgctttaccgcgccagggggcaagcaccggtaatttatgaatggcgtacataggcaacagcagcagaattgccgccccggtgggaccgctgatgcattcgataataccgaggatactggggttcttgtacgcggcgaaccagcaggtaagcaccataaacaccaggatgaccgcgtcgacgaggcgaatacctggttttttaccgcgtgcggcggcggcctccagaatcaggtcgcgcagcgattcataggcgccgatgtagtggccaagaaatgatttagtaatagcgacaaaggcgataatcggcgatagccaggcaataatcggtgtatcgtactgattggccagataggacaaaatcgacagattctgggctttggcttccgccagttgctgcggcgacaggcttaacacgcagctgagaacaaaaaacagcaccaccaccgtcatgagcaggataccgtagcgctggatctgcgcacatttaccctcagcgagcgccagaccgtaacgctgcttctggcgcaccaccatcggcgaaatgatgggatagtggttaaacgacatcaccagtaccgggaaggtcatccacagggataacatgatcccctgcccatcgcccgtggcgctgaagcttacggtttgcaaaattgcgccgttccagtgcggaatcagaaaaagtgccataaaaataagcgagatgatgaagggataaaccagggtgctcatcacccgcattatcaaacgctgtccgaaacggacgataaacatcagcccgaggatcagaacgatggccaccagcgaccggggaggctcggccattgccaactggtgggtgataaagctctgcgcggtgttggtgatagccaccgcatacataatcagaatggtatagacggcgaagaaatagatgacggtaaatacttttcccgccagcgcgccaaaatgctcgccaataacatcggtaatactgctttccggcgtattggaagagtaaatgaatctcgccagaccgcggtgagccagataagtaataggaaaagcgaggacaaaaacaatcagcagcggccagaagccgccaattccggcattaatcggcagaaacagcaccccagcgccaatggcggtaccgaacaggccaaggacccaaacggtatcttcgctatgccactttgcgggatcggaatatcctttattgataattatattttcagtattcatcggtcaggttctctctatgcatgacgcgaaagcgcgtatgttttcgttatgagtcagaacgcttgtcataccgagggcttgtagggaaggtaagatggcccccttgttattgtcgatagcgctcaaccattacggccaaaccagacgatgtcttcatagacatcgggtgatgtatctccttccgtgctgattaacagaacctgtgcatcggcattcaggcgcagcgattcggcaagctcgcgatacgccggttgagtcatcagcgcataaagcactcctgtgccaatagcgccggattccccggagacaaaaggttcgtcagtacctggtcgcggagcggccaacaggcgcatgccgttggccgccagacaatcgtcggcggaaataaaacaggtggcatggtcgcggagcattggccagctggtgatattaggttcaccacaggcaagcccggccatcagggttgacatatccccgccgacgctgtgcggcagtccgtcattaatggttgccgagcgaaacaggcagttcgccttgtgcggctcaacgatgatgatggtgggagcctgctgctgcatcttttcgatgaaatatcccatgatgctaccggcaaacgacccgaccccggcttgtaaaaacagatgcgtcggcatcgacgctccgctttctgccagctgctgccagatttcaacagcgagggtcatatagccttgcatgatccatgtggggatctgctcgtagccctgccaggcggtatcctggagtagaacccatccctgctcgcgcgcggttttggccgccagccgaactgtgtcgtcgtagttcagttcagtaatcgtgcattcggcgccatgccggcgaatattctgcgcgcgtaccggtgacgagccctttggcatatacaccaccgcacgcagcccaagctgctcagccgcccacgccacgccacgtccgtggttaccgtcggtagcagtcacaaatacgatgtccttgatacgcgccttaatcactggtgaattaagctcggcaaagctcaacgtattaatatctcgctcaagcagagcggcgagatatttccccatcgcataagatccgcctaatcctttaaacgcattcaaaccgaatcgctgcgcttcatcttttatatggatcgatcccagccccagccgctggcttaaaaattccagcttacgcagcggcgtgacccggtaatcaggaaatttttgatggaatgccagcacttcgttccccacgctttcattcagcagactcaagtctgctccctggccatagggctgccgccgggcgttaagttgaaatttaattgtgtccactattcaggcacctctattttcatatcgtcctgcgacgataacgttatttgcgaccattccgcctaaacgacgggtgcacggatccgtgcggcctgagacaggacggtcgctttaaattggttaagtcagaatgtgagaggctttttgtcgcgatataccgctttcccactgcctgtgatggtacactgcgcccggcggttaattggcgcaaagttgcccatcgcgccgcaattttcactctgttttatcattcatacgcaacaacgttgcattagtgaggttgatcacaggcttgcaggacgagatatatgatgaaacttgacgcatgggataaaaaaattcttacgctcttgcagcgtaataatcgcttgtcgcaacgggagatcgccgatcggatcagcctgtctccttcggcagtcaatcggcgtatcgctgcactggaggatgcaggggtgattaaaggcagtgttagcttagtggacgccagtaaagtgggaagaccaatcaccattatggtgcaggtgaccattgagaatgaacgtctcgatctgcttgaggaggataaacagcgtttcgttacctgtccgcaagtgcagcaggtctactatgtcactggcgacttcgatttcctgctcgtgatcaacgtccgtgatatggcggaatacgaagcgctaacccgtgaactcttttttgcctcgggaaatatcaagtctttccggaccatcgtgtcgatgcaaaatgcgaagcaggaaatgacggtcattatcgagtaagtcgtgtaaaagtcgaaatggtgagccaaagaacgccccggaggggtatttatttccgaaatccacccttccctgtgcgaaatctacttgtctgatggaagatgacaggtaacatagatatccccccgctgttgggggaagagacttttttattggactacatagagagattattatgagcgttgtgcctgtagccgacgtactccagggccgcgttgccgttgacagcgaagtcacggtccgcggatgggtgcgtacccgccgagattctaaagctggcttttctttcctcgccgtctatgacggttcctgctttgatcctgtacaggccgttattaataattctctgcccaattacaatcaggaagtgctgcgtctgaccaccggctgctcggtgattgtcaccggtaaagtcgtggcttctcagggtcagggtcaaagctttgagatccaggcgaccagcgtggaagtgaccggctgggtggaagacccggacacctacccgatggcggccaagcgccacagcatcgagtatctgcgtgaagtagcgcacctgcgtccgcgcaccaacctgattggcgcggtagcccgcgtgcgtcacaccctggcgcaggcgctgcaccgcttcttcaacgaacagggcttcttctgggtttccaccccgctgatcaccgcctccgataccgaaggcgccggcgaaatgttccgcgtgtcgacgctggatctggaaaacctgccgcgtaacgatcagggcaaagtcgatttcgacaaagacttcttcggtaaagagtcgttcctgaccgtttccggccagctgaacggcgagacctacgcctgtgcgctgtcgaagatttataccttcggcccgaccttccgcgccgagaactccaacaccagccgccacctggcggaattctggatgctggagccggaagtggccttcgccaacctgaacgacgttgccggcctggcggaagcgatgctcaagtacgtcttcaaagcggtactggaagagcgtgcggacgacatgcagttcttcgccgagcgcgtggataaagacgctatcgaccgtctgcagcgctttatcaccgctgattttgctcaggtggattacaccgacgccgtcaccattctggaaaactgcggcaaacagttcgagaacccggtgtactggggcgtggatctctcctctgagcacgaacgttacctggccgaagagcacttcaaagcgccggtggtggtgaaaaactacccgaaagacattaaagcgttctatatgcgccttaacgaagacggtaaaaccgtcgcggcaatggacgttctggcgccgggcatcggcgagattatcggcggttcccagcgtgaagagcgtctcgacgtgcttgacgcgcgtatggcagagatgggtcttaacaaagaagactactggtggtatcgcgacctgcgtcgctacggcaccgtgccgcattccggcttcggtctgggcttcgaacgcctcatcgcttacgtgaccggcgtgcagaacgtccgcgatgttattccgttcccgcggacgccgcgcaacgcgacattctaaatttttctgacatcaatctgaaaggccagcgcaagctggccttttttttatgtcaattactgttagtaaaattcaacaaccttaaacatcaaggcctggaaatcacaattatgttacgcactgtttcggtgcatcctggtgatgtagatcgcactttatgttcataacagagcaaaatggctgataaatttgctcattttttgacctttacccgcacatcttgcaaagacagagactgaataaaaagaatacgaattcaatacacaaaatgaacgaattgccgcttagccaaattaatcataaataattcatatagatagataagtaatggcgtttgcccttatccggtggaacggaattttgattaagttcacaaagttccgttaaatacacatttagttacatgatttttcgttttgttactcatatgagatattcgtagcattttccggctagcgaaacgttgtcgcggatggaaagatgccttcagacaccaaactctcatcaatggttctgtaagtttttattgacagaacttattgacggcagtggcacgtgttcatataaaaaatattaatgagggtaataaataatgatgaagcgcaatattctggcagtggtgatccctgccctgctggtagccggtgcagccaacgctgcagaaatctataacaaaaacggcaacaaactggacttctatggaaaaatggtcggcgagcacgtctggaccaccaatggcgacaccagcagcgacgataccacctatgcccgtatcggcctgaaaggcgaaactcagattaacgatcagctgatcggctacggccagtgggaatacaacatggacgcgtccaatgttgaaggttcccagaccacaaaaacccgtctggcgttcgcgggcctgaaagcgggcgaatacggttcattcgactatggccgtaactacggcgcgatctacgacgtcgaagcggcaaccgatatgctggttgaatggggcggtgacggctggaactacaccgacaactacatgaccggtcgtaccaacggcgtcgcaacctaccgtaactccgacttcttcggtctggttgacggtctgagcttcgcgctgcagtaccagggtaaaaacgaccacgaccgtgcgattcgcaagcagaatggcgacggcttcagcaccgcagccacctacgcgttcgacaacggtatcgcactgtctgcaggctactccagctctaaccgtagcgtcgatcagaaagctgacggcaatggcgacaaagccgaagcctgggcgacctctgcaaaatatgacgctaacaacatctatgcggccgtcatgtactcccagacttacaacatgactccggaagaagataaccacttcgccggtaaaactcagaactttgaagcagttgtacagtatcagtttgacttcggcctgcgtccgtccatcggctacgtacagaccaaaggcaaggacctgcagtcgcgtgctggcttctccggcggcgatgcggatctggttaaatacatcgaagtgggtacctggtactactttaacaagaacatgaacgtctacgctgcgtataaattcaaccagctggacgacaacgattacaccaaagcggctggtgtcgccactgacgaccaggcggccgtgggtatcgtttaccagttctaatctgcagtacaccccttcgtgatatgccttcaaagcaggacttcggtcctgcttttctgtattcgtgagacaaagatcgtctctttcgaaaaccttcgcgctttttgtcgcaaacggttggcaattcgttattctcccgttaacctgatagcggatttcccttcagtaatcacaatggaacctcgtcatgtttgagaacattaccgccgccccagccgacccgattttaggtctggccgatctgtttcgtgccgatgaccgccctgaaaaaattaacctcggaattggtgtttacacggatgaaaccggtaaaacgcccgttctgaccagcgtcaaaaaagcagagcagtatctgctggaaaatgaaacgactaaaaactatctgggcatcgatggcattcctgaatttggtcgctgcacccaggagctgctgttcggtaaaggcaatgcgattatcgctgataaacgcgcccgcaccgcgcagacaccgggcggtaccggtgcgctgcgtgtcgccgcagacttcctcgccaaaaacaccgacgtgaaacgtgtgtgggtaagtaatccgagctggccgaaccataaaagcgtattcacttctgccgggctggaagtgcgcgaatacgcatactacgacgcggctaaccacgcgctggactttgatggtctgctggccagcctgaacgaagcccaggcgggcgacgtggtactgttccacggctgctgccacaacccgaccggtatcgatccgacgctcgatcagtggcagcagctggcgcagctgtcggtggaaaaaggctggctaccgctgttcgatttcgcctaccagggcttcgcccgcggtctggaagaagatgctgaagggctacgcgcttttgctgctctacataaagagctgctggtcgccagctcctattcgaaaaactttggcctgtacaacgagcgcgtcggcgcctgcactctggtcgccgcggatcaagagactgtagaccgcgccttcagtcagatgaagtcggtgatccgcgccaactactcgaacccgcctgcgcatggcgcctccgtggtcgccaccattctgagcaacgatgcgctgcgggcaatctgggagcaggaactgaccgatatgcgccagcgcatccagcgtatgcgtctgctgttcgtcaataccctgcaggagaaaggcgcgagccgcgacttcagctttatcagccagcagaacggcatgttctcattcagcggcctgactaaagagcaggtgctgcgcctgcgtgaagagttcgccatctatgcggtagcttccggacgtatcaacgtggccgggatgacgcctgacaatatggcgccgctgtgcgaagccatcgtcgccgtactgtaagcgatagtattcggtataaagaaaaaggccgcgaatgcggccttttttatgtgttcgcgtcatgtctgttaccagaccggcatctcatcctgcagaaacgggttattacggcgttcctcacccagcgtcgacagcggaccatggccgggaataaaggtcacatcatcgcccagcggcaacagcttttccttgatagccgcaatcagctgcccatggtcgccgcgcggaaaatcgctgcgtcccaccccgcctttgaaaatcacgtctccggagatcagcagtcgggaggcgtcatcaaaaaagaccacatggcccggcgtatggcccgggcagtgcagcacctgcagcgccacattccccacattgaccacatcgccttcattgagccagcgatccggacgcagcggttggcaatcctccaggccgaacatccggctttgcgccggtaatccttccagccagaactcatcctctttttccggaccaataaccggtacgccataatgctgcgccagttcagccgcggcgccaacgtgatcgaggtggccatgcgtcagcaggatctgcatcagcgtgacgccagcctccgccaccaccgctttgatacgttcagcatcgccgccaggatcgaccagcgccgccagccgggtttgcccgcaccagataagagaacagttctgcgcgaacgcggtaaccggaataatacgatagttcatgacgctcctttcgttaccagtgccttacgggaccggtatcaatatgcacaaagttactacgtgggtaatatcctacaccacctgcgcgcatagataacgccgctttgcgaatattgcttaacgaaataccttcaatatggaaatccatcgcctgccccttggtgtgatagctgtgtttcgctacaccacggcttcgtgcgcgaagctcatcgttggtatcgagggaacgatagccagagataagctggacaggtttgttggtgccaagtagtccctgcaaccgataaagatgatcgaacagatttggatcgatggacttaattttattcgcgcgatagtcacggaaaaaatggttaagtcttgctaattcatcctgaatatagcctctgccatcgaaaaactccgccctgagcgattcaccggtatgcaggttattcagcgtcaaaatacgcggacggggggtcgagagggtggcaaatgccggcgcagggagaatggcggcagcacccagcgcagcgccacccaacgccagcaatctgcggcgattagcgtcaaatttgtccatgataatcaggtctacagtcaatgaatcgttatatactttttccgctttgcgcgatgccaggatcagctcgctatcgctcgccacgaccgagatgttgcccggcaaaggagaacgttcgcgctaaccgcgctacgcattgagcggaatgatatgtatatgcacttctggcgcacgaaaggcaccttaccgggcattattgccaacgtcaaggcagcctcaccccaggaaaatcgggcgctgcagaggtgcagcgcccttttttacccagtgctaggacaacaaaatccattgaactacttcatttacctgattaattgttccgctttcgtcagaatttgtgcgctggatcgcgcggtgatatcgtaattgtaaatatctgttcgatattgtgtacgtccatcagcgtccacaaacgccgttaagtaatataaattcaccggtatattttgccgaatattgacatagcgcgtatccccctgcttcagggcgtcggaaatgcgcgtgtcattccagcccgcgtcctgcagcagcatattggccagctccgaggctttattgaccctgacgcagccggaactgagcgcacggacatccttctgaaacagattatggttcggcgtatcgtgcagatagatagcatccgaactcggcatattaaacttgtaacgccccagtgaattacgtgccccaggcgcttgctgaaaacggaacggtaaattgttctcggtgatggttgaccagtcaacccggtaaggatcgatggtctctttactgttccagccgcgcatcacggtgtagccatgctgctccagatagccaggattattacgcaccttcggcagaatatctttgcgcgccagggtgggcggtacgttccacggcggattgaccactacgttgttcagcgcgctgctcatcatcggcgtcttgcggtccggacgtccgacgatcacccgcgaggccagcacctgactgccgtcctggtaatagaccagcgaaaacgcgggaatattcaccatgataccggtcgatagtttgcctggcagcagacgtagacgctgaatgttcagcgccagcacgccagcgcgctgtgccgatgagacattgagccagtcacgggtggattggccgatgaccccatccgcccccagcccctgcatggcctgaaagcgcttaacgccctccaccagctggcgatcgtacacaccgcgcgccgcgggcttgctctttttcttcgccgaaggactcaccacgtcgccgggcagaacgatattggcggaattttccaacatcccggtacgctggaggatctcgcgcagcgcgccgatatcattgctccattctcccgggcgcagcgagccgctgccggtcatctgcggccatggacgtgaatcagccaccagcgccagcagcgactggtgcatggcctcatactgcggatgacgcggcgccaggccggcgataaacgccggcagggagccattatccagcgccagctgccactggttaatcaccgacagcggcggggtcgccatcttgtacggtgtcgagctatataaccagcgggtcccctgggtggggatgccgctgataaagtgcagatagcccatcatggcatcagacaacaccacatcgcgcgccatgccgctgacggcaggatcggtcagcagactgacccaggtggtaaactgcggctgaaaaccggcgatggcgatctccgccagctgctgctggaacgcctgcaccgcctcgcggttttcccacatcggtttcatatccctggcggcgtatagcgagaccagcggattcataaagacgggtttgtagccagccggcaatagcgcttcgatctgggcgcgactgttcgccgcggcttccatcgacagcggctgctcaccggccagcttcgcgaccgccggcgattgcccgtcgctttgcgacagcgcgacggaaagctctccaggcgtagcggagctatcacctggtacgacttcaggctctgcggcctggacattgaacagcggagcaaatgccattgccaggctcagactgagcgctgacaatggacgaccataccgtttcttaagcaacatcccttgccccctgttgtcacacattgccgcccacaaattcgtgggctttaacacagtatataaagacgaaaaggcttttgccttacctaatgtaaagaagcttaaagattataccaccctggcatagcaagctggatagcaaaaagggcaacttaacgttgcccttttcagcgcttacccgccagtagtgagctgcatcgtcacgaggcgtcggccgttcccggcagcgcttccggcagcggcgcagcaaacccgcgcagccccacaacgtgcacatgttcgtgattattgaacaccttacgcaccagtttataggtagtgcctttttccggactgatgttctccggcgctgcgataatcagctgcatctccagacgttcgcacagctcgaacagggtggcgatggagcgggcgtcgagacgcgccgcttcatcgaggaacagcagacggcaaggcgagatatccttgccgcgcaggcgacgggattcatcttcccaactcggcaccaccatcaccagaatcgacatcccggtaccgatagcttccccggtagacagcgcgccggactccgcgcgcagccagccgtcggagccgcggttaacttccacttccatctccagatagttgcggtagtcgagcagctcttcaccgatggtttgcggcgtacgctgccccatgtcgatctgtgggttgagacgctgatagagcttggccagcgcctcagagaaggtcagacgattgctgttaaacagatcctggtgctgctcatgctgctcggagagcacgtcgagcagcatcgagtgggtctcacgcacattgacgttcagacgcacgctgttgacctggccgaaggagacgctctgcagaccctggttgagcatccggatacggttctgctcgcgctgaatggttttgcgaataatgttggccacgctgcgggaactgatcgccagcttctgttcacggttggtcagctcttcggtcaggcggctgagctcgatctccatctgctcgatcgcttccaccggatcatcggtgcgaataatatcctgacgaatacgctcgcgcagatgctggtatacggcaacgaagaactgaattttgcgctccggacgcttcggatcttccgagatacgcagcacgtcacgcagatgttcgttatcggcgaccgccagacgcagcgcccccagcgccttatccgacattgagcgcagctcatcggcggagagataggccagctcgcggcgatgcagacgacgttcgacgccgttgtctttcaccagacgcatcaccgcgcaccagcccgccttggcggtcaccacctgctcgcgcatttcgcagtaatcgcgctccagcttgcgcagtttacgggtcaggttgtccatttccgcttcgcagaaggtcaacgctttctccagctgattgcgtcgggagcggttattgctcagctgcatgtgcagctcatcgcgacgcgcgcgagcacgctcttccgcgccggcgtcggcgcgcacgccaatgtcctgcaactctttatacagatcgttgagcagctctttcttggtgtcatacgagctcttcagcgaggccagcacctgattgtactgactaagctgcgccgcatgggcacgcatcgcgtcgcgcgcgcggctgcgttcggactccgcctgctccagacgctggcgcagcttctcgttgagatcgctgttgccgctgagcatttccgccgaatcggagtagctgaagtgggccctgcgctgcacaacttccgccagggcaaaagcctgctgacgcgcatcgcgctgggtttgctgcgcataggcgtaatcttctttcagctgctcaaactgctccggatcgctctgcagcaccgaaacaataggctccagcttcgccagctggttaccgtgctgctgaataaagcgcgcggcctcctgcgcttcgtccagacgttcctggatctcgtccacgcggtcggccagcgtatcatccgccagcaggttcaagcgcggcagcaggcggttgagcgccgacacgccctctttcgcctgctcgtactgcacacggttctgttggttatcgctttcatgggcgctcagcgcacgctccagctcgccgcggcggctgttgagtttgcggatctcttcttccggatcgtcctcgaaagccaccgccagatggctgccgataaagcggctgaaggcctggtgcaggcgctgggttttctgcacatcgaacgacagggtcgcaaaacgctctgacagcgattcacgctcggcatgcagggtttcaatgcggttttcacgtgccgcgcggccaaacagcggcagcgacgggaagcgcgaataacgccactggcgatcggcaatcttcaccaccaccgctttttccagctcgtcgacgctgaatacgctgtcgtcaaaggattgcggatcgccttcgatcagatagagatcttccgggcaatcttccagcccctcaagctgctcggctacccgcgacagatccggaaccacgatcgcatggcgcgacggaccgtacagcgcggagaagtacggcgcatcgtccaggctaacatcatcgtagatctcggacagcagaacgccgccgaaccgttccgccagggcgttgaggcgcggatcttccgaaccgcccggctggctaagacgctcgatttcttcgtcgatggcgcgcttgcgggcgccgacctcgtcacgttcaacgatagcctctcgttcacgctccagcagctgctgcaggtattcggtgacctcctggccggacgcaaactgctcgccgctttgctcgcacagctggttaaggctgttctgcgccgccagccagaccggcgcccgacgcatcagcgtctgggtacgcgactgcagttgctccagctcctgacgcagcgccatgcgctgctcctgagcattggagacgctgtcggccagcgacgcgatgcgcgcttccagctcctgatgcagcgtttccagatcgtcgatatcgtagcgtttaccctggcgtttgcagaactcggccagctgacgctcagcgtcctgctgctcgcgcaggcgctgttcaagctcgttgaggcggctgcgcagcccctgcgcctgctcggcctggtggcgctggttcacgccgtcgcgcagcaattcgcgcgccacgtcccaggcttcattgcgcgccagcgggccgttaatcgccgccaccaactggtaagcctgttcaaactggctgtgcgcggtttgcgccacgctcattttctgttccagcgacagcattttctccgtcgcttcctgctctttcgcctggaaggtttccagccactcgtcggcgctctccggggtcagatccggcagatggcacagcgccttcgcgcgctccagcgcctgcagcgcctggttatactgaatggcgcgggtctgctgcacatcgagcgcctgctgatagtcggcgagttggcttttcagctcatccacttccagctcggcggcctcagcgcgggcttcgttctcttcctgacgatcgacggcttccgccaccacttcattctgctcttccagacggatctgcagctcgtcgagatccgcttcgtagcgctcgattttttcctgctgacgcagcgcagtctgcaccaggttcaggtgatcgctggcggcctggtaatcggcttccagatcgccctccgcgccgttatgctcctgcagttcgcgcgccatgtcgacgtgcttatactgctcagccgccagctgcgaacgcgaggtgaagagatcgcggcgatactccagcgccttatccaggtgaatgcgcctctcgttggcgtgacgcatatagtccgccgccacgtagttggtggcttcgctgatcaggtgtttaaacagatcgcggtcggactgggtaacgcgaatggcttccagcgtcatgcggttttcccgcagcgccgcttccatatcctggaacgctttacgcacgccgctgttttccggcagcaggtagtcgcgcagcgagcgggtaatggtgctggagatcccgccgtacagcgaggcctcaatcaggcggtagtacttgctacgatcggaggcggaacgcaggcgacgcgccaccacgcccagatcgaacattagcgagtgatattcggtgatcgagttgaactgtttaaactggaccccttccatcgcctcgagtttatctttcagctcgttgaggctcacgacgcgcgcctggcgatcgttcagcgtttcggtcaacagctgggtcggcaggatagaggtcggcagtccctgaatggcgaaaggtttaatatcgactttacgatcgcgcccggcgacctgctgcaggcgcacgccgaccaccacgcgctggtggcgggaattgatcacatcgagtaccgagtaacacaccccggcgcgcagcttaccgtgcaggcctttatcgcgtgagccgctggtggcccccgcttcggtggtgttacggaagtgcagcagggttaaatccgggatcagcgccgtgacgaaggccgccatggtcgtggacttacccgcgccgttccccccggagagggtggtcaccagttcatcaagatcaaaggtccgggcaaagaagccgttccagttaaccagcgttagcgagcgaaacttaccgcgttcaatcattactcttcctccccgctatccggctggttttcttcattctcatcattgagctgcaggtgattttccagggccatcgcttccccgtcgcggatcagacggcgctgcgcttcgcgcgggtcgtcgccggcgcgcacatcggcgccaaagcggaataccgattcggtaatgcgaaacttgctgctatcgtggcccataaaccacaccatccccagacggcgtaagcggttaagcgaggcccgcattttttcctgcagcttctggcggtccagatccgaaccggtggaacggttgttcaccagcttcagcagcctggattcatcggccagggtcagcagctcgtcatagagctcctgctgggtaaaaatcccttcgttcgccaggcgctccgggctgagatagagatagcaaagaattttgcccaccatcatatccagctcggacagtaccgagcgcgaaatcagcgtggtggaccgcgggcgcaggtagaagaatccctccggcgcgcggatcagctcgacgttatagcgagcgtaaaactcttccaggtaatcctgaaaatccatcaaaaatgcgtgattatccagctcgtcgagaccgatatgacggcccgcgcgcagggcgctgtccagcgccggaaataacggattggccaacgcctgcgccagcttaaccggcatcacttgttcaatatttgtcaatgacatgcgcctgtaccttggctccgtaatcattaatcggctgccattttgccggcagtccggtgaaatctgcctgggcgacgcccagctgtaccgcctgatccacgacgatccgcgccacgtcgaagtgacgcccgcgcggatactgcgccaggaactcccgcgccaccaggccgagatccagcggtattcctttctctttatagaccgccagctgcgcttcgatcagcgccgccagctgctcgcgaatttcgttaaactcttcaaattcgaggtccgccggcagctcgccggtgacctcttcatcgcgcagggccatctcttcatcgcgcatatccagcaggcggtcggcgttggcgtaagttagcgcccacggttcatcaaaataggtctgtaccgactggcgcagacgctgggcgaagacgcggttcttatccatatcgatagcggtacggataaacttgtgcacatggcggtcgtagccgatccacaggtcaatcgcctgctgaccccagctgacgatgcggtcgagcttgctttgcagatcgaacaccagccgatcgacaaaatggagatcgtcgcgcgccatggtcgagtcctgaatgcgcagcaggttcgcctgcagcttatcccctgccgcatccagcgtatcctgcagttcgcgcagggtgccggaggtttccgacagcagcagttcacagctggaaatcgccgcgcgccagtctttattcaacaactgcgcgatatcgtctttcaccagctgctgctgctcatccataatgcgctgcgtcaggtcgatgctgtcgaaaatttccgctacggaatacttcagcggcgcaaaaacgttgcgatgccagtggaattcatcaccgccctcttccgcggcgtccgccgcgcgcttcagctcgccggcgacgatcgacagctgcatcgagagacgcagcgtcgagaattcgcgctgacggatataataatcggtgatcccaatccccaacggcgtcaggcgatagatcgcattgccttcggtaatttcgctggtaaagcggttcagcagacgctggcgcaccaaatcgttgatcgcgttattggcgcgctggctgatggtttcgctggtctgctcaaacgcatcactgacgtggcggaacgcatccaccagttcaccctcgctcatttccccttccagtcgttcaccgttcagagtggcgatcgccagcagaaaagagagtctgtcgaccggtagcgagattgaaaaatcattttttctggcccaggcaaccagttcggggactgtctgggaaaattcactcatactttatccttgcatctgcggctatgagcctggctcttaagcgcggtgacatgaatataacggcccaggctgagatacggctcctgacgacagtagcgcgtctccagcgccagcagcgccgcatagctgtcatgctgttggcgtttttcacgcagataatcatgaaacacccgcacgccggttttgctgacgatctgccagccaatctcttccagccagtgataaacctgctgtggttcacgcggataatccggcgacagcgtgcgttttttcttttttggcttgcccagttgaacggaatcaaaattaccggcaaccatattgtgcatcaacaggccgttagcattgtagaacatcaatgacagtccaccgccagcacgcagcgtcgaccacagggtatgcagtatttcctggggctccgccacccactccagcaccgcatgaaacagtaccagatcgaccgggctttccaaatgctgcgcaatatcctgagccgcgcattgtacaaaatgcatgttgtcgatcacacctttatcggcggccgcctggcgggcgcgagccaccatctcagcggagagatcgcacagcgtcacgtgatggcccagttgcgcgactttgatggccgtttgcccttccccgccgccggcatccagcaccctcagcggtcccggccccagctgcgccaacagcggttccagatcctgccagaggatcgcctgacgcaactggccttttgtggtgccgtaaatattgcgcgaaaacttttcagcaatgtcatcgaaattgcgctcctgcacgagtgactccacaagccaacacaaaaccgctattttgtcatacccgcgccgagaatgaagcgatctgttataagatccgaacataactttggttatatggttaaaaaaggaaccatctggcatgcttttcacgctaaaaaagatcgtcggcggcctgctgttgccgctacccgccttactgttgctgatcggtatcgggatcgcgctgttatggttcagccgctttcagcgtaccgggaagctatgcgtgagcctcggctggctgctgctgacgctgctgagccttcagcccgtggccgacagcctgctgaaaccgattgaagatacctaccccacctggcgcggcgagcagccggtgaactacgtggtggtgctgggcggcggctatacctggaatccggagtgggcgccaagctctaatcttatcaataacagcctgccgcgcctgacggagggcatccgcctgtggcaggcgaatcccggttcgaaaatgatctttaccggcgcggcggcgaaaacgaatcccgtcagcacggcggaagccggggcgagagtggcggagagccttggcgtacctcgcagcgatatcattgtgctcggtcggccgaaagatacagaagaggaagcgctggcggtgaagcgcgccatcggcgacgcgcccttcctgctggtcacctcggcgtcacaccttccgcgggcgatgatattctttcgccatgccggcctggatccgcttcctgcgccggccaatcagctggcggtgacctcgccgctcaatccgtgggagcgggccattccttctccagtgtggctgatgcacagcgaccgggtcggctatgaaacccttggtcgcgtctggcaatggctgaaaggcagctcaggcgagccagagcaggagtgattttgcagcgaggtcaaaacgggcgcgatcaaagcgcccggtgttgaccagactatccacctcatcccacagcagataaagccagcgccgccagacaaaggcctcggaaactggcgcctgctgcaggtagcgccacagcagctgttccgcctggccgccttcagcaaggcggaacagttcatactcgcgtggcgcccacagcatcatccccggccccaccatcgccagcagctgatcgctgcgcggatcttttagcatgctgcgcagagtgaagttgccatgcaccagcacagcattatcattgaaatcgcggaacagctccggaaggcactcgcgggagcggaacaaaaggcgcttatcctgcatggtgagaccggtgtcctgatacaggttcagggtgctccacaatatctctacccgctggcggtaccagttcggccataggttttcctgggtattgtcgaccattcccacgcagccgccactgtcctgccgatgccacgccagcagcccctcgacgatttgctcctgcagttgctcccagcgcgccggggtgcgcgtcggcgcctccaccggtacgccgcgcaggcgctcaagcagcagcacatctggtccgggatgttcttcgtgcgtcatgacgccataaaccaccggcatacgcaccgtaccattacgcgccagggtcgagatcttccatgccagctgccgcgccacgccgggcgtggtgaaacttcgcgccagcagcggcatcgggtttccctgcgcatcgtacaggaaccacagcgccgtagcggcttgttcactgacacactccacccggcttagcttttcgccaagaagatgactgagttcggttcgcaactgttccattgtcgattacccctatgaacactactggtttcataatgagcgcccgcacctggcttgtcatcggataagatcaaaaaggggtaaaaaaagcgaaaaaccgacggggatatcccctccagcaaggaggggacagaggactaacgcagctcagcgcggacgcgctccagatcctccggggtatccacgccggtgccgggcacttcggccgccacggcgacatggattttctcgccataccacagcactcgcagctgctcgagcatttcaatctgctccagcgggctcggcgcccagctgacatagcggcggataaagccggcgcgatagccatagatgccgatgtgccgcagcagggagtcaccgatggtctcgcgggtttgggcaaagcgatcgcgatcccagggaatagtcgcgcgggagaaatagagcgcgtaaccctcggcatccatcaccactttgaccgcattcggattaaacgcctcttccgcatcatggatcggtaccgccagcgtcgccattccgctgctgctggcagccagattctccgccacctggcggacaatcgccggggggatcatcggctcatcgccctgaatattgacgataatggtgtcatcgctgaacgcacacttttccaccacttccgccagccgttcggtgccggactgatggtcggcgcgggtcatacagacctcgccgccggcggcttcaaccgcccgggcgacatcttcgtgatcggtggcgacaataatgcgatccgcgccggattcgcgagcgcgctccagcacatggacaatcatcggcttaccattaatgtcctgcagtggttttcccggcaggcgcgtggaggcgaaacgcgcaggaataatgaccacgaaactcatgagtgactctcttctagcgccagcggacgcgcctctgtctccagcagcaccgggataccgtcgcgcagcggaaacgccaggctatcaagtttgcaaataagttcttgcttatcctgactgtaatacagcttgccgttacagaccgggcaggcgatgatttcaagtaaacggtgatccatgtttcctcctgatggaccggatagatttctcagcagcatatcacaggaaggcaggcgccgggatcaatcggcgtcgatttcccacccctgctcctggccgacaaacagcccttccggcaggcgtcggcacaggatccgctctgccgattgccagcgtgcgaagtcgttaatcgcccggcgcagcccctgctccagaccacgggtgatcttcaccccctcctccagccacagagcgaagatctccagctcccggcttttgcgatgtattttactgtccatccgcccgaccagttttccctggtgcagcagaggcagtacgaagtagccatactgacgcttcggcgccggggtataacactccaggcgatagctgaagttgaacagctgctcagcgcgtttccgatcccagaccaccgggtcgaagggcgagagcacggcgctatggctggcggtcagcttaccgccgggcgcggtctccagctgcgccagcgcctcgtgatgcagccacatctcgccgagtgcttccacgttaaccggcaccaccagcccctcttcctgccaggccgccagcagacccggtagcgccggctggcgcaagcgatagtaatcggccagccactgggcgcggaagatgccgagactacgggcgctattgcgcaacataatggcctctgcgtcttcgcgggagagcgcgtcgcgctcgtcgtcccagtccggcatcacccgccgggttagatcatacacgcggtgaaaattgcgccgctccaccaccatcacttcgccggcggtaaacagcccttccaggtggcgcttatgcggtttccactcccaccagccgctggcgcctttgcgcgggtgggtaaaatccgccgagcgaaccgggccgttttgcccgatatgcgccaccagctcggcaatactcccggcatgctcctccatccatgcgcgatggtatttccagcccatattgtcgggattcaacatgcgatggcgcaccagggcgaaatcgctgcgcggcagaaagcaggcttcatgcgcccagtattccattagctcgccgttgcgcagcgactcatccagccagtgctgcggatagctgccaagacggctgaacagcaccaggtaggggctgcgggccaccacgttgatggtatcgatttgtagcagcgacatctgctggatggtggaaagaatgtctttcgggcgagcgcgacgtcggggcttctttaacaacccctgcgccgcgagatggaggtggcgcgcctcgttaagcgatagttgcaataccgacatgcaggttctccgtcaggaattccagcacagcggcgagcaaagccggcgcgtcagttaacgttgcgccaacgtcgctaagtccgcaagcaaccgctgtgcgcgttcatcggccattatggcgtcgaccggtaaataccaccagtttgcagcggcgaaatcgcgacatttcacggcatctttctcggtcatcagcagcgtctgatcggcggtcaccagggcggcgacatcagcctggctcagcgcctgatggtccgccagcgccacggttttgaccggctggacgccacagctttcgagggtggcgaagaagcgcggcggatggccgatgccggccatcgccactacgttcgtgaaggtggagacatcgcgacgttcgccggtaagcaggttaaccgccatccctgggcgcagccgcatcgggatctcacccggacgcgccacgccgccgttaacgataaccgcatcaacgctttgcaaacgcgacgcccgctcgcgcatcggcccggcaggcagccaccagccgttgccaaagcggcgcacgccgtcaataacgacaatttctctgtcccgcgcgagcttatagtgctgtaaaccatcgtcggtcacaatcatctgcagatcgtgcgcgctgagcaacgcttttaccgcgtcgctgcgtagcggagcgacagcgaccggggcaccggtacgctgatggatcaacaccggttcatcacccgccagcgccgtactggttctgtcgtccaacaccagcggatagcgttcagctttaccgccgtagccgcgagacacgacgccaacgcgaataccgcgctgctgcagctgctccaccagccagatcaccaccggcgttttgccattgccgccggcggtcaggttaccaaccaccaccaccggcaccggcgcgcgccaggctttttgccaccccagctgatagctgaggcgaatcaccccgctcaccaggccatacagccaggagagcggcagcagcaggcgccacagcggcgattccccggaccagatgcgcgcgatcattcgccgaattgcatcttatgcagctgggcgtacacgcccttatgctccagcagatcatggtgcgttccgcgctccacgatccgcccgtcttcaaccaccacgatttcatcagcctgctcaatggtcgacagacggtgagcgataaccagcgaggtacggtttttctgcagctcatccagcgccgcctgaatggcacgctcggactcggtatccagcgccgaggtggcttcatcaaggatcaggatcgggctgttacgcagcagcgcgcgggcaatagcaatacgctggcgctggccgccggacagcatcacgccattctcgccgatgatggtatccagaccattatccatcttgttaatgaaatccatggcgtaggccatgcgcgcggcctcttcaatctgctcgcggctgtactcttcggtacgggcataggcgatattgttggcgacggtatcgttgaacagatgcacgttttgtgaaaccagcgccacctggtcgcgcagcgagctcagcttgtactcgcgcaggtcgtggccatccagcaggatctgcccctcgtcgacatcgtagaagcgggtgatcaggctggcaatggtcgatttacccgaccctgagcgccccaccagcgccactgttttcccttccgggatatcgagattgatattgcgcagcgcggccacttcgcgacccgggtaggtaaaggtgacgttctcgaacttgagattgcctttcgcccgctcaatgacccgcgtaccttcgtctttttcctgctcggaatcgaggatcgcaaacagcgtctggcacgccgccatcccgcgctggaactgggcattgacgttggtcagcgacttcagcggacgcatcagcgcaatcatcgaggagaagaccacggtaatggtcccggcggtcagggtgtccatcacgctcgggaagctggcggcatacaggacaaaggccagcgccagggaggcgataagctgaatgatcgggtcggagatagacgaggcggaaaccatcttcatcccctgcagacgcattttattgctgactttatcaaaacgtttggtttccacttcctggccgccaaacatcagcacctctttgtgccctttcagcatctgctcggcgctggtggtgacctgccccatcgtgttctgcatattcttactgatattgcgaaaacgcttggagaccacgcggatcgccaccgacacaatcggcgccagtacgatcaggatcagcgacagctgccagctgtaatagaacatcatcacgaacagaccgataatcgatgccccttcgcggaccacggtgatcagcgcgctggaagaggaggaggcgacctgctcagaatcataggtgatgcgtgacagcagcgttccggtagactgcttgtcaaagaaggccaccggcatacccatcatgtggccgaacaggcgacgacgcatggtcatcaccactttgccggaaacccaggaaatacaatagctcgagatgtagctggtgatcccacgcagcaccatcaggccgataaccaccagcggcatccatagcagcactgagcgatccgttttaccaaaaccatcatccaataacggtttaagaagcgataacatgaaggtgtcactgcccgcgttaagcaccaacgccaccgccgctacgattagcccggctttaaacggcgcgataatcggccaaagtcggcggaaggtctgccacgtggagagatctttatcgttctgcattcaataaaccagcttgtgttgaaatagccgcatattctacccgttatcggcgggcgcgccaaaccactgatgataccaacgcggtaaaacttgatcccgtaagctatggatttgccacccttctgcggaaaaaaccaccgttatctgcccctgctgcggcgtggcgaaccagcgataaccccgctggcggtagcgctgaaccaccttgtacgagggcatccgccacgcattgtagcgcgaagcggaggccagcgcggccgcgccatccacccggcggaccagcagcgcgctggaggaggtattgctgccgtggtggggaacctgaataagtgtagacgtcagatgccgccagtaacggctgatcatcgcctgctccgcctgacgttctatatcgccggtgagcaggatgctggagcgaccatcatcgatccgcaccacacaggaatgattgttaccctttgccgtgctgcccggtagcggccacagggcctggaagttgagtccctgccattgccagcgctcaccgcgatgacacggcagatgatgcgcccagcctaacgggctgcgcacccacgcctgcggccatgcctgcagcactgaatcaaggccgccgcgatgatccagatgttcatggctcagcataatcccttgcaactgcagatggtgccagcgcagccacgggataatcacctgttgaccgctatcaccctgcggccaagccggcccggtatcgtaaagcaatgccttaccgtgacgctcgatcaccatcgccagcccctgtccgacatccagcatcgtcacccgccattcgtccgcaggcggttgtcggctgaatggccgcgtcagtaaaaacagcacgctgagacacagcgccggtgaatgccgccagctctgaaaacgccagcccatcaccaacagccacggcaggatactgatccacagccagcgagcatccagcgtcaaccagccgtccggtaaacgtcgtaatccccaaaacagtagcgccagcacgcgatcggccgccagccagagtagcgactccactatatccggccccgagagatgcaccagcatcgcggtcagaataagcggcaccgccaacagggtgactaacggtaccgccagcaaattagccgccatcgacgtcaggctgactccatggaatagcaacaactgcagcggcagcagcagcagcgtcacgccagcctgcaaatgaacaagagcaattatggtcttccacggccagcgccagcggccggcaggcaacgggagccactggaaccagaagataagccccgccacggcgaaggcagatagccacaggctttgcgacagcaccgccagcgggtcggcaaccagtatcgctcccagacagcagagccacacctgccacgccgtccagcgttgacccgacaaacgtaaagcacaacagaccgcaagccctaagcaagtgcgcagggccggcggctgcataccggtcagccaggcatagccgacggcgcccgccagcccggcgacaaggggcaaccgccagccaatccagcgtcccgggagaatatactgcacgccgcgcagcaacagcatgataagagaagccgcgagagcgatatgcagacccgagatagccatcagatgggaagtgcccgtgttctgcatcaggacctttatctccgtcggcagagacagccgctcccccattcctaatcccaacatcaccgcgcgccagggataagtctgcagtcgccgggtcagcgacgtcagatagcgggcgcgcagactgcagcgggcatccagcgcggaagcggcgacgatccctccgctcagcggtcggtgctgcgccagcgcatagcgctggctgtcgaagcccccgtcattgagctgcccgtgcaccgggcgcaggcgcagcgtcatcagccagtgttgacccgcacaggctggcgcaggtgcaagttccccgtacagcgttacgcctaccgggggaaacagatagcggccccgcaggcgcaccatttgtccacggtgcaaggtctggccatccgtctcgctaaggatcacttccgcttgccggatggcgccggtaaggtgccgggtcggccacagcgcctgatgcgcgctcaatactccccagaccaccagcagaagcgtcatcgccactccggcgacggcccttccatgcagacgaatcagcgccagcgccagtgcgctcgcgcccgccagactgtacgggcccggcaagacgggtagccagagaagcggcagcattgcaatgatggcgcatccggcaagccatggtagacgcataaacacctccctgtgagtggacagtgttacgcaaagcggtgctggcgtcctggcggcgaattcaggcttgcgcggcgcattccagacaatcgcctcgcttgcagccgggcacgctttttttgtgaggatggccgtaaatggcgggcacaaaaaaagcacccgaaggtgctttctttatcgtcaggcaggctgcacgtcgtgcaactcacccttcataaatattggcgcggtcacgtaattctttcccgggcttaaagtgcggaacgtacttaccttccagttcgactttatcaccagttttcgggttacgtccggtgcgaggtgctcgatagtgcagagaaaagctgccgaaaccgcggatttcaatgcgctcaccttgagcaagcgttgaggccatatgttccagcatttctttaacagcatcttccaccgctttcgccggaatgtgagattgctggctggcaagtctttcaatcaattctgacttggtcattattcctccggtttccttcaaggcaaaaattagctaacagcttaaacaagggcggccgtagccgccctttgtgcttgattacaggacgaatcctgcaatctgtcaagtaaactcgtcgctattcaggttgttattacctgaatgacaaagattactcgcctttcgctgctttgaacgcttcagccatagcgttgttggagaagttcgcgtcttcctgcttgttcacggtagcgatagcgtctttttcttccgcttcgtctttcgcacgtacagacaggctcactacgcggttcttacgatccacgccggtgaatttcgcttcaacttcgtcgccaacgctcagaaccagagttgcgtcttcaacgcggtcacgggatgcttcagaagcacgcaggtaaccttctacgccgtcagccagttctacggttgcgcctttagcgtcaactgcagtcactttaccaacaacgatagcgcctttcttattcagagcaacgtagttgttgaacggatcttccgcaagctgtttaacgcccagggagatacgctcacgctctgcgtcaacctgcagaacaactgctgcgatttcgtcgccttttttgtattcacgaactgcttcttcgcctgcaacgttccaggagatgtcagacaggtgaaccaggccgtcgatgccgccgtccaggccgatgaagataccgaagtcagtgatagacttgattttaccttcaacacggtcgcccttgttgtgggtttccgcgaactgctgccatgggttagatttgcactgcttcagacccagggagatacgacgacgctcttcgtcgatatccagaaccattacttccacaacgtcgccaacgttaacaactttggacgggtggatgtttttgttggtccaatccatttcggaaacgtgaaccaggccttcaacgccctcttcgatttcaacgaagcagccgtagtcggtcaggttggtcacgcgaccggtcagtttggtaccttccggataacgtttagcgatagctacccacggatcttcgcccagctgtttcaggcccagggatacacgggtacgctcgcggtcgaacttcagcactttaacagtgatttcgtcgccaacgtttacgatttcgctcggatgcttaacgcgtttccaggccatatcggtgatgtgcagcaggccgtcaacgccgcccagatcaacgaatgcaccgtagtcagtgaggttcttaacgatacctttgacttccatgccttcctgcaggttttccagcagctgatcgcgctctgcgctgttttcggattcgataacggcacgacgagaaacaacaacgttgttacgcttctggtccagcttgatgactttgaactcaagctctttgccttccaggtgcagcgtgtcgcgcaccggacgaacgtctaccagggaacccggcaggaacgcacgaataccgttcagctcaacagtgaagccacctttaactttgccgttgataacaccggtaacagtttcagcgtcttcgtaagctttttccagcgtgatccaagcttcgtgacgtttagctttctcacgggacagcagagtttcaccgaagccgtcttctactgcatccagagcaacgtcaacttcgtcaccaacctggatttccagctcgccctgggcgtttttgaactgctcagccgggatggcggactcagatttcagaccggcgtcaaccagtactacgtctttgtcgatagcaacaacaacaccacgaacgatggaacccgggcgggtttcgatttcttttaaggattcttcaaacagttgagcaaaagattcagtcatgtttaatcttcaggttaatattaacgtccacctggctccatgccggatggggttgtttcacatacccgctgaccatccattgccgcggggtactgctataattcggaggcttcggcgcgttaccggttaaggcctacgcaacggccaatttttcgcgcgcatattgtagcgctttttcaatcacttgctcaatgtttagttcggttgaatcgagaactaatgcatcggcagccgggacaagcggcgccacggcgcgatttcggtcgcgatcgtcacgctcttttatctcggacaaaagacgttcaaagttaacatcaaagcccttttcctgcaactgccgcatgcggcgatgcgcccgctcatcggccgaggcatcgaggaaaattttcaccggcgcgtccgggaaaactaccgttcccatatcgcgaccgtcggcgataagccccggcagttcgcggaaggcgcgctggcggcgcagcagcgcttcgcgaacgcgcggaaaagccgccactttcgaggccgcgttcgcgacctcctgagtgcgaatttcgctactgacatcttccccttccagcaccacttccaggttgccgtcagtagaaataaaacgcacgtcaagatgggcagccaggggcaccagcgcctcttcggactccacgtcgacatgatgatgcagcgccgccagcgccagaacgcggtagatcgcgcctgaatctaacagatgccagcccagcgcttccgccattgccttgcacaacgtacctttacccgcaccgccaggcccatcaatggtgattaccggaatattcgccgtcatctttttctccttcagcaaggcgcatggaatataaacgccgcgcattatacgcatcaatacgccggaaagtgagcattgcttgtaaattacggactacaggaaatgaaaagcagaagttttgcgcaattatagcgggctgacaggacatcagcccgcgggatgacaaagttttactcaggcgagggtactgatccgcgccagctgctcaaagtagtcagggaacgttttggccgtacatttgggatcaaggatggtcaccggcgtatcagacagtgctaccagcgagaagcacatcgccatccggtggtcgttataggtgccgatttctgcgtacttcaactttgccggcggggtgatgcggatataatcttccccctcttccacctcggcgcccactttacgcagctcggtcgccatggcgaacagacggtccgtctccttgacccgccagttgtagatattgcgcagggtagtggtcccttgcgcgaacagcgcggcggtggcgatggtcatcgcggcgtccgggatatggttcatatccatatcgaccgccttgagctcgccgtgggtgcaggcgatgaaatcgtcgccccaggtaacggtggcgcccattttctccagtacgtcggcgaaacgaatgtcgccctgtacgctgttgcggccgataccggtgacttttaccgtgccgcccttaatggcgccagcggcgaggaaatacgaggccgaggaagcatcgccttccaccaggtaatctcccggcgactgatactgctgcttgccgcgcaccacaaatcgctgataagactgattgcccacctcaacgccgaaggttttcatcaggtgcagcgtaatgtcgatatagggtttcgacaccagatcgcccttaatgacgatgacggtatcctgcggcgccagcggcgcggtcatcagcagcgcggtcaggaactggctggagacgctgccgtcaacctcgacgttgccgccctgaaaaccgccgcgcaggcgcagcggtggataattttcctgctccagatagtcgatctgagcgccgccctgacgcagggcatccaccagatggccgatcggacgctctttcatccgcggttcgccggtcagcacgatatcgttgctgccaaggcacagggccgccgccagcggacgcatcgcggtaccggcgttgccaaggaacagctccagcgccgcggcagagcgcaacgggccgccgttgccggtcacttcgcagcgggtgcggtcggcagacagggtatattgaacccccagcgcactcagggcattcagcatatggcgcacatcgtcgctgtccagcaggttggtcagcaccgtcgtgccgcgggccagggcagccagcagcagcgcgcggttggagacgcttttcgaacctggcaggttcacggtgccctctacgcgtgcgatgggttgtaacgtcagggattccatcaaacttcactctcaaacaaacagaataaaaaccccgcagacaggccgcggggaggaagaaagaaacaggcgattaaccgtggcggcgttcgaagtccagcataaagtcggttaacgtcttcacgccgtccagcggcatggcgttgtagatggaagcacgcatgccgcccaccacccggtggcccttcagcgcgtgcagcccggcagcaaacgactcttcgaggaacagtttgtccagggcgctgtccgccagctggaacggtacgttcatacgcgaacggttggcctgcgccacatcgttacgatagaagccgctgttatcgatcacgccgtagagcagttcggctttctgctggttgattttatccatcgcggcaaccccgccctgctgcttcagccacttaaacaccagtccagccagataccatgcgaacgtcggcggtgtgttaaacatcgagtcattctcgcttaacacggtgtagtcaagaattgacgggcaggccacgctggctttgcccagcagatcttcacgcacgatgaccagcgtcagcccagccggaccgatattcttctgcgcgccggcgtagattacgccgaagcggttgacgtcaatttcgcgggaaagaatggtggaggagaaatcggcggtcacgatgacgtcgtcgccgaagttcggcgtctcatcaatcgcgataccgtcaatggtttcgttcgggcagtagtgcagataggccgcccccggggtcagctgccactcgctcatcggcttcacagcgcgcttgccgtcgacggtgattttcgcgtcgataacgttcggcgtgcagtatttcttcgcctctttgaccgcgctggccgcccagtagccggcgtccacatagtcagcgacctttttatcgccgaggatgttcagcgggatcccggcgaactggccgcggccgccgccgtggcagaataaaactttatagttggaagggatgttcagcagagcgcggaagtcctgttctgcctcttctgccacctggataaactccttaccacggtgactgatctccatgaccgacgtccccagaccgtgccagtcgcacagttcctgctgcgccagtttgagtacttccgccggcagcattgccgggcccgaactgaagttatagacctgagccatttcccctcaccacgttgctatgttgttttgcccgcgaaccgccgcgggcataagttattcctgtggctatcggttttatcattcagtgacaaggtccgcaatggctaaaactcgccgacggtaaaacgcggccgccgtcacacaacagaatctatcggcttgacgtaataaaaccgacatatttgctgtcaggtaagccgtttcgcccggctggccttcgaccattctgcatttgcgcagcgcggacatattcgtttttctcccgcctgcatcgccattacgatgctgcagcgcacgcaggcatagatcccctcttgcggaatggtggtatagcgtgtggtacaatgcgctggaaggatcgataatccggccctcacctcttcatcgggataataaaacacgctgatctgcccgttggtttcgaggattgccagccggacctggccaagctgctcgacgctgttgacccgcagctccataaaaaattcgaattcggtcatgttttccgcatgcagcttctcccaggccaactgtccctcttccaccactacgataggtttcccctccagtagatcctccagcttttcgctatgccccatcagccacataatgccgcgatacagtagcgccagcgtaacgaagaccaccagcaccggcagcagcggcacatcgtcataaaacgccacgtcacccgccgccgagccgagggtcaaaataatcagcacctcgaacagcgacatctgccgcacgccgcgccgtccggtaatcttgaggaaaataaagaccagaacgaaggtatagaggctgcgcaacgccacctccgccaggaattccaccggtactttatcgagcgccatccgctgccagtcaaaggctttcattttccatctccctgtgtattaaagatgcctctaagcatagccagatgatggagatagcacctgtcagataaaagccgtatcattgcgcgctttccgtacgacaaaagtgatcgccatgacccaaacgtttattcccggcaaagatgccgccctggaagattccatcgctcgcttccagcagaaattgctcgacctcggatttgatatcgaagaggcctcgtggctgaacccggtgccgcacgtgtggtccgttcacattcgcgataaagcgtgcgcgctgtgctttaccaatggtaaaggcgccaccaaaaaggcagccctggcctccgcgctgggcgaatatttcgaacgtctgtccactaactatttcttcgccgacttctggttaggcgacactatcgctaacggcccgtttgttcactacccgaacgaaaagtggttcccgctgactgaggatgatgaagtcccggaaggtctgctggatgcccgcctgcgcgcgttctacgatcctgacgatcagttaacggccagtatgctggtggatctgcagtcgggtaacgatgagcgcggcgtgtgcggtctgccttttacccgccagtccgacggcgaaaccgtctatattccgatgaatattgtcggcaacctgtacgtctccaacggcatgtccgccggtaacacccgcaacgaagcgcgggtacagggtctgtcagaggtctttgaacgtcacattaaaaaccgcatcatcgctgaaagcatcagcctgccggagatcccggcggaagtcatggcgcgctatccgggcgtcgtggaatcgatcgccaaactggaagctgaaggtttcccgatctttgcctatgatggctcgctcggcggcaaatatccggttatctgcgtcgtgctgtttaacccggctaacggcacctgcttcgcctccttcggcgcccacccggactttggcgtggcgctggagcgaaccgtcaccgaactgctgcagggccgcagcctgaaagacctcgatgtcttcacgccgccaaccttcgatgacgaagaggtcgccgagcacgcgaacctcgaaacccactttatcgactccagcggcctgatctcctgggatatgttcaagcaggacgccgactatccattcgttgactggagcttctctggtactaccgaagaagagttcgccaccctgatggccatcttcaaggccgaagataaagaagtgtacatcgccgactacgagcacctgggcgtttacgcctgccgtatcatcgtcccggggatgtcggacatatacccggcggaagacctgtggctggcgaacaacagcatgggcgctcatctgcgggacaccattctgtccctgccgggcagcgagtgggataaagaagattacctggcgctgatcgagcagatggacgatgagggtctggatgatttcacccgcgttcgcgaactgctggggctcgccaccggaaaagacaacggctggtataccctgcgcgtcggcgagctgaaagcgatgctggccctggccggcggcgatctggaacaggcgctgatctggaccgagtggaccatggaatttaatgcttcggtcttcagcgcggagcgcgcgaactactatcgctgtctgcaaaccctgctgctgctgagccaggaagaagagcgtcagccgctgcagtacctgaacgccttcatccgtatgtacggcgccgacgcggtcgaagccgccagcgcggcgctgagcggggaagcgccgttctatggtctccaggcggtcgatagcgatctgcaggccttcccggcccatcagtcgctgctgaaagcctatgaaaaactgcagcgggcgaaagcggcgttttgggcaaaataagcccagcttgcgccatcgttaatgcttacaacggagccctcagcggctccgttatttaaccctgagaaagcgcctcctataatttgtagttgtaaagttaattaatgttaaataacgccatttcatcatttatcaattgttaaatttaataaaaatactccattttaattaactcaaaaatgggggtaaaaaagaaaaaattcaacattatctataaaatttaaaaattattttctctatatatttcattagcttacggataatttcaataaaaaccacacactaaaaaggcatatagttccggtgagatatgatctatatcaatttcccttctataatgctttgttagtatctcaccgccaacttatataaagagagagttagtgtgaaagctgacaacccttttgatcttttgctccctgccgcgatggcgaaagtcgccgaagaagcaggtgtctataaagcaacgaagcatccgatgaagacgttttatctggcgatcaccgctggcgttttcatctccatcgctttcgtattctatatcaccgcgaccaccggcactgccgcgatgccttatgggattgccaaacttatcggtgggatctgtttttctctgggtctgattctgtgcgttatctgcggcgctgacctctttacctctacggtactgatcgtggtggccaaagccagcggtcgaattacctgggggcaactggcaaaaaactggctcaacgtctattttggtaacctggtgggcgcgctgctgtttgtgctgctgatgtggttatcaggcgaatatatgactgccaacggcggctgggggctaaacgttctgcagaccgccgaccacaaaatgcaccatacttttgtggaggccgtgagcctgggtatcctcgctaacctgatggtttgtctcgccgtatggatgagctattccggtcgtagcctgatggataaagcgatgatcatggtcctgccggtagcgatgttcgttgccagcggctttgagcacagcatcgccaacatgtttatgatcccgatgggtatcgtaatccgcaactttgcaagcccggaattctggaccgccatcggttcgactccggaaagtttctctcacttgaccgttatgaacttcatcactgataacctgattccggtaactatcgggaacattatcggcgggggtctgctggtcgggttgacatactgggtcatttacctgcgtggcaacgaccatcactaagggttgtttcaggcagtaaataaaaaatccacttaagaaggtaggtgttacatgtccgagcttaatgaaaagttagccacagcctgggaaggttttgcgaaaggtgactggcagaatgaagtcaacgtccgtgactttattcagaaaaactacaccccatatgaaggcgacgaatccttcctggctggcgcgactgaagcgaccaccaagctgtgggacaccgtaatggaaggtgtaaaacaggaaaaccgcactcacgcgcctgttgattttgacactgccctggcttccaccatcccctctcacgacgcgggctatatcgagaaaggtctggaaaaaatcgttggtctgcagaccgaagcgccgctgaaacgtgcgatcatcccgttcggtggtatcaaaatggttgaaggttcctgcaaagcgtataatcgcgagctggacccgatgctgaaaaaaatcttcacagagtaccgtaaaactcacaaccagggcgttttcgacgtctataccccggacatcctgcgctgccgtaaatccggcgtgctgacgggtctgccggacgcttacggtcgtggtcgtatcatcggtgactaccgtcgcgttgcgctgtacggtatcgacttcctgatgaaagacaaattcgcccagttcaactctctgcaagcgaaactggaaagcggcgaagacctggaagcgaccatccgtctgcgtgaagaaatcgctgaacaacaccgcgcactgggccagatcaaagagatggccgctaaatatggctatgacatctctggtccggcgaccaccgctcaggaagcgattcagtggacctacttcggttacctggctgccgtgaaatctcagaacggcgcggcaatgtccttcggtcgtacctccagcttcctggatatctacatcgagcgtgacctgcaggcgggtaaaatcaccgagcaagacgcgcaggaaatggttgaccacctggtcatgaaactgcgtatggttcgcttcctgcgtaccccggaatatgatgaactgttctccggcgacccgatttgggcaacggaatccatcggcggtatgggcgttgacggccgtactctggtgaccaaaaacagcttccgcttcctgaacaccctgtacaccatggggccgtctccggagccgaacattactatcctgtggtctgaaaaactgccgctgagcttcaagaaattcgccgctaaagtgtccatcgatacctcttctctgcagtatgagaacgatgacctgatgcgtccggacttcaacaacgacgactacgctatcgcatgctgcgtaagcccgatggttgttggtaagcaaatgcagttcttcggcgctcgcgctaacctcgcgaaaaccatgctgtacgctatcaacggcggcgtggatgaaaaactgaaaatgcaggttggtccgaaatctgaaccgatcaaaggcgacgtcctgaacttcgacgaagtaatggatcgcatggatcacttcatggactggctggctaaacagtacgtcaccgcgctgaacatcatccactacatgcacgacaagtacagctacgaagcctctctgatggcgctgcacgaccgtgacgttatccgcaccatggcgtgtggtatcgctggtctgtccgttgctgctgactccctgtctgctatcaaatatgcgaaagttaaaccgattcgtgacgaagacggtctggctatcgacttcgaaatcgaaggcgaatacccgcagtttggtaacaacgaccctcgcgtcgatgacatggccgttgacctggttgaacgtttcatgaagaaaattcagaaactgcacacctaccgcaacgctatcccgactcagtctgttctgaccatcacctctaacgtggtgtacggtaagaaaaccggtaacaccccagacggtcgtcgcgctggcgcgccgttcggtccaggtgctaacccgatgcacggccgtgaccagaaaggcgcagtagcctctctgacctccgtcgctaaactgccgtttgcttacgcgaaagatggtatctcttataccttctctatcgtgccgaacgcgctgggtaaagacgacgaagttcgtaagaccaacctggcgggtctgatggatggttacttccatcacgaagcgtccatcgaaggtggtcagcacctgaacgtgaacgtcatgaaccgcgaaatgctgctcgacgcgatggaaaacccggaaaaatatccgcagctgaccatccgcgtatctggctacgccgtacgttttaactccctgaccaaagaacagcagcaggatgttattacccgtaccttcactcagaccatgtaattccctgtctgactgaaaaggcgtacaataaaggccccacatcagtggggcctttttaacaagcattccccgccccagcctgctttgccagttatctatactttgggtacctgtcaaaacagactcgacgcagccgctgagctgcgcaccaacacggccccggatgggccacatctggagaaaacaccgcaatgtcagttattggtcgcattcactcctttgaatcctgtggcaccgttgatggcccgggcatccgctttattacctttttccagggctgcctgatgcgctgcctgtactgccataaccgtgacacctgggatacccacggcggcaaagaaatcaccgttgaagaattaatgaaagaggtggtgacctatcgtcactttatgaatgcttccggcggcggcgtcaccgcctcgggcggtgaggcgatcctgcaggcggagtttgttcgcgactggttccgcgcgtgtaagaaagaaggcatccacacctgcctggataccaacggcttcgtacgtcgctacgatccggttatcgacgagctgctggaggtaacagacctggtgatgctggatctcaagcagatgaacgatgagattcaccagaacctggtcggcgtctctaaccatcgtacgctggaattcgcccagtatctggcgaagaagaatatcaatgtctggatccgctacgtggtggttcccggctggtcagacgatgatgattccgcgcaccgcctgggcgaatttacccgcgatatgggcaatgtcgaaaaaatcgagctgctgccctaccatgagctgggtaaacacaaatgggtagcgatgggcgaagagtacaagctggacggcgtccatccgccgaagaaagagaccatggagcgggtaaaaggcatccttgagcagtatggtcacaaagtaatgtactaatcccgcccgggccggtgatgcgcttatgccggcctgcaacggcgtgggaagctgtgtccgccccgccgtttcattctcatgaaaaacgacttgtcctctctgcggcagtaagcctatgcgattgcagcagatgacgcgcagcatgcgctgcgcgttgcagggtcaggcgtgcgccaccggcgtcggatgatgcccggctttgcgcagcagggtcagcagatagataaacgacacgctggcgatcatgataaacagcaggttgtctgagaagttctgcatcagcatcgccgtcagggtcgggcccagcaggctgccgatggtatagctcatcagcagcgcctgattcatcgccaccagctgatggtgctccactttttcacaggcccaggccatcgccaccggatacagcgtgaaaccagatgccccaagcacaaacagcgccggggccattgccgcctgactaagcatcgccagacatcccagaatgaccacaaagacctgtacccgcagcaccagcaggcgaccgtagcggtctgccaggcgccctaccggccactggccaaggatccccgcactcaccatcaccgccatccagaagccgatgccggagtcgctgacgccctgatggttcagccacagcggcatcaggccatacagcgagccgaggacaatccccgaaataatacagccattgaccccgtggcgcgcctggcgtagcttcagcatcggccagatacgtaccgtttcatgcggctcttctgcctgccccataatgcgggtaaacagcaacggcaggatcgccgccagcgccaggccggtcacccacggcaggacgctcattaaatcggtgggtaatttactgaccatcagctggcccagtacggtaccgacgtaatagaccatcatgtacgccgccagcagacgaccgcgactgcgggaagtgccgctgcaaaccagcgcgctttccaccaccacccagatcatcgcgcaacctacgccggcgataaaacgccagctcagccatgtccagaagccaacggtgatccccagccctacgcagccgacggcgaaaattaacgatgcgagataatagctacggttaaaccccaggcgcttgatcacccagccggccagcaacgtaccggccaggttgccggtaaaataggatgaccccaccatgccgacctgccaggttggcatgttttcatgggcgagccagagcgggacgagcgtattcagcaccgctatcgccagggtcaataaaagcaggccacagagcagcatttgcactggccgggtgtagatggtcatgggtaaaaaccgtgaggaatgttcagatcgcgagcgcatcatgccactgctaaaaacattgtcaatccacctgaaatcaggcgtgacgcggttttgtcggctacgatagaagttttttatccagaggatggaaaaaggtgagacaacagataatacgctattgtttttgctagtttattaataaatgccgaagttaatttcagttgaaaaatttcatctatcgacagcacgttttcatcatgccggtggttaggcaccggcatgatggaggtggttaactggcgacagccatcccaacggtcatatgcaggccatagaatacgccgcggccgatcatctctcccgccagtatcagaacaaaggccaggccgagcagcgagaccgccggtttgcggccgcgaatctgcggcacgcaccagcaggccagggccagggccagggccagcagcaccacgcgccaggccataagcaacccgtaatccggcaccagggcggaggcctgctgaactgagctgcggatagtggcaagttcacttccctgcatcacgaccaccataatactgaccagcagcgccagcaaactaaccaccggcagcaggcgcagcgcccaaccatcgacgcccgcgacgcgcagcagcaggtagcccagcagtggaccgccgataaacagcgtcaggaagaagctcagcggcgtccaaacggtgtaccaggtcggcaccgtgtcgatggtgttgtacacccgcaccatcatccacacgaaaatcacgcccagcaccatggtcaccaccagccacaggctccgcaggccggcaggcagctttttgcacacggccagcagccagccaattccgccgacggcgaagaagatcgccccgctggctatttcattactcagcgacgaggctcccacgcgattcagcgaattaaaggcccgcagcggcgagccaaggtgcatcgtcgaggcaataaacccgatccccatcaatacccacaggccgaacatgctgcccaccacgcgctgctcctgctcacgggaaagcttgcctgtcatcagcgccagcgccagaacaataaagccgcctacgacgcactggccgaagaccgtaaagaccatcagcggccattcatgccatccgtttcccatctcacacctccttcgggttcgccaggtaaccggtggtatcgccacacggccgggcattggcgttaggtttgataacgatactcggccgggtaaagtgcgccgacggcagcggcgctaccgcggccagctggccgtgcttagcgcgcagttcggcaatcggcccgaaatccaacgcccgcagcgggcaggactcgacgcagatcggctttttcccctcggcgacgcgctcgtgacagccatcgcacttggtcatatggcctttgtcggcattgtactgcggggcgccgtacgggcaggccatatggcagtagcggcagccaatgcatacctcttcgttgaccaccacaaaaccgtcttcgcgcttatgcattgcgccgctcggacagaccttggtgcaggccggatcttcacagtggttacaggcgatggagaggtaataggcaaacacgttctgctgccagacgccgttgtcctcctgccagtcgccgccggcatattcatagatgcggcggaagctgacctccggggtcaggttcttgtagtccttacaggccagttcgcaggttttgcaaccggtgcaacgggcggaatcaataaaaaatccatactgagttgtcatcggttactccttacagcttctcaacctgaacgaggttggtatgcgacgggtttcccttcgccagcggcgacggacgctgggtggtcagcacgttgatgctgcccgcctgatccacacgcgaggcgtccgggttgtaccaggccccttcccccagcgcgacgacgcccggcatcatgcgcggcgtcacctttgcttcgatatgcacttcaccccgatcgttgaagatgcgaatacgatcgccgttggcaatgccgcgcttgcgggcatcgatcgggttaatccacatctcctgccgacaggcggccttcagcacatcgacgttgccgtaggtcgagtggacgcgagatttatagtggaagccggtgagctgtagcgggtatttcgctgtcagcggatcgttgtagttttcgaaacccggggtgtagatcggcagcggatcgataacatccccttccggcagctcccaggtggccgcgattttcgccagatcctgcgagtaaatttcgatcttgcccgaaggcgtggtcagcggattagcctgcggatcctcacggaaggctttgtaggccacatgatgaccttgcggatcgcgctgcttatagatgccctgctgacggaaggtgtcgaaatccggcaggtcgggaatcgctttgcgcgactgctcatacagatagcgcatccagccttcctgggtacggccttcggtaaactgctcttcgacgcccagacgctttgccagttcgctggtcatctcatagatggttttgcattcgaaacgcggcttgatggcctgatcggcaaagataacgtaggacatgttgccgcaggaggcatccagcgcgaaatccatctgctcggaggcggtacagtccggcagcagaatatcggcgtatttcgccgaggaggtcatatggcagtcaatgaccacaatcatctcgcatttcttgtcgtcctgcaggatttcgtgggtccggttgatctcagaatgctggttaatcagacagttgcccgcatagttccagatcatcttgatcggcacgtcgagcttatctttaccgcgtacgccgtcgcgcagagcggtcatttccgggccgcgctcaatcgcatcggtccacataaacatcgagatactggtctcaaccggattctccagcgtcggcatacgctcaaaaggcagactatacgagccctcgcgcgccccgctattgccgccgttgatcccgacgttacccgtcagaatggcgagcattgagatggcgcgggtggcgatctcaccgttggcgtgacgctgcggaccccagccctggctaatataggccggtttagcggtggcaatttcgcgcgccagtttaacaatgcgttcgcgcggaataccggtaattgtcgaggcccactccggcgttttggcgataccgtcagtgccctggccaagaatgtaagctttgtaatgaccattggctggcgcaccggcgggcagcgttttctcgtcgtatcctacgcagtatttatcgaggaacggctgatcgaccagattctcggtgatcatcacccacgcgaggcccgaaaccagtgccgcatcggtcccaggacgaatcgggatccattcatcttcacgcccggtgccggtgtcggtatagcgcggatcgatgattatcatccgggcattggatttctgccgcgcctgttcaaggtagtacgtcaccccgccgccgctcatccgcgtttcgccggggttattgccgaacagcaccaccagctgactgttttcaatatccgatgggctgttgccgtccgcccagccgccgtaggtgtaattcagaccggcagcaatctgcgctgatgaatagtcgccataatggttgagatagccaccgcagcagttcatcagacgggcaatcagcgttttccccggcggccaggagcgggtcagcgtcccgccgagcgtgccggtgccgtagttcagatagatggattcgttgccgtactctttaatcagccgctgcatattgctggcgatggtatccaacgcctcttcccagctgatttgctcgaacttgccctcaccgcgtttaccaacgcgcttcatcgggtacttcagacggtccggattatagatccggcggcgcattgaacgcccacgcaggcaggcgcggacctggtgcaaaccgtcatagttatcgtcaccggtattatcggtttcgacgtatttaatcgcgccatccaccacgtgcatgcgcagcgggcaacggctaccgcagttgacggtgcaggcgctccagaccaccttctcactggcgggcgccggcgtatcggcagcatgcgacagtcgggtaaagggtaacgttagtgcgttgctggccagcgccaggccgcctattgccgtggttttcatcagaccacggcggcttacctcagcagccagtaaagcatcaggggctttaattttcatggatactcgctttggttgctcacaataaactgacaagcgttatatagatatatatataatgctttgcgatattattagttttttatgctggtttaatccaaagggagtatcactgcattcgcggcaaggattattgcccggtatcaataagggcgtaaaaaaagcgcccgcaggcgcttttaaaagaaggagtgagaagtttagccgatatattcgaggccgcgcatatacgggcgcagcacttccgggatctcgatacggccatcagcctgctgatagttttccatcagcgccaccagcgtacgacctactgccaggccagaaccattcagggtatgaacgagacgggtcttcttatcggacttgctgcggcagcgagcctgcatacgacgcgcctggaaatcccagacgttggagcaggaggagatctcacgataagtgttttgcgccggaacccatacttcgaggtcataggttttgcaggcgctgaagcccatatcgccggtgcacagcgcgaccttacggtacggcaggcccagcagctgcagcactttctcggcgtgaccggtcatctcttccagcgcggccatagagtcttccgggcggacgatctgcaccatttcaactttatcgaactggtgcatacggatcagaccgcgggtgtcgcggccataggaaccggcttcagagcggaagcacggcgtatgggcggtcattttgatcggcagatcgtcttcgtcgatgatttcatcgcgcaccaggttggtcagcggcacttccgccgtcgggatcagcgcgtagttgctgctgtcagcctcttcttccagcggacgggtatggaacaggtcgccagcgaatttcggcagctggccagtgccatacagggtatcctggtttaccaggtacgggacatagttttcgctgtagccatgctgttcggtgtgcagatccagcatgaactgcgccagggcgcggtgcagacgggccagctgccctttcatcaccacgaagcgcgagccggtgagcttaacggcggcggcaaaatccagccccccgtgcatttcacccagcgtcacatgatcgcgcacctcaaaatcgaactgacgcggcgtaccccagcggctaacttcaacgttgtcgttttcgtcgcgaccaaccggcacatcatcatgaggaatattcgggatcgccagcgcgatatcgcgaatttccgccagcagcgtttccagctcggattttgcagcatccagttgttcgccaagcttgttaacttccaggcgtaatggctcgatgtcttccccgcgcgctttcgcctggccaatggatttcgatcgggagttacgctccgcctgcaggttttccgtttgcacctgcagaactttacgacgctcttcaagcgcgcgaagtttatctacatccagcttaaagccccggcgtgccagtttttctgcgactgcgtctggctcggtacgcagcagattgggatcgagcatgcttatcctgtgcttatcgaattaaaaaagaaaagtggccgcagactacgaccacggaaatagtgtaataaccttaccgcaacgcctcaattagcggtagcgttttatcgggctattttgatcctgttcagcgagccaggcgagcttttcgccaattttaccctcaagcccccggtttgtcgggtgataatagcgcgtttgcgccatttcctgcgggaagtactgctcgccggcggcgtaggcgttgggttcgtcatgagcgtaacgatactcctggccgtagcccatctctttcatcagcttcgtcggcgcattgcgcagatgcaccggaacgtcgtagtcaggacgatcccgcgcgtcggccagcgccgctttgaaggcggtgtacaccgcgttgctcttcggcgcgcaggccagatagacaatggcctgggcaatcgcccgttcgccttccgccggcccgacgcgggtaaagcagtcccacgccgaaatggcgacctgcatcgcccgcgggtcggcgttgccgacatcttccgaggcaatcgccagacccgtcccctatccacaacacgcgacgccgacgcgcgacccgccgcaggctccggggggcgcgcgacccctaacaa

SEQ ID NO: 136 - DNA, 110391 bp, Unknown
  source: /note="Description of Unknown: MKP2_2161_1 Mutant Bacteria sequence"
catcatcacgaagtttcagacagaacatagaccaattatttcgttcgtatttaggctgaggccagaaagccagctcgggaagaccatatccgggaagtttgttcatgcgcatattgataatactcacgaggataaagcgctgattttaacatggtcagccttggttaatcagtcagttctgtcagtaacatagcatctgggaattaaatcaaattatgtgattctgggcatctgttttgtagcctgcttttgtatataaatactaagctacatattatttatatggagacaggctttttataccaaattcccagacacattcccttccgtttccacttccaaaaacagtaactagtcgctatgatcagccaaatgttaagtaagtagttacctatcggtgggggcatgagccagatcttttttgataccataaacaacggccagtacgacttcatgacagagtgggacacggtcgctatggacaagtgggttgcggaaaacatcggtctttcacgatgccagggagaggctgagctctttgatacaaagtggtttgactatcgcgacatgcacccgctgatggcaacctgtctgttcaccgaagcctataagcgcgcatactcacagatcatgctgtctcatggccgcgagcatttcgagacggcgccattcagtactggtctgaaacgcctgccttaccaagagctttcggcggtgaacaaaacctctctctggaaagctcgccagtttgcagatcggtattgctgttcttatgactattttatatcaactgttctatctgcagctgcacgccggctctgggacaaattacctcgccctcagcatctttggcagccagaactgattgagatcttcgaaagcaaactcgccaatcgtgcgggaacgcgtctggatgactctgtcgtgagttttaagcacttgggagacatgcagcatgacccaattcaggaacgttactttgaatgggttctggagcgtttgaagcacatcacccgtgataagcgtatccgcaccatcttctctgctgtctggttgatggagctggtgcctgagcgcgttatatatgcccattacccggaagaactggaagaagcacggcgactgtgttgattgcctgctccatatttttacgattagaaaacaacttgtttaagcaccaaaggataacaaacacatgaccgaactttgccacacgggacgagggttgtctgaagagttcgacgacgacttccagaatcgtctggcggcgtatttttgccgcgatcatgagtttctgactcgtgccggcgatctggttgcccccaaccaattctccaatgcggcgaacgccatactggtgaacatggtatcgggctatttcagaatgtataagagcgcgccttcatcggcggccatcctcgatatgttgaagcgtgctaaacgcgataagacgatcagagaagagatgttcccggatgttgtggcggcgtttaagcgagtgctctcggaaaaactctctgatacggcttacatggtcgaccaggtcgcgacgttcgctaaaagtgtagcgttcgacgatgcgttgattaaagcggccgagatgaaggagaagggcgacttccagggagcgatggccatcatggccaaagtgcagcagatcggttctaacgaagcgacgggcatttatgactattacgcctctgcagcggaacgttacaaggcccgtgaatatgaagcctctgatgattacgtgccgaacagcatcaccaccggtcttccgctgctggatcgtatgctctatcaaaaaggttgggcgaaacgtgagatggtgctcttcatggggtttgcgaaatcaggtaaatcgacagcgatgggggagttctccattaacgcaacgctggccggctacaacgttttgtatctttctctcgaagtgcatacctcgattctctccgatcgcttcgatgcacggctgtctgaaacggagatgtcaaagctggtggagcagcgtgacgacgttcaccggaagctcgcggagcttggtgcgacgaaaggggtggggaatctgtgggtggtcgagcgcccgtcaggaagcatgtcgcctgcagatttggatcgtatgctcaatagcatgaaagcgaatggcatgatcccggatatggtggtggtcgactatgcggatttgatgcgtgccagttacgacctccgtgacgaccgggcgaacatccgttctatctacaccgatctgcgtgctctctacgataagcacaacgttgcaggaatcacggcatcccagaccaatcgtgaaggtggctcatccgaagtggccaccatgatgcacgccgcggacaatatcgaaaaagtccgtatcgccgacttagtcatcactatcaacaagactgaagaggaagaagccaaaggcgaagcacgtctctattttgctggttctcgtaaccagaagggcggggtgagtattcgcgttaagcagaacctcgaacagatgcgcttcatcgagcggatcatggaggttctttaaaaaaataggcgtggggcaaagacggataacagccccacgcccttaaaaattaccttttggttaatcacaaaaggaaaaacacatgagcctttatggtattcaaaaaacgcggcttatcaagatattgccgtttaaaaactgcggtaaatgacaatgagtgacctcaaagagttactgtccgagctggatttcgaacaatggctggatatggaaggcatcatctatcgtcgcggcggtgtaagcgcccgcggccgcgaagtgaatatcaaagaatgtccggtatgtggaagcacaaactggaaggtctatttcaacctgaccaacaacgtcgggaaatgcttcgccggcgatcacccagaagaaattcaatttaacaagctggttttcctcaaacactacagcggtaagtctcgtcgtgccttcgaggaatacgtacataacgcactcctgtctcaaggttgggcgccaaaaaaagaagaggttgtgctggccagtgctgtggaacttgaaggcccgatggctttaccgcggcattatgagcttccaattgacggtcggctgccggactatcttgttgagcggaacattaccccggagctggccaaatactttgacctgcgttactgcgtcgagggaaaacatgcttatgtcgacccatataccgatcaggttaaagggcaggcattcgatatgcgcatcctgataccgatttacgatctgaatggggtgatgaagacattccaggggcgtgacatcaccggcgcagcagaacgccgatatctctttccaatgcagctgccggcatccgggaggtttctctataacggacataacgcagttggaaagcaaacagtcgtcgtctgtgagggggctttcgatgtcatgggggttaagcgcgccatattcgacgaagagacgctccgggactacgtagagcccattggcacgttcgggatgcatctgtccggaaacacgactgtagacgcagaagaccagctgggcgcgtttctgtcgttaaaggcagatggtttgcgaaacgtcatcatgatgtgggatagcgagaagcaagcgatccgaaacacaatggcggccgccagacgattaaccagtatagggttaaatgtgaaaatagcctgtcttggagaagaagggctagatcccggggaggccacccaggaacaaattctcaaagcctactatcgtgcaaaaccctactctaagcagctggagctgcagagcaaggttctcggtattagtgcatttaaatagttcgactcatggctgtagttccatatccgtgtcggaaataccataatttgtttatgtatgtaggtatctacttaaatattttaatgtaataaataacactttggttatggaggacatcacatgaaaaaaggtatcgaacaggcagttttagagatgatcaagaagtcaggcgtagagcttggcgtgggcgagctggagagcatcatcgatgcctcattcaacacggcatcagagcatatatcgaatgcgctatcctgcattcctctcaaagaaggggcgacacatacctcggtgttagtgtggtacgcaaagacgcctgaaatgcctggtactgttcaaaagcgcgtagctctggttgcgttcatcgtcccgtcgcttgagaccggcattgggccagtcgcgcattttggcgcttggtatgacgacaaaatcatcttctcaaactgctaccagatggaaagcagggaaatgcttgagcatagcgtggacgtgactctcatagccgtagaaagcaaatgcgagacagtaggagaggctttcgttagcgtcatgacttctcccgatgttgaaaagcgccatgtagatctggtggcaccaccaggcttgttggaaatgattgtctctggagattacaccaaggctatagcgcgtgttcgtgagctggactatgggcgtatctgcgacctgtgtcgtagtgatctggacttaatcaacgtgatcgttgaggctggccgcgtctgtgatggggtgttggcacaatacgcaagtaagatcagtcgtttggccaatgaaatgcctatgctgattcaggaagccaaatcccacgccgttcatgccgcaaacgacctgctaaccccttatcgatacgaagccgcaagtgacaagatgaccggctgggccacctggtaagccgtgactatgtactgtgtccccgtacagagttatttaaactgattagtaagtaagtacaagattatcgtttagagaaatggctaccaaaactgacttatcaaaaatcccttcgatctctggactcaacggctactcgctgcgttgcccggaagtgaagcttaacggacatgactcgtactgcagctacaccgtctgtcagcacacgatccttgccttcaaagagaagcgactgccggcgtcatcgttcacctcctgtgcgaacgccatttcggccggaaaatgccaggcgctgaaaatgatggtagaggaaatccggcaaggtgagtcgctgtatttcgtcgatatgccggcgctcattgaagaggtggaggaacgaaaccgaacagcgagaaccctgcagccgaagagaggcagtgcatctatctacagtggaattaaagggaagcgccaatcttcgaccgtggctaaaactggcagactgccggatgccagcgagatttattcagaacttatcaaagaaaccttaaaggagaagaccgactaatggagaagctgatcgcgcttaaacataagctggacgccattaaaacaatgggaacgaacgccaagaaagaggcgctggccagtatggatgacttcgaacaaagaatggtgtcactcatgctgaacccgtttgttcgtttcggggtgaagaaatacaacgtggccgatccacttagcaagtccgtacccagtgatcagaaagcgatagagctgctggagcaactgattgaagcaggagaatactcatgattccatacatcatattgactttttctggaggcgtcgcccttggcttcatcatctgtcatgacttgatcaagcaggaactgaagaccaaaacacttcgtattggtaagcgggtatatcgcgtcgttcacgagacaggggtatcaaaatgagcaatctaacctcgtttgactggtggataggcttgtactttgtggcttctggtgtcgcagtagcttttacgattggccagtccctggtaaagctactgcttttaagattcgccaatcgcaagcgtatcgatgacacgctttggtgccttggaactctacttgaacagcgttacggcgagctgaaggaaggtgcaaccctttgcataaaggcaaaacgtttcacggccacaattcagcggacgcaggatgataagtcaaagctgatcaaaaaatgagcaaaagaatgcatgaaataataggtaattatttacttattattttgatacaaatatgattgacttgttttcgttgagacgcgactgtttgaacgtttaaagataactgcaaacgacaatcagtatctggcagtagcctaaaaagccaaacaccagcgaggtcagtttccagcctcgtcaccgaaatgggacacactaagcgagtgtgattgcaaaacgcaggtagggcatctggttaaccagtgcccttaccgatgaggtaacagaatgggcggttgggttttatgtccaacacatcccggctcccaaagacccgaccgtctatcctgttacgtcatttctgttacttatgtcgtttagttttgggttaaaaatggcgacgtaacccggctggttaggtgagccagcacgcaacgttgagaccactggtttttgcatcacagaggcagaaccggcagacatgtagggccaagtacattaatccgttcagtggtttcaacgttgtggtcacggtttcattatccttctggttatagccattgttgtcactgccccgtggccacaacgattaaatgattccatacatctaattagatctgaatgaaaactctcctcaaccctcggagagtatttgaagatcttggcttgtaagcgtttggtgaacacgtaaagcacaagtggcaggaaacggtaggactgctgcgaacgacaccggtgaatcggtgatacagccccacaagtccgtgaatcgacagaggctgacggtgtcaaccttagatggtgtagctcagtggtagagcggttgactgttaatcaactggtcggtggttcgaatccacccaccatcgccaacacagcgctgaacggtttggagttcgccaccaccatccgaacggaaagactccgcaaatgtcgccagaccgttcagcgctgtgatagacacggcagacgttcttaaccattgcttcttagcatcgtagcaacacttttttcagcgcaaataattaaaggggcttcggccccttttgtaagattagcaaaaaagaacaatattacttgaaaaaaaagacaaagttagtcaatttcatttaataacaccaatgtcataatcgaggaccttgctcctctgcttaattaaaccattacctgttaagtttaatttgaatagccaattctatcttttctctgaatttttttgcatttccctgtaagtaagggtccattcgtttgaatatcgatagaagcttcctacgatatgttaaacttgtagagttaaattcccccgttgttgtgtgtattaataatgcctcacctatatcattaatctgcctttcttcgagcctggtgtaacaggtgacaaccatctgtaatatggatacttttgagtaccccttcaatttcgggctaggaataacatgctctaacatagagcctaatactttcgtcgcttccttagggatatacctaatatcctccttagaattattaactgtttttatatatgaactttgttctgcccaatctatagcaataccgaataggcgacatagaagatagtgatatggtgtttgatgttctgcgattgagtcaatactctgaactttcatttgatataatattttttcagcaaagtgtttgaaataatgcagccaaagatgatcttgcaatctttgatgaataccttgatgcaccataatttcgaacattgttattccagaattaataggacaactaaatctactttgctcacggtaagagccaaggggcttgtttagtatttctgataacttactgtcttcatctaaacgccagcaaacagattcacctatagctctatatatgccacttttacttgcatacactgagtcggcaaagaaaaagtgaagcaagcggttggtttcaggtatcgcaagacgtcctccagtacatgtattttggttatttttaagttctacataaagacgactaccaggtgagtcaagcagcgaattaataaatctatcaatgaaatcagaacgaacgacctcatcagcaccaataagcctcaaacaaaaatgaggatatgcaagtgaaagatgccttgtaagatcaggagaagttagtatattcagcaaaacctctcgggctttatcactggcttcataatttgatgatagcttttcacgcaaaggacttagtagggaatatagacctttcaccaagacatttcggtctttgggttcttctccattcaataacgcatttcgatcggagccgccatatagcttatcaatccattgaacaataaggttcggttttccattagcaagggatattatttcgtctaactgaggctcaactaacaatactaactcatcatattttttggtaagatgtaaactctcaattagctcaagaaatagttttattttacctcgatttaatgttggcgattttagccgaatgaaaagatatgaggcagccaagagaaacaatagatatactgcactcgaactatccaatccccatatccacggtccgaaactgtaatacagtccaacttgtcttaatgcaggtgcaaaaaccaaataattagctagtataaaaatcagcccaatgattagtaggtcccaccgagtcatacaaaaacgaaatcgcagtctgctggtaggagtaattattgcccatacggcagcgatcactccaagtatagtgagtaaattagtggtatctattttggctggtatcgtcataatattttcagtattcctttagtagacgcactggcaagcttaaactgtatcacatgaccgcttcatagtagtcatgattgaagcaaagcgcctatcctataataactaaaaaaactttattatccccctttaataccgtaaaaaactttgttgaagtcattatgataggtaggtacatacttatcttttttgtgtttctaatgtatagtactttcagttactcacttgaaaggactcaatatgggaaacaaacgtaaacagacgcgtcgcgcagctcgtcaggctctgaagtcaaaaccacgtatccacggctacgaaattgacacaatcattgttgacgaactggctgccgcccctgctctgcctccgaaaccgaagcgcgacaactctcctctcgaagcgcgaaacgaggcccaggcccactatctcatctccctcgataccaaaacgctaacgttcgccacaggcgaagctggctgcggcaaaacgtacctggccgcggccgttgcagcgcagcgtctacttaataaggaagtagacaagatcatcgtgactcgtccggtattgcaagcagacgaagatctgggcttccttccgggcgacatgagcgagaagttcgctccgttcttccggccagtctatgacgtgctacagaagcgtctgggtggctcgtttctcgaatactgcttaaagccagaggtggccaaagtagagattgccccattcgcttacatgcgtgggcgcacgttcgagaacgctgtagtcattctcgatgaggcgcaaaacgttacagcgtcacaaatgaaaatgttcctgacccgtatgggcgagaacgtaaccgtcattgtgaacggagatgtgacgcaatgcgacctgccaagcaatgttaagtctggtctggaagatgcactggagcgatttaaaccttcctcccatgttggccttattgagtttgcgaccgaagattgcgtgcgttctgagctatgcaaagtcgcactggaagcctatcagtaagggaaagccaatgaccaaagagtacctgccacaccagaaacgtgtcatggatgaacacgaagaactgtgtggccgcatcaaagaactggaggcgtacattgcaggcgacgagtttgctcgcctgctgtatgtcgaccgcatcatcctcatttagcagctggacacgatgaaggcgtatgacctgattcttcgtgcccggatcgctcgtttttaacgtaaggaaaccaaaatgaccgatatggatatcgaaaaagagattgtggccaaaggcaaaacggccgcgcgtgttaccccggaacgcattgaagctgttatctcaggcgagttttactttaccggcgcggacggatatcgcagctcaccgttgtggctgaagcaggaagagcctgaaccggccctgcaatcactcgaactgctgaccttctgcgttcttgtgctggagaacggctacaccgtaaccggcgagtctgcgtgcgccagcccggagaactttgatccggagatcgggcgtaaaattgcacgccagaacgcgattgccaaaatctggccactggaaggctatcttctcaagcagcagctgcacgaggtgaaatgatgaaggtcgttatctacggacgtgataattgctcatactgcaaacgtgcggtcgagctggcgaagcagctgaacggccacggctttggtgattacgaatacatcgatattgtgtctgctgggatcgacaaagagaagttaagcgacctggtgggcaagccggtggaaaccataccgcaggtgttcgtaaatggtgaacctatcggcggctatacagaatttgctgcttttgcgagcgctctgtaatacaatacggctccttttggggccgtttattatttgtcgctttcatcaacacagcgtacacttaggtacgagccatttagctgtaaagaggttttatgcatttagaaaattgcctggaagatatgaatgtcattagcaatgctcttgctaccgtgacttctaacgcttcacgcttttcgaatgcaaatagcactccgaaagcattcccgaagcgtgtacacacaaaatttaagatgcgtccccgtttcggcggcatcacaaggtcgacgaggcccggttttgcagattcccatgagttcagactgccgcaaacggaaggcattccggttgctgagagtgacaccgcagctcaacttgcggatattgaacaaaggctcgcagagctgacggcgaaacacgttaagttgacccatagcatttcaggttacagtgcggaacaaatccgcgaatctttcggtgaaggccgttacgaggacttgaagaacgttgacctgtccatacgtggtttagagggctttgttaacaagttcgtccgtgatgcagaacagccgcatccgtacctgaaacgcttgagtgatgctatcactgagtaccgtctggcagtttctgacctcctgatgattttaaatcagtgctttaacgaggtagaggttatcgaatcgcagacaggcctcattgatgaggacgtcttcgcaaacttctccttacattaaggctgaacgatgaaagtcacatggaacagtgatagttacgcccaatttttggagccggtcttcagagtaatgccagatctgaagacctccttacttgctgactttgtgagttttaagaacggcttttatccggccgtttttggcaaagatggcccctataccgaacctggttctgtagtttcctctcgtgtttaccacgttcatctcttattcaccaagcaagaacgaaatagtcaccgaaacaggttcaactgcacaagcgaccgcgccctcgtttatacccagcacgccaagtttcaggacgtgtatagtctgctggccatcttcccgaaagaggcgcacaaaacagccagtgatccagtcaaaatgagcgacatcgccaaatacgcggcagccttccagaaattaacaaacccgtagttacctgcagctccatgcctttctcattcgtagcgtggttctattgcgataattttcatattttttaggcaattaatctagtctttgcgcgtatgcataaatatacgagaaataacggtacagaaagcggcaggcaaaataaccacaaaataatgaacatgccatacacaccgctattcacgccaatgtgacgatcccaaaagggtttggtcattatcttaagggctagtttctccgaagtataatatgagaatgggtacaggacggcgcttaaaacaagatatgtaaccacaaatggcatataaggaacataggcaggaaaaatgagtccgtcattcatatcgcgcactataaaatagatcagatagccataaccacaccatccccataagcagtgccgtaaataatattttaaggtcatcatctatgattccttcatagctataccattaaagctatcataacatgaattgacgaagtcccccttcgagaccaagcggcatcgagacagccatagacgcaaacatgactaaactggcaccggacaacgatgggacataacgcaaagactagggtgatgtcgcaaacaaacaggcgggaaatggcacggccctgatgactaattttcaaaaaaaggcctttctatgagtccatactttgtaggtatggaatcattagacaaaagagggtattttaggttgatctcaataaaaacaatgcctaatatactgtatataaaaacagtataaaaagcgtcatacagtggccagattatgaaaaacacgtttgacagagcacgcgcagcggaaaacacgtcacaggaagcgatcacctatctggatcgggcaacgcagatggatgccaggtcggtctcgatgcagggtgccgatctgactttcgccgacgcattcatgttattcactcgcttatcattattgataactcgccgccggccagagatagctgtccattgtgttttgatacatgttctcccgcatatcgctcaggaaaaagtaagtaacctgaatagaataatggtgaatcagctggtcaacccgctgatccttgaagggaagatcgtgatgggtcgccgtgttttttccatcatgaagcagttcctgggatggtgtgccttccaggggattatcgaaacatcgcccctgaatgatatgtcactgaacaaagttgccggcggcgcgaagacggccccgcgggaacgatgcctgacggacgcagaggtttgggtattctggaatgtctgggactatttcgacgtatgtccgggcacgaaatgggcggcaaggctttgcctcgtagctgccagacgtccagatgaagtgctgcgggccagagtaagcgagttcgaccttaagctaaatgtatggaatcaaggatctcgcaacaaatcggcccggtcgcacacccttccgatgagctcactgatgcggaagtgcgtagaagaattgattgattatggcgccggcagccagtggctcgtcccgtcgaacaaaaaaaaagctgatacgccaatgtcgaaggtggcaatagcccaagcgttgaggcggattctggagcggccggagctgggggaagtggagtcgtttaccccacgcgatctgcgtagaacggcacgcagctactttcctgcccttaatatttcacaggaagtatcacgtaagatcatgaatcatagtctggaaggtatcgaccgtgtatacgaccgatatgactacatggatcagatgcgagaagcccttgagagcttctcatcgtacatttcgtcgattgttgagcaaccagatttagaagaaattgaccacaaaatgaagggagatcgcctatccaccgagctgatcagagtaaacttctcatagctttttaattgcttcgacaacctgctcaacaccatcagtttgagccggaaagcggttgcggaaagctgcgagaacctcacgttcttccggagtcagcggcgctatgccctggtctcgtaaaaaatctgccagctcaggctgacggtcttcaagaaccatcatcatgagacgtactgggtccgcattcagtgcttctgccagtggtagcactttctctaccggcagcggaattcttcccttttttatcagggacaaaatgttgggattcttgtaaccaatctcacgggagatcgccgactgacttttcggcgaaacagtgattaaagaatcgatgtaggcgacgtaacgagcggtcttctcatcggccattgtcattgtagttactatcctcgcgtgatctttttgtatggtaagtacttaccgatattacagcaacggttattattgtaaagtcttacatccggctatttgtaggcaattatcgcacataaatcacgcgaaataagggataaatcagcaaaatccggtacttctgttgatttttttgattatttttgtttaagaaattacgatacatttttattaacttttatattaataggtagtaccatcacctccaaatgaaacctgttgattaggatgctattaatggaaaaattgtcatctaatttacttgctctgaatgtaggcaatgttttcgtgctgacacacctggaggctgcagaagtactatctgagttaccaaatcaccaggtaaacgttagagcgcgcgacgctactgttttccggttctccctggaaaatggctctttcacgctgatcaatactggcgacctctctttcgcggttcgaatcaactaaaatttataacccgcctataactcattgatcccctgcgcgaattgcttcctcccctgttcgcgcagtgttattttcttatatctgaaaacaatttgtttactcgataaggaaagcacatggcaaccaaacccagcaaaactgtactcaaagaggtacaggacttccgcgattccgtaaaacgcgtcgttggtcttctttcgggcaagaacattcctgtagctgaatgcggagatacagcatacgttcgctacaataaaaagggggagccagtcatggttaacatcccatccataccagatgacgcaagccctgcgcttatgaatgccatacgtggattccttgatcacgaggttggccatctccttttcacagacgaaaaagtcgtcaagaaaatgcgcaacacaaaggcattcggactctggaatgccctggaagacgtctacatcgaacgtcgcatgagtgaagtgttcaccggcagccggcgcaacctattgtccacacgtaacctcatgattgataaatattttaatccccacattaaaaaggcggtagcgatgtgccgcggggatcaacgcgagttgtttctaaagttcttcctctgtccggttctacgggcgtgggatggccaaccaacttttgctgatttcatggaggagcactggcgcctcatcgataaacctattgccgttctgaaagagtttggcgtcgatgaagctgtccgtcgtatggatagcactgaggattgcgtcaaggttgcagcagcaatggctaagatccttcgtgaaatgactgagatgccagaaggcccgttacctgaacgtgaatcctctttaaccaaaaagaccgaaccagaagaagacagttcagatgagccggctgctggagacgatactgaggtttgtgacgaagaggggctcgatagcactcctgatgagtttagctctgacgatgaagatgttgaaaaatcagacaaaacgataagtaagtacatacctagcagggatgaagtgataaatgatacagaaagtaaacctgaagatggcgatttaggccatgaaaatattgacgacttgcctgacagcgaagaaacgacagctgatgatcctgttacatctctgggctcggatgtaggggaagaagtagatgatgaaggagattacagtccctccacggatgatggctcagaggacaggcatggcagctcctctgatgacagtgaagctgtcgaagacggtgaaggtaaggcagataaagacggtggcaaggagaaggatgaaggggatcgggacacctcggatgaaagcgatgccgggtttgccccacacgctgacgatatgtctcttgatgatgctctcaaggcattagaaaacgtcgatgaagagataggttcttccaccgaagatgcgctggcgtcggcgatcaagtcggagctggccagcgcatcattatctgattaccggccatacaatcgctcctacgacttcctcgggccaattgacgaggcagaagagcatattaagcgcgccagaaaagcttttggcgcaatccctatgtattcgcccgtagatcgctaccgcattgttccagagggcagaaaactgtttgagatgaaggtggagagacatctgtcttcctcggtgtcatctaccttggccaaagacctggagcgcgcgatcgccagtcgcaaccgtgttcagttcatccctggccagcgtcgtggacgcgtacatggggcgagtctttaccgactgtcgatgaatgacgatcgggtattccggagaaaagaagaccacaaggccgtgaacgcgtgcgttcaacaggtcatcgatttgtcaggttcaatgggcggccgaaaaatcgagctcgcgctggcatccgcatacacactggctgacgccctagatcgtatccacgttccgaacgtcattaccggcttcactacgtatggcaatccggatgtagcaactatgtcgaaacgtgggtttagccgctttgaagcgcttatgctgccgattattaaaaactggcatgagaaagcgaactccccagagatacgtgctcgtatgggctgtgtggcggagactttccccctgctaaacaacgtggatggcgagagcatcgcacagctggcttctctgtttgcagggcgtatggaagacaagaagatcatgattgtgcagagcgacggcgccccatgcgctgcgggggatggctttagtaaccatctgcgctctgtaacgaatgacatcgaaaacacaagtgacatcaacctgttggccattggcattcttacggacgcgccgcgccggtattacaaaaactatgcgctagtgaataaggtcgaagagttgggtacgtcagttgtcagcgagttatctcgtatcattttagggtaaatcttgcgccctataaaataagtaactagttactataaagcctgatacattcgtatagaatagagcccagaaacgacaacaagtaaggaaaaacacatgaccgcgactgcgctaccacaagacgcccactctgatgccgtcacctgcaaatggtgcggaaaatccttccatcacctcaaatcccacatttcgatgggacgttgtgaaggcattccggaagaagccaaagggcttggtgtggatgacgtagtgaaaatgtacaccacagcattccctggggaaccaacgctgtctccaaaggccattgaagcgttaaagacgaaacgctctgagaaggctggcgcagacggcaaaatcgcggatatcagttcccaccctggctatgcagggacagtcgaatacaaaacagagcttgtcgccgcgcacgagctgcttggcctgactatcaaggaacttggcacgccccgaggcaaaccccttcaggtaacggtcaacatcaacacgccatatccggagttcgtgccagaagtgaaagccggctatatatacggcgacttcgatctgattaaagacatcttcatgatgctggagatcggcattcctggttatctgtggggtcatgctggtacggggaaaacctccctgccaacccagctttgcgcgctcctgaatcgcccggtgatccgctcacagcatacggcatcaactgaggaagcccatattacgggccagattctggcacgagaaggcacaacctactttgaaccagggcttctgtcgctggcgatgaagaacggttgggtctatctggcagacgaatacgattttgcattcccgcagattctggggatctaccagccagttctggaaggcgaaccactcgtaatcaaagaagcgacaccagactggcgtcgcgtggctccgcataagcgcttcgccttcatcggtacaggcaacactaatggttcaggggatgaaacggggctttatcaaggaacgaacatccagaacgcggctaacttctctcgctttggcatcgtatctcacgtcaagtacatgaagcctggtgctgaggtaaacatgctggtcgaagcgggaatcatccgtgaatacgccgaaaaaatggttaagttcgccaatctggtacgagacgggtatgagcaacacctgatcagccaaccaatcggcccgcgtgagctgcttctgtccgcaaaaatcggaatgatgcgaggtgatttcgcagccggcatcgagaagtcattcatcaataaactcccctccacctctgcgcaagcggcgcgtgaagtggttcagaaaatcttcggttaatcgtgcgtaaaggttgttttggatctcttatcgcagcttctgaaactggcgcggcctgtttgtcatgtgctcacaggccagactgccaccaggcagccaaaggagttgcgatttcgatatacgggaagttcgtcggcttccccaacgacaaaattaagaaaaaacagaaggtaaaaacacatgaaagcactgatggtcaggactgatttttccctgggagaatcagcactgaaagcagagcacgcagtaaaggtagcaaaggaggctggctataccgcggttatctctgctgacacgatgaatatcgccagcgttatccccctgcaacgagcagctggcgatgagatggcggtgatctgtggtgttaagctgaatgttgtcgacgatccaacatacgagtaccgggctaaactggccaaagagtctaatggatgtatggaatcattggagcgtggacgtaactactgcttcaccgcactgattaaaaacgagcaaggttatcgcgacatttgcgaactaatgactttagccaatacccgcgagcagttttacttcgtaccacgtctggcgctcgaacagctggcggctacttacgctaaaggcaatatactgttgctgacttcggatatcggcagcgtattccagcgcccggacttcgctaaaattattagcgcgctgattgctgccggcggacgcgagaatttctacagcgtagtttatccgcaccctacgccattctatgaccagatcaacgtgcgagccatgaaagtggcaagcgcactgaaaatcgagcccgttgcgttttacccagcttattacgaaggggttgatgacgctgacatcaaagacatcgcccacatggtgatgaacaatatcaaagtcgatcagccacaccggctgcgtatcccccaccagcgcgacaatgcaataaatggtcgccgtcatctgctgcaggctctgaaagagttttctgtccggatgggcgtatctgtatctgccgccatggcttctacaacgcaggacgccatcgttaaggcgtgcgaatggcgctggcacgagatggcgccgacactgccaaaaatggcagacgatgagcctgcaacgttgatgaagctggctgtcgcagggcttcgaaaacgtctcagcaacaaagaatttggctacacgccaccagcttccgagcaccgcgtttacgtcgatcgcctcaagtatgaaattgagacgctcactcgcctgggattctgcggttatttcctgatggttcgcgatctgatgaatcatagtcgcgagactggtattcctgtcgggccaggtcgtggttcatccgccggctctctggtggcatggtgcatcggcattactaacgttgacccaatccgtcatggtcttctgttcgaacgtttcattaaccctgaacgtctcgacttgccggatgctgatctggactttagccaggcgcggcgccatgaggtgatcgagtatctgaatgcccgatatggcgaagagtatgttgcaggcattccgaacttcacttatctgggcgccgcttccgcactgcgcgacacagcgcgtatttatggagttgatgcggcggatatggctgtttccaaggagctaaagaccctggaggatgacagtttatctctgtcggagctgcgcgagcagctggccagcctggacaagtacgccaccaaacatccggacgcatttaaggcggcgagcaagttgcaaaacctgatgcgtggcttcggccggcatgctgcagggatgattgtcgctggcgtacctctgacggaacgtacccctgtagagcgacgtggagacgcgcgttgcatcgcattcgataaacgatactgcgaggccatggggctgatcaaactggacgttctgggcctggccactctcgatctgctggatagcgcaaaacgttacatcaaagagagcaccggcaaggacatcaacctcgatgccatcccactggatgatcgcaaagtacttgatggattcgccgcggggtatacgcaaggtgtgttccagcttgagtccggccccatgaggaagctactcaaagatctgggtggtggtatcgagccaatgagcttcaaaaccattgtggccacaactgcgcttttcagaccaggtccaattcagtcaggcatgttggacgactatgtctccgtggcaaaaggttttatggctccacattcaattcatccgcgtcttgaggaagctactaaagaaaccaacggcgttttactctatcaagagcagatcatgaaaagctctcgcgtactcgctggattctctatggctgaggctgacgctctgcgttccgctatcggtaaaaagaacatggataagatgaaagcgatcggcagcgattttgtagaacgagcgcaagcaggttgggtgacactgtcacttgaaaacggaagcacagtagaagtccacaaaaaggccaagctgatgtgctctgacggcaaacgcagaacctatgacgaagcgattggtgataacgctgatattgttgattttggagtttgacggtggaagaaatttggaaatccattcctgagtttgaaggttattacgaagcatccagtttaggtcgcattcgctctttagatgttatacgaacagcccccaatgggggcgaatgggtgaagaaggggcaaatcctcaaacctcgcgtaatcaatgattttggacatctgggcgtgaaactaagcgtcaacggcgtcaaatgcgaccgcacagttcattatctggtagcaactgcattccacggagaacgaccagaaggcttacttattcgtcatcttgacggaagaccatcaaacaatgcgccctccaatctcgcgtatggcactcaagtcgacaacatggctgacgccattgcacacgataccgttgagtttggtgagaggcgctacaacgccaagctaaccaacgaagtcgtcattgctattcgcattaaaaagtcagaaggcgctctgaacaaagacctcgcggccgaatatggtttaactgagctttacattcaccatatcgtcaccgggaagaaatgggcacgagctggtgggccgatcgttgtctcaagagcatccaaaaaactggatgctgaagcaagagctgaggtggtcgccttgcgcaaggctggcgcaacctatgaaaagttgcgagaaaaattcggcatctctaacactcaaatcgcaaatatctttaaaaaagctagcgtttgaagctaatgacgggaaaaacacatgaaaattgccaaagttatttccgagcaggaaggtcttagccctgagaaagcccaagaagtatgggacgcctttgagaagttcggtggatatgccttcaacaaatcacactccgttgcctactcgctgatcagctatcagtctatgtggttaaagacacattaccctgctgagttcttcgctgctgctctcaccattctgggcgaggataagcaccaggggctggttaaggatgcgctgacctatggcattcgcgtattgccaccagacgttaacgtgtcatctaaccgaattgagatccgcacgctggaagacggcagccaggttctgtatgcgccattctctgctgtgaaaggctgctctgagaatggttgccaggccatcatgagagcgcgtgagaaagttggcggcaaattcgagtcacttgagcaatttgaggaagcggtcgagaagcgagcctgtaacagccgagtacgtgagtctctacaaaaggttggtgcattcgcctctattgaacctggcagtatgccggcgaccgatccggaacgtctgcgcgatcaggcagagctgatgggcaatctggtgatcgatgcggtgaaagcttcacgcccatttgaaatgaacccaaaacgctctgcagaggtcaatgtgctgatgactcgcatggccgcagaaatgggtctgggcgatgagttgatacgaccaagcatcggcattaagccaaaaattatggtcatactcgacaacgccaatggcaatgatgcacgtaccggctacttcatggagaacggctacgatgacttcaaagccaagttgctggtttctggtgacctgcgtatgggtgatttgtatgtcacaggcgtgtgtaaaaaggtaaaggataaggaaaaagactacaccaaagatgagatcggccagtttatcgactttatgcgggaagagataaatctggttcgtccaacttacgtgctgacgtgcggcagccgggcgacatcgctgtttaataacaagagcaagccatccgatcttgttgggcgcaaagaatatctgccagacctggacgtgaccgtgttctatggatttaacccgaatattttgtacttccgtccagaggaaggagaaaagctggaagccattctggcagaggttgcggagactattaacaaatgagtaaaggaaaacacatgagcgcagcggataaaattgcacaagagctcacagcaataccacaggagtttcaggataaggcgattgaagccactctgcgatcccagttctgggaaattattgactgccctgtcacgctcgatctggcattggcgtttgcaaagcaggatggcgccgaccctatttgtcgattacggaaatgcgcgcgtgcgctggcattaaaaacgcaagatccaaaggcgtgccaatatctgctggagatttatgaatctgacaaaccagaagaagagctggcttcatttaaagcgttccgtgcccgtcttgtcctgaaggtggccaaggagttcatggaggtgagtaagataggcgacgtcagaagataccggcttaagaggcagaccagagtcactctatcaaacattttcggtagaaaagtagcataaagaaacccgccatatggcgggttttctcatggagttagtagagaagccgtccagatctaacgacctttaactccttccaataatccttccaaactgactactcaggctcaggccgtcatcgttatcgcagcggatagattaccgaaatgaaattagctcaacgtaactacgtttgaagcagcagggcctttagcaccgttctcaatagagaactcaactttttggccttcttccagggtacggaagttgttgctctggatggcagagaaatgtacgaacacgtctttgctgccgtctgctggggtaataaaaccgaagcctttatcagcgttaaaccattttactaaaccagtcattttgttagacatagagattaccttcattatttgagagccacacaacgcggcgaaattggtctgagagattggtacttacttgggcacttaggaggagactcacggagaagggtaatctttggataacacctgaacttcggactgctttactaaaactgctttcataaggtctgtcttgcaaaccgacgcaatcattaacgcatggcctttctgtttgtgcaacatttattttccttttcacagcgtcgccacataaacgtctctacccaacctaccccctctcatcttcacgacacatgctccatcagctgatttcttcatggtactattgatataaattagtaagtggatacataacaaaatgagcaccgaaatttacgaaaaaatcatgaccgatctggagttcgatcgcgacaatcttgaagaggtctggcggcagcaaccgaggctgttgatggagtacggcgcaaaactagcgcgcgcagaacgagaggttgcagatgctaaactatccctcgatgccatagaggcaaaaatttacgacattgaacgtaagaatctgagtatgaacggaataaagttcaatgaatcggtactggaagctaaggttcgcacaagcccacaataccttgcgaagcgccaaaaactggatgacgcacgtctgatcgctgacatctataagcacgctgtcaccgccttctctcaccgtagagacatgatcgtgcaggcctcgaaaatggctatcgtagagattgaacgactgggcgccgaacgcttcaccgccacccgataatttttgatagatagtaagtaagtagtgatctattattatgtacgattttaagagccacgaacaagcgaatgccccaagcgcaaagcgcccatggccataatcacaacaaggagaaatacatgtctaagtcattacttgatctgcttaacaagacccgcggcgatattgcttccaaacgaggcaacaacgtcgacctaacccgcctgaaagacggtaataactatctgcgcatcttccccaacaaggacgatcagaacggtgtgttcttccagactttcggtatgcactacgttaagcatcagaatgaggagggcaaagaagttaccactgcctatatctgcgaacagcacacccacaatcgtgcgtgccagctgtgtgagatggtgatggaaggtcgcgctcgctacaaaggcaacaaggcaatggaagagcgtatcggtcaaatgcgcgctactccacgctacctggtcaatggcgtactttcagctcgtgaagactttggcgacgcagaaaaatgtcagctgattgagctcccgtccactgtgttcgacgatatctgcaaagtgatgtctgaggatatcgcagatgatatcggcaacccgttaagcaaagaagaaggctatgcgttcctgatcaaacgcaccggctccggtcgcgataccaagtacgacgtatccccaaaacgtaaagtctacaagggcgatatccctgaaaaactgtggtcgacccagcatgacctgatcgcttacgccaatcaggctgatgaaactcgtctgctgtctaccgttcgcaccatggggcgtctcattggtattgcagcacctgccgccgccaccgctgctatttccgcaccagctgctgcaagcgcagcaacgctgcctggttttggcaccatcactggccatacggaaggtgcagctgctgttgccacgacctctaccccggaaccagcaaaaacatctctggtagacgaagagatcttacgtgccgcagaagctgagttcgtaccagagccggaagaagttaaagcatcagctgctgccgccactaccactgcagccgcgaccagcacttctaatgacgatgagggtcttgacgatctgctggcggaattagaatcgctttaatcacaggccatgactgttaaggcgtctacggacgccttactttttggaaggagttttccggtgaattatctctttgtggacggtaacagcctgggctattaccaccagcaatctgacaaattacataacggcgaaatggaagttcaggcggtgtttggcttcgtcaaaaacgttcgtcgctatgcgtccattcttcacgcacgccccatgatcctgtgggacggctttagcgacaagcgtcgcgactattacccggattacaaagcaaatcgcgatgaagatccggaaatgaagaagatgaaagaaggctttgcagtccagaagccttacatcctgaaaatgatggcagcccttggcatcaaccagctgatcgccaaagacgccgaggccgatgacctggcggggatgctggttggtcgtcttgcgccacaaccaacggtcgatcatatctacctgctcaccggcgacggcgactggctgcagctggttcgagaaaaagtcagctgggtgagccttcgtgaagacgccaaacacaagcaggtgaactttgagcagttcccaaagctgatcggcctgcctactcctcgtgctttcctcgaagccaaagctctgcagggggatacctccgacaacatcaaaggtgtaggcggaattggtgacggtggcgccaaggagctgctgcacgaatggggaagcgtcgccgctatggtgcgcggcattaacgacggctcgatcgtcatcaataaaggccgatacaaaacggcattcaacaaactggccaaaaatgccttcaacgagaagaccggctgccggatgctggaagccttcaaacgcaacatgacgctgatgaacctcatcgataccaagttcccacccagcgaaatcgaaaagataaaaggcgcacgtgatttgaaagccttcgaactgctctgccatgagctgaacttccggtcattcctggaagatctggacgtgttcgttttgccttttgagaggtactgctgatgttgaaatcactcatcaacggcaatacgaccacgcctacgatgctggctaaggagattgtcttcttccatggagaacatgccgttgttgcgctaccgcgcattctaggcgcggccggcatgagcgtgacagagcgagagtacgggctgattagcgaacaggtcgtcaagatcctctcccgcatggccaaacacctcaaccacggcgcaataaagtttgatgaagccgccgcttccaaacgcatcaacgagacaaaaggagcctaagaatggcaaaaggaaaatcagcactggcaatggcgttaaaaaagaaaatcggcagcaatgatgagatccaaaaggtttcacactggtttgattccggcttccctccgctgaataaagccatctccgggcgctatgacggcggtttcccaagcggacgtatcgttgagagctttgggccgccaagtgctggtaaaaccttcctggcgacggccgccatggtctccgctcagaaacaggagggtctggctgtattcctcgaccacgaaaacagctttgatgttggtctggcggtggcaaacggcctgaatgcggatgaggatgacggccagtgggtctataagcagccggacacgttcgaagaatcggttgagctgatcggcaccatcctgaaactggtgcgagacgaagagctgatccccgcagacgcccctatttgcatcgtagccgactctcttgcgtcaatggtgccaaactccaaagccgagaagttcgacaaaatggcggaaggtacagcgaaggataaagatcagctaaacatgaacgacaatacggccctggctcgtgctacgagcgccaactttccgacgctggcgctctgggcgcgcaagtacaatgcctgcattattttccttaaccaggttcgtacaaaaatcggcgtgatgtttggcgatccaaccacctcccctggtggtgattctccgaagttctacgcctcagtacgtattcgtcttggcgcttctgttatgaaggatggcaaagataagatcggtcaggacgttggcgccgagtgcatcaaaaacaaagtggcaccgccattcggcaaatgctcatggaaattctacttcgacccgacccgcggtctggacgttatcgagtcactggttgagcacatgctcgaagaaggatacctgccaaagaatgccagcggccgcgtagagattggcgacaagaagtacaccaaatcgcagatcgtcgatatgtatcgtgataagccccttccggagatcattgcggcgctacagaccatcgacgaacgtcgagctaaagagtctgcttcagccgaaacagaagaagcgtaatcacagggcgtccattggacgcctttatattttgtttattatcaccaataagaaaacaacttggttactaatatgaaattaatcccaattccaacgtcaaatgtgacagtgccacgcagttaccgggtagccatcctagacgcctggtggttggtgaaggaagaatcaaagtgaagagactctgggatgcggccaatgccgcgctcgatgttatcgacgcagaaatcgcacaaggcttacctgagcctgaatgggctgctcagctgcgcgaggtcattggtctaatagatgagccatcacctgaacaggacgattgctccccttctctcgaacagaataataagtaagtacatacaccacaaaggagaaacacatgagaatattagtttggatatcagccagtactgacagtgatgtttagccactgcttataatgtatggctctggactctccatccttagggatctctaggccttagcgctcttccgtagccatttacacctcaaaatatataagttagtatttacctattatgaagatatacatagatatcttgttactcatcttttcaatactgtttatgttggactgcctgatgatcgggacactcaagaaagctctgtctcctgtcaacggaaccactgtgaacatgctcgcactggtgctggtcatcacctctacagcacaggtctacacagggatagtggtatgagaaaaataacgctactgctggccgccctctccttctctctgctggcggataccagaatttaccaatgcgatatgaccgtatcgcaggtgaaaaatgatcaaatcagcagacctactaaagctgacttcggcgcgctagtcgttgatagcggagagcagttctatgtcgtccgcggcgatgaggttctctcatctccatatctggctaaacgcaacggtaaactggttggcgttggcgaggacaagcttatctacaacaaatcccacgacgtctacggcgttcatagcaaagaccaaagtttctttttcgacggatgtaaggaggttggttaatggctctcacaatgactggtctggagattgagaaaacaagcggctactggagagcgaaaggcttccgaaaaccggacatgttggagcgtctggaacgcgaagacggttacatcatccaccagcgtcgggaatggcgcatgtttgatcctgaaaccgggaaactcacatcgaaagcacaaacgctttggggtctgctcaagcagatccactaaccgaagtttctacagagcgttttaagtgtggtggaataacaattgttagtaaccaccaacctagcattcatgcgggttaacaggttagtgaccactggggaagccatattgttatctacacgggcctggcgcaaatcaacgactgcgtcgcccgttttcaggatatctaattcagtgctgtattaccgctcacggcatacgttgccagtgaattaccgctggcagcataccttgtaccgctcacagcatacgttttaccgctgacagcatacattcatagggcagcagttgctcttagacgttagccatgtcgatttataaagaccgcagatagtggaaatgtaccgctgacagcatacgttttaccgctgacagcatacattgagacaaaagaaccgctgacagcatatgttgaaccgctgacagcgtatcaaagcaacttgaggctattggtgagtatctcgatcagcttgatattctctggcgtcaggttctgcgacagctcagaaattttgtttttgaggttctgtttcgcatcaatttcacccttcgcttcttctgcctgcttaggcgcctctggcttctcgggtttgctcgatgtgactttcagttttgggttacgactgtggatctggatgtagacagaacggccacgcttaacctcgctatattcgagatagcccagctcttgcagtgacttcaatccgttcctgatagtctggttttgcgagctgacgttgcgcgtgctcagattgagcctggcgcgcagtcgggcaagagataccggtgccggcttaggaggaagactttcgatgaaagtatacagcgcctgggccgtctctttgcgcgggagcttgttgatgaccttcaactgcagcagaactttatggtcaaagcgatagagctcagacagcttaggttcagcataaaagacaatggagtctttcttctcgttgtaatcaacgctgtttatgaggtgaaccatcaacagggatatcttgttggtgtcgtcgacgttcttctcttcatgagtgcgctggaacgacaacgtcgtgcgcatgatcttgagcaggctgtttgtcaggcggtctcgcagggtcttgcggatctgcgaggacgggtagccgcagaacttggcgaacttcgtgatgctcagctctacgcgccctgttggctcgccgtattcagccagagagcgaacaacaccaacccaggttttgaagtcatgatccatatccagccgcggaccggtgattttaatgtttgaataaccctctgaccgcgcgacttcaagctggacaagctccctggatgcgtcgatcatgttggacttgttgcgagagctattcttcgttcccttgagcgttggaacaaagaggccaaggcgcattaaagcgattggctgcaccgtattgttgctgttaggaactaagtcacctgtgtacaaattgagagcatcttcctcaagaatttcgttatcttcaggtatttttttgatttcactatcttttttcttttttgtggacatgtggataccttttggttctaaccgctgacagcatacgtcaattaccgctgatagcatacacaaaaccgttggcagcatataccgtaccgctgacagcatatcgtttaccgctgacagcatacacggatcagtccttagcccaggcgtggcgcggcctgcggcgatcggggatctctttggatctatatggggatctgtatagggatcttattattgggatctaaccagtggataagtggataagtaaaacaggcttttgcgattacaggtgtgcctagtaagctatcgtggttccggtcaacaatcactaaaacgagaacatggacttaaaacgcacacgttgggtacgccgtctggaagacggaacctacaccatagaatcaaactccacactgagcaacgagaaggttctctgcagcctgtgtggcatagcctcgaagtgcaacatcaacgagacccgactcaagttgcgtgacgcaggcgttaacttccacctgaacagctgtgccagatacgtaccgctgctggcatttcgaaaaccgatcatcggtctggataccccctacttcaacactatgcgttcaggcgttacctggcgtgacagattgaccgaggggaagattatctgcctggttgaagctgatactgcaaagatccttcgattcggtgtcgtggataaggtttactctgggccagttgatgagatgctgagaaagcacagtcgattcaatcacctctgtatgggcggagagaagatcgaaaaagtgggtgaagtgatccgccgatcctatggccacttcctgaaagaagacagcctgctcacagcgatttacataagacacatcaaacgggactttgatatcgagtatcacagcgaagaagaactcgatttagtcgaccctcggccaaaagcagaagtgtttagcatcgcaaatgcgcgtcagaagctctctgacgaaccctaaacgaacaaaggggtctttacgcgaatacaaaattgcgtagcttagaatgcatctgagaagccaagggggtgatatatggacgatttttactcaagagagattactctggctgatatgccctttctgatgcatgaattcgaggaaggcgttcttcttgctcactttgcagtatgctccatgcaataagccagctaatgcattgaaaataaaatatagctctcattatgaagatttaaatccattactctgtacgttattttgaacgcaagttgtatactacttattgggttttgatgaagaccttgactaagttctcctttctctcaaaagaggacattccaagcatacagctcaatgtatttctacgaaaccttaattataagagccctgatttaagggctcttaatagtaattagtcaattatatgagctaaagctgctaaaatatttgtgattaagtttctagggaggttaggttttttgaaaaattcactgatgtaactctaaatacactttcttcaaattttacattcagaactgtaaaatttccaacccttagtctttttttatcttctccaaaatcatatctttgatggaaacattattatcctttgcaagatgatataatatataaaaggttttctcatcgatccttaatacgaaagtgagcttgatgatattttcataaatatatgcagaagatacaataacaaagaaagtaattaaagatattaataatgcctctaatcctttatctaaatatgtaaaaaagagaatgccaattggagcaattaaaaatataatattaaagattagaaataaaaaagcagaaccaagaccaaaattcttatactcgtttgtggtttttttcaatatgactatagatacaaagacaaaggggattaggataattccgacccccatacatttcaaatattccaatgtggttaggttaaacattagctgttcctagcaaaagctaaaagtattgaaaggtactataatgggaacataaaaatatgtccataggtgttgaataaacgactttaaattacgttttatccttacaagcggataagaggtctcaacgtttatgtgtgtagactttagtttggtgcagttttataacttaaatgaaaattagactcactttcattaatcattgagtattaagctcactgcaatcataccttccctatcaatactgctcaactgtcagtcataaatataaggcgctaaatgtctgttacgtgtagtgtttagaataatgttcctaactacttttccgttatccacgctgagaccacacctagatcctagatcatacataagtgtctagctctatcttataaaaataggtatgtacttacttattttttttgcaataatatcccgcctgtattttttataatgtgccgtgcttagttggttgttggcctgttttacatgcttaaaatttatatcaaaataaccacaaaggaaaattcacatgacgttgccatatggggtgatctccgatccccattaccacaaatgggattcattctcgacgaccgatgcagatggtctcaattctcggctagccattcagctggaggccacaaaagaagcggccatcgctatgaaaaaagcgggctgcagccacatgctggtggccggcgacacattccacgtccgcggaaccgtatcccctaccgtactcaactacgtctccgatgcgtatgagtggatcgtcaaagatctggggctcagcgttgcgatgctggctggcaaccatgacctcgaaacaaacgactctgtctacagcgctaacgccgctgcggcgctgaagtcgattggtgtacagatcgtctgcggccgtaagccacacagcatcaaattgggtgacgtcacagtccatatggtgagctggcgaaataaccacgccgagttaattagcgacctgaaagcacttcgtgcgcggcttgacggggatctgcacgacgtcgtgattcataccgccatcaacaaagctatcccaacaatgcctgatgttggcatcgatgcgcaggagctgaaagacataggctttcgcctggtactgtccggccattaccacaaccacaaggaggtgatccccggagttatcagtgtcggcgcgctgacgcaccaaaactggggggacgtaggttcgctggcgggctacatgattgtgaaccctgacggctcgttcagtcatttcgaaacctcggcgccgaaattcgtaaacctggaagacgatgtggatgacaagcagatacgcggcaattacgtgcgcttccgggccgtcgtcgaaaacgatgaggaaggcatcaagctgcagaacgtcctgaagtccatgggagcgaaaggtgttgtatgcaacttcatccgcaagggctcaatgatggagggtactgccagtacctcagagaccagcaaaatcgacagccttggcgagtctgtttctgcttactgcaaaatcgttcatgacacagacggtggatttgacctgaccaaactgaatgccttgtgtcaggagatcctcaccgaagcggaaagtgcggaggcggtgtagtgacttcctcccacaataatttctgggatttcatccagatgattaaacggcttgaaagcgggaagcccgttttattccagaagccctatccgccagaaggaaacccacaggcgttttaccttggtcaactaacgaaacgtggcctcctgtcacgcaactccttcccggcacatacggaataccgccttcgcaaagggcagaaattgactaaagcaattcgaggcaaagcatgaaatttttaacgctcgaagtggaaaacttcatggcgctggcaaacgccaaggtcgagcttgatcagcgtgggctggtgctcatccagggtgttaatgccggggactcatcggccgccagcaatggcgctggcaaatcaaccctcatgaatagtttgatgtggtgtatttatggcgagacatcccatggcgttaaaggtgacgacgttctctctacgggccatgagaagaactgtcgagtaaaagtcaccattgaagacgaaggtaaacgctacgccattatccgtcaccgcaagcataaggaatttaaaaaccggcttattgtccgtggcgaagacggcgacatgacaaagggtaaagattcgctcacccaggagtttgtagagcgactgatcggtgcgtcaaaagaagtatttatggcatcgatctatgccagtcaggaggcgatgcctgatttgcctggcatgtcggataaaaacctcaaaaccatcgtagaagaggctgccggcgtcgatcgtctcaccaaagcctacgctattgctcgcgaacgagccaacgcagctgccgcacgcatggagaccactaaaaccaagatggacgcctgcttgtctctggtcgaatcggcccagaatgagctggagtctgccaaaacctcttctgaagcctgggagcgagaccgcagcgaacggcttgatgtcgcccgtgccgatctggttggggcggaagtcacgctcactgaggtcgaaatggagttgcgcagtctgccagagcagatccgcgatactgaaaatgccatcggtaaagagcgggaaaaacttgcgtccaaagaagaacatgacgccaagctggttaaggttcgtggagcgatcactgatatacgtgccagcatccgcattaccgaaaacatccagaaggaagcgatgcaacgtgctcgcgcactcaaggtgaaagcggaagaagtaaataccaaagtcggagagccgtgccctacctgtggcaaggcttattgcgttgaagatctgtctaccgtgaaggagagttttgttgaacaggcgcgcagtgagatcagccaagcgcaggcatctgcaacgtcagtggctaaataccaagagcatcttgagaaggcgctcaaaattgaatcatcacttgtcgccagtacaccagatgtgtctgccattatttcccgaatcgaacaactgactaaagagctgggaacgcttcgtcatcgggaaaaagaagtcgtggctgtagaagctttggttgcccgggcgcggagcgaagtagatcgcattaccaaagaaactaacccatttctggctgtcatcaaacgccatgaagaaagcctggctgccaataaatctaactatggtgtacttaaaactgagttaaagaatatacaggagcaggctctgctgcttgataaagcgcgccaggtctactctcctgccggagttcgctcgcatatcctgacctccgtgacgcctttcctgaatgcccagacagcggaatatctcaatacactgtcagacggaaacattgttgcggaatggtcaacgatggaatcaaccaagaagggcgagtggcgcgataagttcaatatcagcgtgcgcaagatcggcgccagcaaaaccttccagacattgtcaggtggcgaaaaacgcaaagtgcgcattgcgtgctccctggctctgcaggatctggtggccagccgcgcgagcaagaacatcgagctgtttatcggtgatgaaattgacgatgcgctggatactgccgggctggagcgtctgatggggattctggaagcaaaagcgcgcgagcgcggcacggtgatgatcatttctcacaaagaaatgaagtcatggttccgggaaaccatcacagtggaagtgaaagagggtcgcagctatgtcgtttaatcttagccgcccgcagtttttgcaaatgtttgctgtgatgcagtcattcaggctgattaacagctataccgctgctggggcggctcctggtgtcggttggcaaaatctcaatattgagacggagcagtttacggctctgaaagatctacttttcaagaccccgttaatgccaagtctgaaatcgatgccgtcaggaagtacagcgcccattctgatcaacccattttcggaaggtggctatcttccacacactgggcctgggttcgtggtgatcccggaatcacctgagatggttatcaaagatgatgcgcagtacggggctatagaggcgcataccagcagcgcgtttactaacctgactcgactggcaaatgcacgtgctgggcaggttgcaatgccaggcaaggcatttgctggcatcgatttcaattacgatacacttgagacatttccaggaagaggcaaattaagctttgagactgaagatggcgataaggcaatggttgagctctctgtcccctatgtacttcgttttaacgggatggttgcgcgtaagctgatagatatcatgtcctacttcatcgggcagagcatgatcgacgcagacatagaaaatggtgtgctgaccagtgacaacatacatgtggtgagccgcattccagagcccgttcgcaagtctccagttaaaaccctggaagagaaattaatggaatgcccggtatgggcaacatggtaaggaaactctatgagtaaagtgatcaaagtagttggcgtcgacccttcaatgagcaacttcgggctggccattggtacgctggatctggatacagacaaacttgaaatccacggtcttgaactggttgaaaccaaagccggcggaacgaagaaaaccgtcagagtaaacagcgatgatctgcgccgggccaaagagatctggcgcaccgccaggcccatcattgaacaggcccacatagtgttttgtgaactgccggtaggtagtcaaagctctcgcgcgcagacttcttacggtgtgtgtatcggcgttcttgcttgcgttgataagccacttatccaggttacgccaaatgaaattaagcactacgtcgggaataaactgaccacatctaaagaagagatcatccagtgggcgattgcaaaacagcctgatgccccttggttgcgtcggaaacaagcgggaaaagacgtactcgttgccaagaatgagcacctggctgatgccatagcttcgatatattctggaatgcagacagaccagttccgacaagtgcgcgacgttcttaaagggattttataatcctcaattgataggtaagtacttatttaatactataggccactacatttagtggccttttttgatgggtgatacatgataaggattgtcaaacgtaatggctccacagagccgctatccgaagagaagtacaaccgcgtcgtgatgtggggggtagaaggtatacgtaacgtaagcgcctctgccgtagccatgggcgccgccgcgagcatctttgacggcatgacaacttcgcagcttcatgaggcattggttaagtcggctgcagatcttatttcgcctgaaactccgaactactcccaggtcgcagcacgcctgaacatgttcaaaattcgcaaagatgccttcggcgaatacgcttacccaagtttctatcatcatatcgtcagcaacgtcagccgcggcgtttacgatgaggatttgcttaagttttactcccgcgaagagatcgctgaacttggcgtgtatatcaaacccatgcgtgacgaactctttggctatgccgcgactgttcagctggcgagtaagtacctcgtccagaaccgagtcaccggcgaaatctacgaagccccgcagcagctgtatatgctggtgggtatgtgtcttttccagaattgggaagatggttgtgccggcaaaacacgtctggaaatggtgaaggggttctatgatgtcaccagtacattcaaattgtctctgcccaccccaatcatggccggcgtccgtaccccgacgcgccagttctccagctgcgttctgattgagtccgaagacagtttgaaagggatcagcgctgcgtcatctgccattatcgattacgtgtcgcgtcgtgctggcattgggattggttttggccgactgcgtgcattggggagtgagatccgcaatggagaagccacccacactggcgtaatcccctttctgaaacacttccagaccgctgtgaaatcatgctcgcagggtggcgttcgagggggcgcagcgacggctttctaccctatttggcatctggaagttgaaagtctgctggtattgaagaataaccgcggcatcgaggagaaccgtgttcgtcatctggactatggcgtaatgatcaaccgcctgatgtatcgccgcctggtacgcaacgagaatattacgctgttcagcccgcatgatgtaccggggctctatgatgctttctttgttgatcaggacaaattcgaagcgctgtacctgcaatatgaagctgatgagagcatccgcaagaaatccgttcccgctgttgatctgttctcaaccctgatgcaggaacgagcctctaccggccgcgtgtatattgcgaacgttgaccacatgaacgaacacggcgccttcgatccgaaagtcgctccagttcaccagtcaaacttatgcatggagattacgctgccaactaaaccgctggcgtttaccgatgaccccgatggtgagatcgccctttgcacactgtctgcgtttaatctgggggcattacgctcactggacacgctgaaagaggttgcattctatgcggtggctgcgctcgattccctactcgactatcaggattacccgatggccgcagcggaaattccggcaaaagcacgtcgtagtttgggcgtcggcgttaccaatcttgcgtactatctggcgaagaacggatttaactactctgatccggccggcaaccagctggtgcatgaaacgtttgaagcgatccagtattacctgcttgatgcaagttgccggctggcggaagccaaaggtgcctgtgattggttttcccaaactaaatatgcccagggacagctgccgattgaccattaccgcaagtcgcttgacgctaaccctgatacgtcctttgagctgaaaatgccttgggaagagctgcgcgaccgcatacgcgaatatggtctgcgtaactctaccctgacagctcagatgccgtgcgaaacgtccagccaaatcaccaactccacaaatggtatcgaaccgccgcgtggccctgtttccgtgaaatcatccaaagacggcattgtgaaaatggtggttccggactttgctgagctgaaagatcagtacgagtacctttgggatatgccggataaccgcggctatctgaccaaagttgcgatcattcagaagttctttgaccaggctatttcagccaacaccaactatgaccctactcgcttcccgggcgacaaggttccaatgatgaagttgcttgaagatctgctcttcgcttatcagcaaggcgtgaagacgctttattaccacaacacacgagatggtgccggtaagcgtgaagacgatgatctggcctctgttgcgttggttgagccagaagatgagtgcgatggtgcatgcaaaatctaataagcgtggggagatatccccacctttcacttcattgaatgcctcattttaaccaataagataataatttgtttagaagtgcatctaatcaaattgtttaataataccgataacattcaaagggaaacacatgagttactccactttccgtttgggcgctaacgacgcaaccaaagagcctatgttcctcgggcagtctgtcaacgttgcgcgctacgatcagcagaagtaccgcgatttcgaaaagctgatcgaaaaacagctctccttcttctggcgcccggaagaagtcgacataaccaccgatcgcatcgatttcaatactaagctgcaagagcatgagcggcacattttcctgagcaacctccgttaccagactctgctggattccgttcagggacgcagcccaaacgcaacgctgctgccgcttatttcaattccagagctcgaaacgtgggtggaaacatggtcgttctctgaaaccattcacagccgcagctacacccacattattcgcggtatggtggatgatccgagcattgtcttcgatggcattgtgaccgacgaggaaattatcagccgggctatcagtatctctacagagtacgacaagctctatgagatgacctgcgcgcgccagcacctgggagaagatgaattcgaacggctctacgtctccgaatttgacggaaagccctaccctctccagcgccagctgttccgtactttggtatccatcaacgcgctggaggccattcgtttttacgttagcttcgcctgtacgtttgcttttggagaaaggaaattacttgagggcaacaccaaaatcatgcgtttcattgcgcgcgatgaggcgcttcattgcgaaggcacagaacgaatgctccggtttatgcgtacaggccgcgaaggcttgctatgggcccagatcgctgcggatgaggaaccattcatctatcagaccatgatggacgttgccgaacaggaaatgcgctgggcagattatctgtttaaagacggctcaatgattggtttaaacgccgatatcctgaaaagctatgttaaataccgaaccaatcttgcgatgcgccgtcttggcctgaaaccactgtacccggagataaaagatgacccgctggtgtggatgaacaaatggctgttgtccgacaccttgcagattgcaccgcaggaagctgagcaaagcacttatctcgttggccagattgactccgctgttgatcgcgctggcctaagccagtttgccgatttgtaagcctggataaagattttgtggcctggtcgctctgggccacaatgaacgcgaaaaaaagcactaaggaaagataaagcatgaaattaacgaaactgaccgaccatctcaagctggccaccgataaactggtgggcttcaaaccagagccatatgagctgaaccccggttttggagaagcgacagagagtatttacaagatggttgaccagttccacgagctgtttcagcacccgcgtcgtgtaatgcccactccggagctgctgcgcctgcgcgctaagctgatccatgaagaggcggtagaagaagggctgcctgcagcgaaaaaaggggatatgcagggattgctggatgcaatggctgacttcctgtatgtgggtgtcgggacgatggtagccatcaaaggtgggctatcaactggcatgagctactacactcaggagcaaagcgtcgatcgctttattcataccattatggtgcctggaaataccgtcttcgacgatatggccatccccttcaatgaagcagaagaagctgcgcttatgttggccgcgctggccgataaacttgaacataacaaggtaggtgatgctgagctgattcaggatctgcgccgcgtgatgaacaaaatctatgtggcgtgcatgatggtgtatcgcctggctgaattccttggcgtcgacgtcgtggagctggtggcggagatccaccgttctaatatgacaaagctgtggccggcggatgctgaagcgcgtcgtcttgccgttgagagatgtagatatgataagaatgacctcggattccgccatgctgacggcactgacatgatgatcggctatcgcctgtctgatggaaaaatccttaaatcgccgacatatagcgatgccgatctgtctcgtttccttgagcaagcacaggcatcttcgctgtatgaagtggttaaaaacaccttgtaagtactaacttatcaatatatattgaaatggacgtgtgatctattgtctatttctatccttatcaatctttattttcgataaagttgagcgttggtggccccgtggccaccatttttttacttaatttctagcctggatgtcttctctgtgtttaaaatgataggtatgtacttacttattatttgaggtcatcttgtcttttttacttaatcgagaattcagtaacggtcagctggcttcgagctcttatggccgtgtcattcagaccgttgttgataccggcgttccttccgaagatcgcaccggcaccggtacgcttggcgtttcttatgtgccttcctactacatgcttaccggcggggctgttccgctcatttcttcaaaacaggtaaaccttaaaccgctactggttgagcttgaatggtatttacaaggttcaggcaacattgggttccttaaagagcatggtgtgaagatctgggatgcttgggccgacgataatggcgatttagggcctgtatatggcaagcagtggcgccgatgggaggacaccaggattgtcccttacagggagtatcgccttaaggaggacatcttcatggaacgtggttatcgcgttgaaggttacattgggctgaatgaagaccgcgtcgttatcacccgtgaaatcgatcagttacaacgtatggttgatcagttgcgcaacaacccgaccgatcgccgcatcctgcttaatgcctggaatgttggtgagctggaggatatgaagcttccaccttgccactttgtgttatccgtatggagtcgtgagctcgatttccagacccgtttgtctatggccaccgatattggcatccagcataaccggcatggctatgaatcgatctatacccagatgctttgcctgatagagcagcgaggcagtatctctgagccaatgctggatgagcttggtatccctaaacgtatcctgaactcctgcctggtgcagcggagtgtcgatactttccttggtatgccattcaatattgccggttacggcatcctcacgcagttcattgcgaagattacgggtcacatggctggcgccttcgtccatttcggctttgatgttcacatttacaacaaccacttggagcaggttgaagagctactggctcgcgaacatccggagtcgtccgaccccatcgtcgtcttcccgcacgaatgggaagagctggatgacttcaaatgggacggcgtgcagatcttcggctacgaaccacttccatggattaaggctccagtggcggtgtgatatggccagaggcatgtatgtgttatgtgaaattgaagatgtgctggcgagagccggccatcgtcaagccgctgctgatgaaaacgcagacactctcgttgcaggtgatgagctcatattccccaccagccgcatgttgcgtggctttgctcgctccggtgctgaagtggtgcttatcagccaccgtccggaagcgctcgaaagcgcaaccaaaaaatggctgagagatttcggcattgattatgactggctgcacctggcaccacgtggagtcaattacgaaacccatataaagcgcacgcctgccgcgcataaagatgatctgatgatcgcggcactggtgagttcatcacgtctacgagctgctctgtctggttttcaccagcgcccggtaatgtatgaggtgtctcaatgaagatgattgcagctgtcggtcgcaattatgaaatcggcattggcaacgaacttccctggcgttgcccgaccgatctgaaactgttcaaacaactcaccaaaaacgccactgtcgtgatgggacgtaagacgatggaaagtcttaaacgcccgctgccagagcgccataacctcgttttgacgcgctctcgtggctatatccccaatgggttctaccccgctggcatcgatgacgttttgagactaccagatccggtctgggtgattggtggcgggcagatttactcgctctttatgccacacgtagaagagatatggctgtcgcatattggcgtggatgtgccgggcgcggatgcgttcttcccggcgccaatgatgcgttctttagggttcgtaccagtcgaaacggcttatacccaacgtgcaaatgaggatgagcttggctttttgcagatcgtatacagaaggtcgtaatggattaccggattggaatcactggcgcacagggcagtggaaaaacaaccctggcaaggtacatcgatgcgcattatggcattccgtatgtggatgccggcgttggcaagctgatgagcagtctgggggtgaaggttggcgagcgtttgcccctttacgaacgtcttcaggttcagatggagattgccagacatatcgagatgatcacccgcggcgttgaaggttttgttatcgaccgcacgccagccgatgtcatggcttatacgcttgacctggtcggccagaccaatgaagaccgctgcatcgagctggctctcgacattgagcagttttgccacaaagcggccatttccaacttcaatgctatcgcgggtcttcgcccgggcgttgagctttccagcaaagatctcgcgcgtccccagcgaggatcgcttgaccgtctctatgttgctcgcatcgatgcgcttatgtgcggtgagctgacgaaaatcaacacccttccccaaaccggcgatctgcaggtgttcgttatctctgaaaagtgtcgcacggttgaagcgcgagccagatcggtattgcgagtgctggacagagctgctgaaaacatcgagcgccgtataacaggacgagtgaccttccactgaatgttgctcccctgttgggcagtgtgacaataagacacgcgaaatgaatcgaggaaaaacagaatgatagacgaacttcccctctcggatgaattagatcgtaaagcgattgaagcactgatccgcattgctgacgaacaatcccgctctttgatgagtgaacgtgaagcacgtctggctatccgcgcagtgtttgagtccgttcaagggcttgttggggaagaggtaggcgaagccatcaatgtggcgatgtcgcagttcaatggcggcaccaagcgccctctgtttcctatgcacctcaaactctcaggcggcacggttctgttcgtatccgtttgcctggagaccaaccaaatccagatcctcaacacatcaacgggcgaatggcgcgcgccggtcgtctgcgaaagtggcgaggacgcactgaaaaaggctgctcagtttgtgcgtggcgcactgctgaaaggcgcgaagaagctgtaaggagtaccaatgaccacgattgtcggtggcgtagatattgagtccacagggctggacttcacatccggccacaaaattatcgaaatcgcgataacccgttatgaacttgaaacccagaagcacatcgacagccttgagatgcgcttcaatccgcgtcgcagtatcgatccgaaggcgcaggcggtgcatggcatttcactggaagatctggcgacggaaccgctgctggctgaccacgcaggcaagattgctgcgtacatgggcgcatgtagtgcgttagtcgcccacaacggagaggcttttgaccttccgtttattcgccacgagttcggtagctatggggtgaaattgccaaatatccccatcgtagacactatgctagatgggttgtgggctaccgaggatgggaagcgtccacgtctggaagagctggccttttcacttgggttcacttacgaccgtgataaggcccatagtgctctctatgataccgagctgatgatgcagtgtttcttcaaagctcgggaaaaatatggttttttcgacttttaatataattaacggtgcaatttattgcaccgtttaactttttagaatgaaacttttgccttcagtaacttggctgccatttcaaaatcaatttcaccggttttagactcagttgcaagcttgtatagaaccagaacgtatgtatcgcctagaacttttgtgattgcacttgccgttgttgcagatattgcccctccaacaaggctccctacaccaggtatcatctttaatagccctgtgacaattgttcgtcctacaaaaactgcaccaccagcacctattaaagacgttaccattgttgttaaggccactttagatacatccattccaaaggtgtaactgatttttgcaatcattgcgacttgaattggcactaaggtaaatgcatctgaaaatgggactggtgttgctgcggccgcagctgcgatggccgttgcggcaataacttctttactggcttgctccttttttatatccaatgctttcttgtttttaattgaaagagcattggaaaatgcctttttttgtgcttctggaataacctcatacgaggtttggatcaaatcatctatgcctctaacctttcttttacctatgatctcatccggttcatcttcatcataaattgtttcttcaatagcacgagtcagacatacggaatggctatagtttttaaatgcgacctcaacctctttcgcaaattcattgtttgtgaaattatttgtttttgttagtactactatgactggtatccctttgtttatcaggaatttagctatatccaattccgcattttcataacgtttaccggtgtcattaatacatagccaagcgagatggacataattctctgatttttcactattgttatgttcatttatatagttttcaatttttaatctggttttctcgtaatccgcaacttcaagtccctgagtatcaatgatttgtaatgggacgccttctttcttaattacatttatattttctgttacggggcgccctactccagttctcgcaaagtctccacgaaatacactattaatgagagaacttttccctacaccagtctttcctatcacgatgatgttagctacgggcatatctttgactgcatcgtttaaaatggcatttacattaatgttcacattaatcactcctttagcagaagcctttcatcatagctgatgcttttaaatttggaaaaacatatgagctttgtagggaaaaaaatcttcaaaagcgtgagataaatctcctgtaatgacctgaatttacttgttttctgcctgataggttttgtcagaatacgctcaaccaaaacgcggaaacgcaccaacgaaaacataaggagttaaaaatgagcgcagttaccaacaatgttaaaaacgatgacctggatgaactgactgcgatgctgcaatctctcgacgaaccagttcagaacgctgcgaaaatgagcggtgtcgacgagatcgacgatcttctctctggtctggatgatgcaatcgcaaaaccagtcgaggcggtggcggatgaagtaatgaatgccagctctaccggggatctgagtagcgtgctggaagagcttgagattgagcacgaatcggtgaagatcgaagaacccgagcgtgacctgattgcggagattgtgaacgagccagcgcctgaacttgacgctcgaagtactgagactaccggtacagatccaactcctttaccttcagtggcgtcagagcctaaacctgaagaagagcagccaaaacgccagaaggcaaaatcagagcgtgcgccggccaaacctcgcttcacgctggaaggtaaggacgaatcgttctatgcgtcagccggtctggaaagtgagagctttactgctgcattcgaaggggcgccagtcaaagcgaaagacaagatcttgaacctgttgaactggtttaacggtgggccggaaatcagtgtctacacggtaatcgcaatgcgctatatccttgacgcgaacacggtgaccagcaatagcattaaactggcgctgatgagcaacccggagaaaccatacccgctcaacactgcttcgactcaggctggccagatgatggctgtgtttccagcgactggcatcgcaaccagagaaggtgggaatttaacacttaataaagagtcgccgatcgtaaaaaaatttatagcggagtattccattggatgatgtcccccaactcgatttaaagccatctgatagcttaaagatgctgggtgagcatatttcatatccagcatcgaaaaaacgcgccagagagcttcccttttgcgattctggcgcgttcttctttgtttgctatccgttggattaaatgaaaaaataggtaagtatttatctattagagaaaagcaatgatcgcagccgaaaaaatcaaaaagcgagagcgtgatgcctctcttcgcgacctttggcgcacaccgcagtggttgtttgtcgccatccaacgttacataggcgtaaagttcgatgtggacgtcgcctgcaacaaagataatgttctcttgccgaactttatcggtgttgagcgtgatgcgctcaagtgcagctggggagaacctggcacagtggcgttccttaacccgccctactccagaatcaacccctggatagacgcagcaattcgcgagcaggcgcgcggagtgacgacagtcatgctgataccacaatccctcgatacgtagtggtgcgagcgtgcggctgaatgcgccaacgaaaccatcatcttgtctggcggccgcgtggcgttcatggaacctgacgtcacattgggtctggttgaggtcaatatcaacccaggcggaagtatgctggtggtcttccgcggattctgtcagaacgttggtcacttcatgaataaagtcccgctgacggtgatgaaaagtctgggtggttacgatcctgccaaagtgatcaggaaaaaaagaccacggaaacaggctgcttaatccgagtctgggagcgtttcataacctgctttcgtatatataaataactaagtactaattataaacatatacgaaagcaggcttttccttgtcgatttcaaaccactcccagaccgaaacaagacgcccagaccactctggaacccctttccagaagctatagaatcgtttttgtgaacacaagtaaggaaaccatcatggcatacccgaccaacgttgtagcgctcgttgagagcgattttttggctaacgctcgcgaactcatgaaggatcgtgaaaaggcattcagtctttacgagtggtcactgaaatgtttgcacactggcgaacacaaagacctgattgagcagctccttggcgagctaatcaacgaggtttttgctctgcaagttcagcttcatggtagacaaaatgatcagtcaaaaaagtaagtaagtagttaccgtttacgatgtatcatagtggttgtagaatgatgtcgatttcgacctgaatcgaaatctcggtctggtgggtggaggatagcgtcactggcaccagacttaaaaaagcccacaaccagcgcagaaccagcccttttggggtttggggaagggggaaccaaagtgggcagagagaagggtcactttatgattgtcgagtctgggtattttgagaggttgaatccagtactccccttcatgaagtgtgggaagatctcggttctggggtgctgtcatccataacttcccaagcctaagctggcagtagacttaggtcataacttttcaggttatgaaacgaccaggttggtgaggattttttactcacctccctgggagagtattacctgaaaagacaacctctcacttcgttcgaggtgaacttcactcacttcgttcgctcagttcaggtaaaaataaacccgatctgggaagtaattcattgaaaataaatatgtataaacacgcgtgcgcacacgcgcgaggaaaaacgggcggcggcgcacgctttggagttagagatgacgacaagcacacacgccagacgaaaaacggcagccggccgtgcgcagcaccagtatcaaaaacacccccgcaaaaacttcaaaacgccagttgtcgaatttaatccccggtttaagacggtcaaagttttcagtgatggctcttgtctcagaaacccaggcgggcccggtggatatggcatcgtctttcagttccgcggcgaagaacgcgagttttccgacggcttccacagcaccacaaacaatcgcatggagatgatgggcgccctgatagctttggaacgccttaaattctcctgcaacgtgatcctgcactcagatagccagtatctcaaaaatggtatgaccctctggatgaaggggtggaaacaaaatggttggatcactgctgacaagaagcctgttaagaatgtcgacctctggaaacgactcgatttagccgccagtcgccacaatgtccggtggaactgggtaaagggtcacgccgggcatcgagaaaacgaaatatgtgacaggctggccaagatcgcagcatatgcggcagctgatactccacacaaaaaagatgctggtttttggtataaaatgataagtaagtatttacctataattttgtatcatgtatcttacccatcgtcaggatgacaacgtgctggttaggcacggttccaaggatggaacgcaaaaaacggcggctggacattccagccgcaactctttctgacattgaaaggatttcaaatggcacatcaaacgccttcctcttctcttaagaaacacccccgttcgctacgactcatcctggcggagttattctccggccgtgtgtctgcacgcctgtccgaactggaagagaaagtaggtcaaatggagcatcgtctggatgaccatgcggtggccatctctaacctgggggctcgtgtggcaatgggggaagtgatgaagacccgaaccgcaaaaatcctgcgagacacctggggcgtgcgagccaatcaaacgcgcatggagagctcagatggatcaatttcaacgaaaaagactacttccaatggcctacgggctgatcacgatttgtctggcagccgtagcaataccgtcgactcaggcgttgctgatgccggactcatgcaaaacggtttcgcagcagacgccggcaccagtcacggaaagcacaaccagcatcaccaccatgccccggtctgccactctggatgggatgcggttggattcgattcctcaagttcgtcctgcgactccggatcttcctcctgctgcgactgaggtgatggcgtgatcttcttactcaaaaactggtcattcatttggatagccattctgcttttggcggtgggtggctggatctcaaacatcgttaagctggcactacacggtgatttatttcttcactcaggtatgacgatcgctcgtgttgtggggatttttgtcccaccgatcggctctgttctcgggttctgttaatgggcgtaggggttgaagccttggaggctctctttgctgccttaatgtttatttgtatacgaaaacaatttgtttaagcacataacatatagggaaaaacacatgttaggtttcttcaaaaagaaaactcgtaaagcggttattgaagttaaaaaaatggagaaccgcgatgcggtcgaagctactgtctggggcgcatacatgatcgcttatgcagacggcaactgtgatgcaaaagaaatcgctattctggagaagaccatctccgcattgccagctttctcaccgttcgcgggtgagatcgcccagatgagcagcaatattcgtgctcgctatgaagcttctcctcgttccgccaacgcacaggctcttcgggagctggctgatgtcgccggcactccagaagccgttgatgtgttgtgtctctgcctggatattgccgatcaggatggcatcggcgaagaagaagaggttgtgctgaagaaaattgctcaggcgctgcagttatctctggatgcgtacatctaatggcagagaaattaaggctggccgtcgtcgccattcttctcgtgctggtcgtgctggtggacttcactggcaaactgatgtctatcgcggcagatggcgtgttggttggattggctatctactttgcccaacctctacttaaaaaatcgaagtgatcgccgagggccacctggccctcgattcttctggtttaaccgttatgacgcgtttgcccccctcttctgaattgtcagaataaagcaatcaagaaaacaaattattttaacaattaaggaaaaacacatgtgtgataaatgcaccgccgctaacgctgaagtaaagaagatcattaatgaagtcggggctaaaaaactcgtagggatgcttgattctataactggtcatggtgacgctcatccgctggaacgcatcatggccatcgtccaggtcatggacttatttgacgaaccaatgaaaatcctgatgcttgctcgtcactttggcggggcgtatgtggaagagcatgaacgtgccaataaactgcaggcaactctggacatgatgagcgaaccaaaatgcgcgccggcgccagagctctccggagacaatatgggcattgaaagcaaagagcgggagatcgccagccttaagtcttctttaggcatgttaattaccgcctttaaactaatggcaacccataacggtttcaaaatgccagagctaaccggcgatgaacatcccgctgctattcgccagctgcttggtgtgatggcggataatatggatgaagcgaagagccgtatcgaagacatgatgcgagaacttgcccaccgccacgatctaaatgaccagccgcacaagatgcagcaagtcagccactgaacctgaaatagcaagggggcgaaagcccccttcccctcctccgtagccctctggatagatctttaacgccttttcttatctaagataataaaaccaataataaaacaaattgtttatatggtgggattatgagtgctgcgctttctgtccttgagtcttttgcttcgaacaccggtatcgaccacagcaaagagatgaacgtcatccatgcaatcgtggccgagtgcgagaaagggatcgcgttcatgcaccaggttcacgacttcacttatggcgacgaacgtcactggaataagtgtttaagatttgcactacgtacattggaagtggaaattatttggtagggatataagatcatatccctaagctcttttaagaaaaaattgcttaataacctaatgtaatttaaatccttcctccaacccctttaaatttttcgataaacgccccaattttttggaatacggtctgctttttcgttttgtactgaggattcagcggactgagttttggtagcgtctcatttaactccgtcccattttcggtagcatattcccgtttgagtgatgtacggatatagcgccttgccgcctcttcattgaggttttcttccttaatcaacgcttccgcttcccgttgctgttcacgctgagcataggtaaagaatgcatcaatgatactggccttatccggcatgtcatcaaggttagtttgctgaataaagtcaacaatcagaccttctttggcacggttgcccagacttgagcggattaagcgtcggacctcttcagtcagggcttctttaccctttttctgacggttgtggtcaaaaatcaggcccagaatgtagtccaggttaatctcttgcgacttgagcaggtcaatttcaaacaccacgtcatcccagtccgtggttgatgtatccctgtcgtttgctgctttttcacgtcgctgccagtcccggatatcattgtaagctgagcggtagtcctgaactttacgttcggcagggaggcgaatggtttgtaattcagcaaatttttcatcatccacgtagtgctctgctttaaaggtttctaccgcttccgggtcactaatatcaaccttctgcagggctttcagcgtggcaaattcatcgtagttttgcaggatgttttctgcccgcagatattcaccaaacagtttgacgaaggcttttttctctttttcactgtcgatactggcagggtcagggaagcgctgctccagctccgaaacaatagacataaaacctcgtttagcttcgccggttgccgcatcgctaaagccctgcatgtactcttcgtagcttttttccagtaccacattcttggtgtttttgtcgccaaaaagtgtaatggcatcaatggtgggacgctccaggtccctgaaagtcacgatattgccgaaggttttggttgcatcatagatacggttggtgcgggaaaatgcctgcatcaggccgtgataacgcaggtttttgtcaacgaacagagtgttaagcgtcggggcatcaaagccggttaagaacattcccaccacgatgagaaggtcaatatcctgatttttcactcgttgagctaaatcgcggtagtagttctggaagccgttactgtcggtactgaaattggttttaaagtggttgttatagtcatcaatagctgaatccaggaattcctttgcgctgctgttcatcgcgctggtatcaaagctttcgtcagtaatatcaccaatggcgctttgctcttcatttgcagcaaaggagaagatggttgcaacccgaaggcgtttatagctgcctgatttttttgctgcttcttcctgtagcattttaaacgtcgagtaataagcttttgccgcttccacactgctaactgctaacatggcgttaaagcccttagctcccgggaaggttcggtgcgttttctgacggaagttattgataatgtattgcgttatttcctggatacgtagtgggtgcaaaaatgcctgttggttttcagccgcgctgagttttttctcatcagtttccgtttcaagagacttaaaccgtgggcggacatcgttatagtccaccttaaacttcagcaccttttcatcacgaatcgcatcagtaatgacgtaagaatgtaattcacgcccgaagacgctggcggtggtttctgcccccagtgcattttccgggaaaataggcgtaccagtaaaaccaaactgataaaagcgtctgaatttctttttgaggtttttctgggcctcaccaaactggctgcggtgacactcatcaaagataaacaccacctgctgctgatagacgggcaggtcagcttcggctttcatcaggttattgagtttctgaatggttgtgacgataattttgttatcgtccttatccaggtttcttctgaggcctgctgtattatccgaaccattgacactgtccggagagaagcgctgatactccttcatggtctggtaatcgaggtctttcctgtcgaccacgaagaagactttatcaataaagtccagctccgtagccagtcgtgcagccttaaagctggtcagggttttgcctgacccggtggtatgccagataaatccaccgctttcgggttttgaccagttcttcgctttaaaagagctgttgattttccagagaatgcgctcagtggctgctatctgatagggacgcatggcgagcagagtctggctgctgtcaaacacgctgtaattaaacagaacattcagcagggtatgcttctggaagaaagtggcggtaaagtccttcaggtccttaatcaaggtgttatccgatttcgcccagttcatggtgaaatcaaagctgtttttatcccgtttagtggtactggcaaagtaccgggtatcagtcccgttggaaatcacgaagagttgcaggtatttaaacagggagttatcgctgttaaagctttccttgctgtaacggtgtatctggttaaaggcttcacgaatcgccacgccacgctttttgagttcgatttgcaccagcggcaggccgttgaccagaactgttacatcataacggttagcgtgtgagccggtctgttcaaactgctgaatgacctgcaccttgttgcgcagcaggttctttttatctatcagatagatgttttccagacgaccgtcatcaaacgtgaaatcacagatatagtcgatatggattttacgggttttgtccaggctgctgtcactagggctgtccagatactgctctgcgaagcgccgccattcactttcgttaaacaccacaccattaagatgctgaagctggtcccgcacattcgccagcatcgcagtccgtgactttacagagataaactcataaccctgattaagaaggtcctgaatcagctcccgctcaaggtccgattcgctttggtagctgtcgccagcatcctgaactttggagtatttatcaaggacgataaagttattggattcagcaatggtatgtatctgttgtgtcatggtgcatcctgtgcgtcgtctggcaaagtccggaagggtatcagaagcatcttccggcattcataaaacctgataccgggcgggtgagaacaaaccctgccggtatcaatggtccgtcagttgctggcggtttctggtttcgggaagctgaacagtaaatcacgatagtactcgtactgtttctggcgcagctcgatttcgcgccggaggccttctgtgattgaacccgtcaatgtgtcaaatttgtccagcattttagcaatatatttctgacgctctatggaaggcactaataatttcaattcctgcaatttccccacagcaagacccggctgtgcagatttcgacgcatattgatttagattcattgttgttaacatatgaaatgcccagtcaatatcaatcccctgcatggctgagactacaactgcatgttctgtagcgtagaactgacctttcattctttggacattgccacacagagcaccttgtcgccctattaatagatgttccccatcatgacttttttctttaacgtaaccacgaataccgtttccgccaaaacaaggatatacaaaatctccttctttcccatctactatatttctcgccgaaatatgctgccctgcacgcatcttcacaatctcacccaatgtcttccactcaaccccaccctcttcaaaactcagcaactggtcacgatagtaattgtactgctttttgcgcatggtaagctcagcggtaagctcagcggtaagctcagcggtaagcgcagtaaatttatcaagaatccggacgatttcagcttggatagcaagggacttttccggattttcggggctaataacaggaatcaaaacttttttgaatcgagactttgatatgttgaaacgagttacaccgcttgcggttttagctatctccgcacgcattaaattggttctgaaaaggtattttgagaattctggtttgattttaaccttttgattgaaccgaataccgaatgaaaaactatttaaataaacgggctcatcaaaacgagatgtgattgcggacgaaatgccagcttcctcagcagtttcagatgagccagtaaaaagcacatcaccatacctaacagcgtgctgttgctcaccatttttgacattaacaaaatctgttggtggttcatcaatatttatattgctaaatatatttttgtatgaaacatatttcgcattgccattttcaaaatcagccttggtcttgccggtaagtccaccataaatatcagcaatttctccaatcggcaaccactcaatttcaaccccatccagtaacttttccagataactcagctcactcatttctgcacctcgtcaccttcaatctcagccacaattgtatcaatgtctttacgtaactgatcgattttgctgacggtggtttttagctcgacattcagctctgcaatatcgacaatttcgcgggtattcaaggcttcgacgtagctgctgacagacaggttgtaatcattcccagccactttctcgaaggctacagatttcgccagatggtcaacatctgctttgctggcaaagacctgcataatcttttcgatatgatcatcagtcaggatattgttattggtttctttcttaaacaacccgctggcgtcaataaattgcacgcgggtatctgttttgtgcttggacagcaccagaatgttaacagcaatagtggtgccgaagaacaggtttggtgccagagaaatcaccgtttcaacatagttgttgtcgaccaggtactggcggattttctgctctgctccgccacggtagaaaataccggggaagcaaactattgctgcacgtcccttagcagacaggtagttaagcgcatgaagcacgaacgcaaagtcagcttttgattttggtgccagcacacctgccggagcgaaacgctcatcgttaatcagggtcgggtcgtcactgccaatccacttaactgagtacggtgggttagagacgatcgcgtcaaacggtttttcatcgcaaaagtgaggctcagtcagggtattccccagtctgatatcaaatttgtcgtagttgatattgtgcagaaacatgttcatacgcgccaggttgaacgtcgtatggttgatttcctgaccaaaaaagccttcttcgatgatgtggttatcaaaatgttttttcgcctgcagcagcagtgagcccgagcctgcagcagggtcatagattttgttgacgtgagtctgaccgtgcatcgcaagctgagcaatcaacttagagacatgctgtggcgtgaagaactctccgccagacttaccggcattcgccgcatagttagaaatcaggaactcgtaggcatcaccaaacagatcaatctggtgctcgttaaaattccccagcttcagcccctccacgcctttcagaacggcggcaagacggctgtttttatcttttacggtgttccccagtcgattgctggtcgtatcgaaatcggcgaacaggcctttgatgtcggcctcggacggatagccgtaggcagagctttcaatagcaacgaagatactgtttaaatcagcattcagccggtcgttggtgttagctttagcggcaacgttgcagaacagctggctcgggtagatgaaatagcctttagtcctgatggcatcgtctttgatgtcatcggtaatgatgctgtcatcaagtgcagcataatgtatgctctcatcccctgcttccatgtagctggaaaaattctcactaatgaagcgatagaaaagtgcaccgagtacatactgtttaaaatcccatccatccactgagcccctgacatcattggctatggcccagatttgacggtgtagctctgcacgctgctgaaggcttgtcatcttgtatcctgttgtatgattcttaagtactgttattggcccgattttatcgcaatttcatattgatgacaggttttgtatgtcatgcgttgcactgagagttcgtttgcccggttgtgtagccaacgttctttcagtcaggccagtagaaacgttgcgctgacgataaatactgaagccccgatactatcggggctgagcgttcagtcggtgagaatttcttcatccgtatctattgtggatggtgatgaatctatttttgttgtaagaaatacccgattcagtagtctttgctttagggcgtttcttcgctcattgtagaattcctggaagcgactaaactcaatgttttcatctgaaactaacagcattgatggagtatagttgtttgatgagtgagatagccattgtttcagggatgtattctgtttacttgtattctgagagtgattcagtaaatgaagatttggtatggtgtcccagtgttccggattttcgtaaaagctgagtttctccggtgaattcgcaatataatctaatttttcaagatatttatttgaaaaatgatttcttggatgaaggtgatcaatatgaaacacctcggtcggattcatttcagggaacagaagatgcaatagtgcgcggcagcgaccttcgccatatctgatattgagaaggctttcgatgtattcgttgtcaaatctgaggtccttattcgagcctttgtacctgtcaataatcttctcaagaggaaaatgaacatctgaaagactattcttcattacgtctctgatgctcgtgagtagcgcatctgcctggcttccaaagatccctttcagaagtaccatgtaaaaccactggctaattactgagcgttcattgtggtttttattcaggagattaatcgttgtatataatgggtgtccattggtttgctttttgtaaagccagtagaccacaggaatgactgcatttttagatatcagtgactgtggattgatgccgaatcgcctgataagaacaaaagtctccttgatacaggattttatttcagaccattgttgttgtatcttaccgacctcttctgaagtgaaattttttactttgaaccggacgtcagagtcaataagcatcaggctggtttttaagaaccagtctctttcaatataaaaccccatttcattattctgatgaatgttttttgttagttcatccagttctcttctgaaatcaccctgccagtgtgctacagctattgacatcagtaagtcggagaactcaagttttgtccccccgctattcgtgcggatgaaaacatccaacacatgatcaatgtcctggctgctctcattgaagtagtggataagactctcagttcttatcttggtataaagtttaagcagggtttttctggagaattcactggaaatgagtcctcttttttcgagttctggtacgacaactttaaataagatatcatccggagaatcaatttgctcgtatttgaatatttcgtgaaggcagaaccagtgatgtttgttatcggtaagtgaatcagtgtattccttgtcggtgaggaacctgaagttgtacttcatcatgggctcatcgtctgagtcaagtggcgctgttaaatcgacgtaaagctttctgggcggcaggaagcgatcatcctgtgccgaaggccaccacacccggggctttttatacgcatacgttccacacagtccaatatataaagatgtgagacgctgctgaccatcaatcaccgccttaaaatcatgaaatcccgcatttgttggtacacatgggttttcttcattaaatcgctgacagtattctttcaggaattcatagaatttgtaatcgtttttaatactggcactacggatatcccacatcatgaaagagtttatcgggtagtctcgcatgatggaatcaaatagtagacatatctgcctgtaactccagacaaactttcgctgaattgcaggcagaaggtagtggcgtaaattaatcgaatctatcgcttgttttatcgttattgctttttcatactggccagccatcataaacctcatgtgttatattagctggctgattttaatctaaagggtgtaacgagtacagtatttgcacaagcataatttatgcagtggaaaagctgactgctcggtttgtgtttttcgttcgggtagactcgcattgcggacgcacaaagtgatgaaacctgtcttgctatgtttttaccaaagttaacaagaagtccatgctttatcttctcgccatctgttatgtctgccaggtcattaccaaacgttacgctggcagctttgtgacgcgtgatttggggggggatgaagcgtggctacgcgtacagactcccaggcgacagactaattaacgcgttgacattggcggtcactaattgaggatttctataagaactcgttgatcgccctcttccctactctccaacttcatacactccaggcgtggcaaggcttttacgcacattacacccacaagaaaacaaataaataacacatcaatgaaaagtcaacgctttaccctgatttggtctcaaaagttgacgttttgccatgtcacttcttatatccgttaagaagcgtaccagaaaccaacaccctgcgacgaaaacgccaaaaacgactcctgatagcaccacaaaacagacacgctaagaatggctctcgttgcgtttaatgagtatataaacaaattgttttaagcaataagaaaacaacaaaacaagataacgaagaaaaggaactgccattaccccacacccaggcaatacccacctcttcctgccaggctaccgaaaagaccaacctcattgccccaggctaccgaccccatgaagaaaatctcgaccaccaccaaaaagcgacgagacaaaggcaatttctctgaaggccattccccaatacacggaagagaatacccgggaagaaactccagacaagaccaggccagaacagtccccggcgccatctcgtttacccactcttacctcgaaagataacgcaaattcctgataagcagagaacgccattacttcacatgcggagaacgacaacagaccagaacccacatcacccacacttccacctctcaagatgaacgaaagaaattgcgcacacgccattactccatacccagagaagaactatccccacaacgaagaatacagaccagaggaaaaccacaagacaaccacctctacaacatctgcaaaaccacttaccggcagagagaagaaagtcgccttttctcccatacgaatggtcaccgtatagagcgctaataagagagatacgagtcccccataagagaggttgttcgagtcaggaaagagcacagatataagacagaggggatggagggggatcgctccctttcccgtatttattcaagtcctgattttatcccccgtaacatccctgcggtcgaacgagtgaaagggccaccgcgaaaatctatcgggagcgtccccgcagggggaaggctggctgcctgagtggaaacggctgggttcccgtcatggaaagggtgcgtgccggtatagagacaaaatgccgcggggacggctgatttcctggcggtacaccgtttggtgcgcggttggctttcttcccgctgcgcgcagctgctgatacgtattctgccagagcgttcgagggtcacaagctgtttcagtaggttttcgggaagaggaaaatactacccacaagccctgcggtgcacgttgagaagaataatgtaaaaagtgctcccgatacgttcccggatactcactgcttttccagcgcttcccgatacaaaatgctttttcgcctatgtcttattgcgataataacaccatcaagaaaacaacgtgtttagacaaaggagaaacacatgtacaagcatttgaacatcagcatcaccctttgcggagaagagacgtgtactgacgaactccagatctctctggatgacgttatccgctctgcggatgtcgctgggcgcattggtacgctgattggcgaagggtatcgcgagggcacgtttgattttcatatcgaggacaacgcaatgtccgtcgcgtggaactgcacaacgtcagagtccagataaaggaggaagacaatgaatatgcctgtgattgtggaagtatggagcgtggactcgctggccgaatgtcttgatggcgtagggccagcactgacccgtaaattatggtcatttgtaccagctaagggagagtcacccaaagggaaggatgtttggcacctgctgactgatgaagagaagcgggagctggtggccgcagtgaaagaggagttccctgacgaagattaacaacggccaccagcaggtggcttttgagtgattgtggcctgcggccagctgaatgccggaacgcttcgcttggtggccgtttacacactggtattatttacaccaacaagaaaacaagttgtttacggagtgtgtaatgaataccgagatgattttgaaactggataagctccagcctcgcaaagacaaacctgcagtactcggttcgatcactttactggacatagtggccaacggcacagccatccgacttttcaaagagaccgttgtcgtcttcggcgaaacttctcgcaagcgcatcgtaatgagcgtcaggcgctatagtgcgaaagggtgggtagctaaacaagttatctggcctgagtcagaactggagttggctttactggaagttaacaaggtcgcccagcaggaaattcaacgagcaacaaccctcgccatagcatagtcatgtgcaacacagattagtcgaatttacgacagccccgttgatccttcggggcttttttgtattgtaagtacttacctacggcgatagtattacgacgcatttacatggaggtaaaaatgagtttgaccaaagaagatttagtatttgacctttactacgcatccagcactgacgaagaaggcaataaactggcccagctgaccgttcagttccgtgatgcatcggctgttccgcatgtgaccacccagctggcccgcacaactcttaagcgagatcgctcgaaggtttatgccgtcggcgagcaatccgtgaaaaatggttcggacactctgctggccgccattgaagcctattatcgaacagacccgaagaccattttcgaaaacctgatggcacaggttcaggatatgatcgagggcaatctgggcgccaacaatacctgggttggttcatacggcataaccattgtgtctggcggctctctggaagagtatctgcctgagtccgtctacaacgtccagtaaaccagccaatggcgcgtaacccgcgccattttccccatcccgtaaacaagttgttttatacattttctgagttgcgataataacaccaacaagaaaacaagttattaacgaagttgaggaaatgttcatgggacttgatatctatattgagacgcagccaaaaaacgatctgaataacgaggcatccagaaagcaagttggctacttccgtaagttcaatgctctcgttgggtggatgaaccgcaacgtaggtgaagttgtaaattgtgaacttttagaagttacgatgaatgatatttgtgctctcaaggctgatttgattcgtctaaacgaaagtaattgtgaagaatatctgcctacccaggaagggtttttcttcggtagtcaggagtacgatgaagggtactggaatgacgtggaagagctgaaagagcttgtggatgagctgattaaaaatcacgacttctacaataacagactgacattttgcgcctggtggtaaatatgactgatttcaccatctccccgaaagcagaaaacgtatggctggaatcctggcttgacctgtcgccggccgagcaaaaagaaatggatcacgtcgaaccggacgaacaaaccagctcccgcttcttccattatcaggatagcgtttatgacattgccgatttcatgcgcgatgaccgcttcccggaatggaacgccggctatccactgaatgccttcgctatgttgatgatccgcttaactgattcaggcgacaccatcgacatcggattgcttcattgagagaggagggccaccgatgctggtggctcttaactaccacctgctttcccgcaggctaaaaacacccacctcttaccgccaggctaccgaagcacccaccgacttcccgacggccaccagctgccgaaacagaacgcttggacgcctcacacccactgcgataattaaaccaacgagaaaacaagttgtttaaaggattatcacaatgaactatatcgccactgtaaacactcccgcgcatggcaccatctctgttacatactccgatattgaaaagaacatcctgggcgcctggcgcgaagaagagaccatccagctgtccggaaaagagaagcagcagatcgccaacgacatcatttgcaaccgtcgattcacgcgtgtcttcgaaaaagcttatgtcaccacctcaggattcggggtgtttatcttcccggttcgaagcgggcggttctgtcagtcaaaactcatcgagctcgcaacacagattgctgtgtggatcaaaacagagtcagggttcgactttacagaccaggaagcaacagcgcagggtgtgcggatcgccgacaatgctcttaagtgcaaaaacgtcatttacgaagccggtatcgactcgtggaaggtcacttgcggggagttcgtgaaagagatgcacgccagtaatcggattcacatactggctggcaagtaagaggggagggggctggaaacgccccctttctttccgtccaccagctcccgcagggaaattcagaaacgggcagaaagccatccgggcaaccgacgggaaacggccagaaaattttcgggaaacggcgggggtcgcctcatgggaaaaatttgtatagagggagacgccagaatcgtcgccagctggtggacgtaagctgtttttgcgccatacgtccagcgctgtgatctgcgctgcattgttagcgcgtacacgttgcgccaacgtgctaatgatacgtgagcgcccacggatcgcgccaatattgccgacacgccccgaaggatagcgcggatcgcgtcaccagacgatcacgcccacgacacgacaaaataagccacgcgctaaaacgcttttaaacgcgctataacgtgttttttactgtgtgtaatgggtatgtactaccacacgtaaaaacacgttaaattggcgcgtttatggcgcttatttttggtgtgaatgagtgaacgccagataaaagaaaacgcgccaacaatggcgcgttatggtggagatcctgaaacgaaaaaagcgcccatagtgggcgctggtggctaaatgctgttttgcaactttccgatcatttcagacaagcgcaaatattctcttttccgtttacagtctcgcttgctgttaagcaaatcagagaacgtaaagtttagcgcgtcacgttgggcgcttaattcgtcgatgagttcaagtttataagcgcgatatttagcgcgatactccgcgcggatctggtcatagttaatcatgatttttatccttaaaactagcgcccactatgggcgctgaatccgtctacttatgctttgaaagcgtcagccagatagttataaaaatcatttttgataaagcgatattgctgcgatccgtttttggcagcgcccattcctttaatcttctcgaccagtcccagacgttcacacagattgatcagctggttggcttgcgtatatcctgcatctaacttaatttcatttgcttgttttgcttcattcatcaaatcgaaaacagcaccatttgtgaacgtgtcgatctcatcgttaatcatatcgattaaagcgaatacacgagatccggacatatcagcgactgaatacacacatttaccagacttgatagacttaaccagataaaccagcttttcgagagagtagctatttgtcatcgcttcgcggaaaaacacttctggcgtttgcttgcttgctttaatcgcgtagtagaagacaccagacaacttatcgtcgtttactgcgtttacaacgttattcacgaagtatgcgagtttagtagacgctgcaagcatgttagctttatctgctttggtgtgcgtgccattctgataatgttcgttgtaagtctgtgtagcttgatctgcttttaattgtaattcgtcagtgataactacagcagcatcaatgatggattttttagaaatggttacgttagacatgattttaatccttatgtaatattgaaaacttattttgtttttcgtctatcgtcagcatgtttgctttcgatgtaagtaattatcgacatgcaaaaaataaaatcaagcgtttttcgcaaggagtgataaaaaatttatttcacaaataaatcaaagtcttagaaataaatcgcgttttctcgaaggtgttgcctaaataaattctacactcggtgtattacccttatatatttagcgctgacaatactttttgtgatttaatttatcggggagtgacctataaaataataaccggacatagccggctattacccttataggcatttacatcttttttgcatagttcctgatttcttttattatatactccccaaaacgttccgagttttcgcatttgtctttcgaaggctcatcaagccccagcttgcatcccgaaacgatcagtctatcttgatatgcagcgcctaaagccatgcttagctctaacatgcacaaatcgtagtcttccgcctttgaacacacctttgtagagacacgttgagctcgttcaatgctattttcttgagaaaatgcggaagagctaaaaatgaaagttaagaatgttaatgctgctacagttttcacatcaatatcctaaaacggcagaattcgttcaacccaatcaaacaggacgatcatttttcgcccgttcccaacggcaagtgtgacctgacaagcgtcgacgccaagtgacacaccttcaatttcgcggccgtccgccatgtagacccttacagatttatggttctcgtgagcctggcggcaaattttaaagaaatcacggcgggatggccggttatcaacatagtctggatgtacggttacgcgaccaacgaaatcatgggtgacagcgtcatttacacctgactcgatagtgctgattcgctcaagtggcaaccttacacgattgtctttgtcgaacggcgccgggcatagatctaccttgttacgggaggacatcgtcccctgaacgtacatgcagaacacctggccatcttccatcgtgacctttacgggaatttgctccttgcgccagaacatcaacgacgcctctacttttgagtaatcgcgcggccagacctcagcaggtatcccgtaggtgatatcggtaatggtattgggcatattttaaacgcctcatgttatgcgataaaaattaccagaaggtacgagtcaccattatcttctatttccttagttttgacaggcgaaaaagcgttaccttgttgcaaatacttagaattgttatagtttgcaggcaagtttctatatggtgaagaatgatgaataagtgcgcattaatagctttgataacctccagtttactggtggctggatgttcaacccaggcggtcaggacgagtgctgccgacccagtcccagcttcgagaatactgtcgaccaaatacaatacgccgtcagagaatacgcaaaaaatcatcgtgaaacgagactctggcagtaagggcgcgctttgtaccagccggctttctgttgatggtgagccagttgctgatatcaaaacatctgagaaggttgagttaaacctgccttatggcgagcatattctgtctgtagatcagcagggtatgtctattatgtgcggcaagatgaacaccgaaagagaaatcatggtgtcaaaagataagcaagacgaatatcggatcggggtgacggtgtcggcagagctgttcatcatgaaaacagcctataaataaatggtagaggagggcgagagcgtttcacccacgccctccgtaagtacgcgttagagacgtttgaggatatcttccaagtcttccttggtcatcccggagttctcgtagatctgcaacactttctgtctagcgttctcagccgctgccatcgaggtcgcgatcttctcaaactctgctgtgctcatcttggtcagaacaaggttgatgatgtctgacttcgacattttgatgttgcgctctttcaggcgcgttttgaacgaaccaagcttttcgttggctttttcggtgagcttcacctgacatgaaattgagcgattttcggtcataattaatctctttgtaatacaccaaagtcaaaactgctcccgacaggcaacacgccttccgcaaacccgggagtggtgtcaataatgtgttttcgttcgtatgagtgtgacatcaggtgtttgttgcttatatcgataaaatccgaaataaaacacacatttgcctgattcttcttggcacgaaggccgcgaccaacacgttgacgcatttcgacttcggccttgcctcctccggcaagaattacggcgccaacacttggcacatcgacaccgacatccagtatcgtagagccgatcagcacatcaattttccctgtagccaggctgttaagcttagcctgtctggtactctggttggattcaccgtaaataaaatctacccgtaagccgctctctttcatcatttccatcagtatctgaccgtggcgtttgatcctcaccagggtcatacagttcagtccatgatcacggtacatcagcgcgtcgcgaacgacggcctcgttacgtccaatattgtaaacgataccgagctgataagctttctgatacggcgtgctcataccaactctgaagttcagatgcttggaagcgagctccgctcgtatacgagcctcatccggagtgtacgcgattttatggtatacgaagtaaggtttggccaaaatacctcgctcgatcagatatttttcagtgacctttatctcgatgcgtcctgcaaccgccatcagacgcatattggcctcagttgaagccttcataaacggggttgccgtcagcgccaggcgatagtctgcgttaatgcaaagcctggcgatgtcataaaagtttgaaccggaggattcgtgggcttcttcgaggattagcagtgagacgcttgagaggaatcgcttaaccagctcccggcgcttaagatgataaacctttttctccgccggcatatcgcgtggaggctcttcaagaaaactcgccagggtttgcactgttgcgacattgatatggcgagacacctgaaactcaccagaaccaatgatgccaaccttctgacctttaagccacggctctccattctcagctcgatagtcgatcgacttctggaagttatctgccatttgaaacataagaacagagcgggtggttaaaaacagcgtcatgcgtccaatacgcgccgcggctttgcaagctacgttcgactttcccccgcctgtggcgatctgcgcaatcatcattccttcgcgaaccagtgtctctacagcctgatcttgatacgcatagtccggattataggggaaggggttaactgccgggtttggtttaccaagcgccggaaccttgtctttgcgaatatgcacgcatttaatgccagccttcaccagatttgctgctaccgatttagcaaaacccgcggggaaggcatttttgctccagttgaacatagtactggtgcctttccagtcgccagcttcgacttcgtaactcagcatttcctggacgagtcgcttcacgttgtcatcagcgccggagaccatagcgttgaccgcgttcgaaacaatcctaacagtcataaatatctttccttcgtgccttttatatgttaattggctagaatagtaagtaagtaagtacttatgcaatggattgtatcaaaaagtatgggcgtaaaaattaccattctgcaggtagaagtggccagactccggccaaatccctggaacaccaactcggttggtgctcaaaacttcgaaaaactgaaaggctccatcgaaaaactgggttttttcaagccaattctcgcgcgtgagctggacggtggccaatttgagatcctcggcggcgaacatcgctggcgagccgctatggaacagggtatttccacggttcctgttatatcggtgggcaaaataagcgatctggtcgcgaaacaaatgtctctggtcgataacgagcgatacggcgaagacgatcaggtcgcattacagcgtctgatcgaggaaattcagtccgaactcgattatcagctgtcggaaattgccccttacgacgacgaactggcggccacactggctcgtgagtcggcaatcgacctggaaatgcttgaggcgttgtcgcgtggtgacgaagagcccgttgagaaggactctcgtgaaaaagctgagcgtgttggggcggaacaccagactatgcgcttcaaagtgacgtttgacgcttctgatcgcgttaccgaaaccatcaaatccatcatcaaagagcaggcgatcaacaccggcaacgacatggagaatgctggtgaagctctggtatggctggtcgataactacaaggagtgtatttaatgaccaaaacgttcgaaatcgtctaccgagacccggcagagctcattccctatgaaatgaacgccaaaaagcatgacgagcagcagatccgtgacctggccgcagccataaaaaagcgtggttttgaccagccgatcactgtcgataaggacgatgtcatcattactggccacggccgccgcgaagctgcgcttttagcggggctgaaaagtgtgccggtgatcgttcgcgacgatctgtccgatgaagaagtgaaggcgaagcgtctggaggataaccggctggccagcattgattacgatgccatcaagttacagaaagagctggagtctctggtacttggtgacgttgaagtcttcggctttgacgagcgtgagctgaacgtgctggtcggtagcatgaccgaagaaatggatactggcgcactggttatggatctgggggaggaaaccgagcgccagaaagaagagcacaccgaaatcagtcgcgaagtcgccgccgaagaggttcgagtggtcgatgttctgggctttaaaacgctccctgctggctctgcgattgtcgtgggggatttgcttgcccatatggaagaaatcacgggagagagcggggtagacgcgttcgttgcttatgcgcagaaagtttcctccggcggagtcgaagcatgagcacatataccatcaacgtatcgttccagacccgtgtcaacaagactactcgcacgcttgagatcgccgaatcgtttgggcttggcctggatgaaaaagactggacgctttacgacaatcttgagctggaagttgagcagggtgatgtggtttacatcactggccagtcaggttccggaaaatctgtcgtgctgcgtgagttacaacgccagatgaaagaggaagggctttcagtcgcctccattgatgactttacctttgacaacgacgtcaatgtcatcgaccagctgggtaaaaccaccagcgaagcgttagggctgctttcgatggccggcttgaacgatgcctatctctttgtgcgcaaaccttctgaaatgtcggatggccagaaataccgtctcaagatcgccaagcttattgagtcgggcgcgaaggtatgggctgcggatgaatttggcgcagttcttgatcgtgttaccgcccaggttgtggcctcgaacctccagcgtgccgcgcgaaaggtaggtgcgacggtaatggtggcgacgacccacgaagacctgaagaacgcgctgcgcccggatatgcagatcaccaagcactacaaggagcgagtgaaggttgattatgcagattaaaaagactttcccgatttatgagggcccagatctgcgccgccgctggactacagaagccgaatggcgagattggcttcgtgctcatggcgcgtatggttttcgcgttaccccgtatttcaatcgctgctgtgtcgtctttggtgaaagacgttatgtcgagacgataaaacagctctatggcctcgatgaaagcgagttcgtatatggggttggcggcatggtgacaactctgggctatattcaggccgacacgatgcttcattgcgtctacctgccagaaaattacgatgaaacagtctactggcatgaggcactacatgtggcgctgatgaccgcagaatatcacggcgtgcagctccatgatcaggaggcattgacctacctgcagggttatatcgcggaagagttcaatcgttcccgactacagtttatggccgacaagaaagctggtggactgcctgcgatcgagggaatcgtgactcgtccagcatccactatctgccgtggcggtttttgcaatcgtaaggtggtgatgcgatgactgacatcatcattaaacggtatcgcccggaggagttcccgcgccatctggactttcttgagcgcatgaccgtcaccagggggacggtagaagactggcacgcgcttaagtcacttcactacaagacagatgggaagccgttcgcccctacctactatcgttgtgagctagatggtcggttggtaggcgttgtagttatggccttccctaaactgctgctggcgccgcggcatcgcatgtttccaaaactgaaacccacaaccaacaccaccgtggcaaatcagtactggggacgttacgtaaacaataacttcgctgtgatcagccgctctgtagtggacacccagtatcgtggcgtcggggtatcgtatcgcatgattaatctggttagcaggatgcatgaccggccaatcatcgagatccagtcgtcgatgagcaaatataacccgtttgctatgaaagcagggttttgcttcatacgtcctgaacgtccgaagagctacgaaagcgcacttcgcgtctttcagcgccattttcgttctgatcccggcgacaacgaagcgattgtgaaggagctgtttgcgatgactgattcacgccggcgccgcgcactgcgagatctggtggcggactatcacaagaatagttctctggcaaaagcaggccgcaaccgtggcactaccattcaggatatcgcggatagcctggtggatgaggccagcatcgtgaaactgctcaaggatattcacaacctgagcttcacttcaccgctctatggggtttatcgcaaccctgattttggtcgccagctgccagacacactgccactgctggcttttgataaacaaccgctgaatgcaccactggatattgcgttaccggcataaggatttgccatgacactgactgataaacagaaagacatcattaagaccatcaacttaggccatgaacgtggacatttgctcgatctggacgagctgctggaagtgctgccttaccggacgacaaagcagtctatgcaattctccctgcgcgcgctgatcaagaaaggtttggtcgaaaagcacgactgccggccgcgagaggattctggctaccagcgtcgaactctggggctgacgacattaggtcgagccagagccaagttactggtgatgtaagttggtcgggggagtcagattaacagcctgcgtctgtatatataactaataagtcacttattaaatatatatacgaaagcaggctctcaaacggattccccagacctaattaatacaaccagaaaacaaattgtttaagagcgcaaggaagcgctctgtgtgtgttttagagggatctatgactgtcgaaaaagacgagagcaaaactcgcctgactccggctgaatgggcggaagccgaagcgaaatggacttcgggcgagtatacgctctcaaaactggaagaagagtacggcatccgtcgtgaaacgctctccagacacttcaaaaagcgtggattagagaaaggcgccgattctgttggaaagatggtgcgcgagtctctcaagtccgatgcagaactgcgcgctaaagcccgagccgaaaagatagaagaccgccggacacgctatgacggctgggcgtatgcccttggtcagatggtgatggtcgaggtcactacagcaaagcgcgaaggtaagccactggcctcgattgaggacgatcttaaaagcctgcagcgcgccagcggcacgctggctaaatgcttcgaaatttcctccaaggcattgggcatggagaaagaagaaggcggtgaagaggatattccgaaccttgtctttggcgagctaaccccatcacaggtggcccagctgcgcaaggaagatgatgagcccgaagtgattgatgacgatctgttggaatcacttgaagaagaagcgctgagcgaagctgagagcgattttgacgcatcgggcgaagacgatgatggagatgcataaccatgtccatcccgtcgtctctaagtctcgtacagctgcactccgggcagatgcaagtcttccagtcgccacatcgtttcaaagtggtgtgcgccggacgacgttggggtaaatcgaggctgtcgatctcaaccatcattcgcgctgccgctaaggaaagaaaacaacgagtttggtacgtcgcgccgacctatcaaatggcgcgccagattttgtgggatgatctgcaggaagttctgccgcgtaagtggattcggaagaagaacgacaccacgatgaccatcgtgttgaaaaacggttcggagatcgcgcttaaaggcgcggataaaccggatacgcttcgtggtgttgcgctgcatttcgttgtgctcgacgaattccaggatatgaagccagacacctggtacaaggttctccgtccgacattgtcatccacccgcggcggcgcgctgatcatcggtacaccgaaagggttctccgaattccataaactatggactatcgggcagaacaaagagctgcagcgcaaaggtcagtggaaaagctggcagtttgtaaccgctgattcaccattcgttccgacggcagaaatcgaggcagccaagaacgatatggaccctaagtcgttcgctcaggagtacctcgccagcttcgaaaacatgtcagggcgcgtgtattacccgttcgatcgtagcgttcacgttaagccgctgcagttcaatcctaaattaccggtgtgggtaggccaggacttcaacattgatccaatgtcgtcggtcatcctgcagccacaaccgaatggggagctgtgggctgtggatgagcttgtcttgttttcgtcgaatacggcagaagtgtgcgatgagctggagcgtcgcttctggcggtggaaatcgcaggtcacaattttcccagacccggccggcgcctatcgtcagcacgctcgtggggaatcggacatcgacatcttcaaggagaagggctttctgcgtgttgattatccgaaaaagcacccaccgattgctgatcgtgtgaactcagtgaaccgcatgttgatgagcgcctctggcgaaactcgtttgtatatcgaccctaagtgcaaacatctcatcgattcactggagaaagttatctacaaaccaggctctcgcgatatggataagagcggggggattgagcacagcgcggatgccttgggctacccggttcatcgtaggtatcccgtaaaaaatcgtgttattcttggtggttcaagataagtaagtacttacctatcatggaagagaagcaaatggaattgactgagaagcaaattaaggatcttgtggcaagacgccaccccgaatacataaagaaaaaagagcactgggatttcctcgccagcacatacgctggcgggcgtgcctggttcgatgacaacattttccgatacttcaaagaaggtgatcaggagttcaaggagcgtctggaacgcgcctaccgcttcaatcacaccagggaagtggtgaacctgattaataaatatctcttcaaagaggacatccatcgaaatgtagaagaagcgcctgagccaattcagaaattctggaaacgcgcgacacgacagaatgtttccatcgatggctttatgtccgcgcttgacctccagtcctccatctatggccgtgtctgggtggtggtcgatagcacgatggatagtgacgcagaatccgtcgctgacgagaagaagaaggatgttcgcgcctatgcctactggatttctccgcagcagatgttggatatggcgtgggacgatgacggtaatttgatctgggcgctgattgtcgaagtggcgcgcgatgatcaagatccttttacctcatctggccaggaatatcagcgttatcgtctatggacacgtaacgagtggtttctattccgggaagaggttaagaaaggcgccgggaatgccggtcgtcggaccgcaaaagttgtgcttgaagataaaggcgaacacaaacttggcgttgtacctgtgtttcctgttgattgcataggggagagcgaatcgccgtattttagcccgtcgcttattgatgatatcgcctaccttgaccgtgcagtagccaactatctgtcgaaccttgacgccattattcaggatcagacgttcagccagctggccattcctgttcagtcgctcctgccaggcgatgagaatcacgcaaaggtaatggaaatggggacaaaacgcgtcttcacctatgactcggaaagtggcaaccagcctttttatttgtcgccagaccctaagcaagctcagatgatcatcaccactatccagaccgtgattaatgagatctaccactccgttggggtcgctggcgagcgaacaaagcaggataacgctaaggggatcgataattcatccggggccgccaagttatatgactttcagcgggttaatagtctgcttattactaaagccgagcgtcttgagcgggctgaacgccagatgatgtttttggcggcgaagtggatgggggtcgatctcgatgaggagcattcgctgattgcctatccggagagctttgatatccgcggtctgacggatgaatttgccgttgccgagaaacttgggctgctggaagcaccggattctgtgcgtcgatatcagatggaaatgctcattgagaaaatcttcccgaatatttcggccgcgatgcagaaagaatttgagaaagatctcttgaattttccgccaaaaaatgctcttaacacccttgaaaataagtcagtacttacttatcatcgtgatacagtccaagagagcggacaagatctatcccaagggaatgggaactcatcaactcaagcaaccgagtgataagtaattaaaaggaatttttatgaatctgtggcaaatgctaatggcccgtcgtggcctcatggatgtcgccgaatcacatgaacgtggtggcgcaggtgctggagctcccactggtgcagaagagcagggcacccaggaatctggtaagcagaacggcgagcagaaagatcagccgaaaatcgaagacgatgaattcggagggatgactcaggaagagttgctcgctgaattgcgtaagtccaagaaagccggtgctgacctgctgaaagagaacatgaaacgcaaggaaaaagagcgtgccatggccgatcagctggctcagtacggtgatatcgatccggtacgagcacgccagcttcttgaagctgagcaagccgcagaaaacgcacgccgtgaggcggagcaagctgaactggaacgccgtggtgaattcgatgctgtgaaaaagcaaatgatcgaagctcaccaggctgagatggctcaacgtgatgaacgtttttccgctctggagagcgaaaacgccgcacttaaagcccagctggttgaaatgaccgtcggcgcttccttttctggctccaatttcctgcgtgaaaaagttctgatgactccggctaaggcccgcgttatctacggctctcatttcgaagtgggtgaagacggtaacgtcgttggctatgacaagccggcaggtcagaaagagcgtgctgttctggttgacggcgaaggtaagccgttaccgttcgaatccgcgattgagcgtattttacgtgcagatccggaagctgacgctttattgcgcagcgaagctaagcagggtgctggttcaattagtaaaccgacccacaaagtaacccagccgaagaacaagtcgacaatggataagttgactgccggtttagggaaaatcggaatcaagtaacatcttaaatcatagggaaatgaaagatgccattactgcgtgaagaagctgaaaagctgtctaataacgagcttgaacagggcgtgatcgagaccattatcgatcgtgacgacctgtttgccgtcctgcctttcatgaagatcaattcgaaggcatatctttataaccgcgaaaaaaccctgagcgaagctactttcattgatgtgaacgacaccatcaccgaaggtgcagcaaccttcgaagagaaagttgcgaagctgcgcattctggctggcgacgttgacgtcgacaaattcctggctaccactatggctgataccaacaaccagctggctatccaggttcgtcagaaagtcaaaggtctggctcgtgccttccgtcgcaatctgattgttggcgactccaccactaacaacaaagccttcgacggtattccgaagctgatgcatgacgatcagaagatcgacatctccggcgcctccatgactttctccatgttcgacgaactggtcgacgcagttaaagatctgggcgcagactgcatcatgatgcgttctgagcatcttcgcgcatatcgtgcgctgctgcgaactgtaaacgtaggcccgtccgaaatcatgatggaaaacttcggtcgaccaatgttgtgccataacggcgttccgtttatcgtaaacgacttcattccggttgcggactccaccaaagcggatatctactgtctgaacctttctgaagaaaacggtgtaactggtctgtatggtggtgaaaacgccggtatcgttgtggaaaacatcggtactgttcagaacaaagacgcagttcgtactcgtgtgaagtggtactgctctctggccaataagcacgacaaagctatcgcggcgctgactaacgtcaaaatttaatcctaataataggtaagtacttacctattatttttaaatgggtgggctatacgcccgccctttttataggagcgatatatgtcagaaaaaaaagtgaagatcactgaaaaggccttcaccgactttacgggggttatgttccgtacttctttcactaaatcggtgtccgatcatccagtaaacgagcgcatgcagaaccgtatcaccgcagctatgcgagcggttccgatggagcccactgtcgctgttactggtgtgtcggtaagtcctaagtcggcatcggtggaggtgaaaaaaacggttcaactcacggctaccgtggcgcctgctggtgctaccaacaagaaagttacctgggcgtcgaaaaatgctgaatttgcaacggttgacgcggctactggtctcgtgaccggcgttgcagaagggactgcaacaattgaagtcacgaccgcagacggcagccataaagcaaccgcaactattcaagttccagcagctgcagcctgattcagtaacaaagggtggctctggccaccctgttcagaggaaaactcatgaaaccagcaaaaattcatcttctggaacctcagttccttggatacacgggcatcctgtgcggcgtttactttaaagacggcatttccgtagcagagctgccattcctcgatcaacagcggatctgcgcctcaatgcgtgccgaaacgattgatgggcaaaatgtctctccatcagctgccttcagcaatcgtaacgagctggtggccgatcagattgtggagcctacggcccctgatattgtccctatgaaacgtggcgtcgcgaatgaggagacaaaacatgtgcagcgcttcacccgagaagaactggagtccattgctgactgtgaaggtatcgccggcctgcgccagatcggtaacacgcttggcgtgaaagcgaagggcattgttgaaatgattgagggcatcctgaaagcacaaggcggtgagtgatggctctgatcgacacgtttcgtagcggagacatcgtgtctctgaccttcgcctttaacgtactggatatcgactccgcctcttatacggtgcgagatagtgcaggcacaacacttgtggacgaagagcctctcgatattgcagaaggccaaatgtctataccggttgtaatctcagcagagcataaccagctggtcgaaaaagagcgtgatctgcgctacgtcatcgtgaaggccacagcgggtgggctaacccacgaagagcggcagatgtatgtgctgcttaatagctttgaactatccgtcccggctcagtcgtttgccaccgtagccgatgctcaaatgcaggccattgatatgatcaatggagatacattgctggctgatggagagggtttgatgcgcaagcggctaatcgaagcgacacggcgaattaaaaccttacctttctctatccggaggatcatgcgcatcgatttcgaccggtatgaccgtccccaaaacatgctgaatgtctatgacatcccctggggggctgacggcgtgtatcggcaagatttggtggactgggaacggatcacttcggagcagtttgcggatttaccagactactttaaagaggcgctgcttctggccaccgttaatgaggcatgcgagatcgccaatggcaacgatattgcgagtgcgcgagaagacggcattttgtctgaatcgatcggtgaaacaaccaatatgtaccgcacaagcaaagtggcgaatgtccgtgtggcccgcagcacctggcgattgcttattagttacatcaacaatcggatgattgttcgtcgtgcgtaatacacgtcgtgctctttacttctggtcgacaggccaaagacgggaaaccgcgcctccgcctggtaatgagtgcgacgacttcacacaaggagagtggatgaatatttcgtggcaagccgaattgtcgatctaccggtttggttccaaaaacgtctacggtgaagcgcaattgcagttcgtcaggaagacgaaagtaggcgtcgttaaatttgaacagagcaatgaaaaatcgtccgtcagggcagatagctctggaagccgcggaaaggcagcgctggagttgtttgacgcagtacttattgttccacttgaagccgctgttcaactcgatgacgttcttgtgctggaggggcagaagctgaaggtctcaagcgtacatcggcgatggggactacgtggccgccctgggcatcttgagctgggggcgaatatatgggtttgaaatatgacgcacaccagtttaagcgtgccggcgccagacttaataacagccagaaagcgttcaagcgatacctaatcagggacatggaaaagctggcgcgtctggttgaacgactggcacgagccatggccccgcttgaaaccgggtcgctggagagcgccatttttgcgcgggttgtaaaagaaggatacgcgggacttcgtattgagctttccgtatcaggcgcaaagcagcgcgaaggacatccaggcgttgaggttggggactatgccaaatacatggagcttggtaagtaccgtcttggttatttgtctcgtatgaagaatgttaccaaccctcctgtcgccggcgtgaagcctaaagtgggcccatatttccttgagcgagcgactcagatcagcgaaaagcaattttcgcagacgatcattgaagctgccagaaaagcaggatttacgcgagattgacatgtttgtagaagcattcgcaaaattgatacaaaaaaaggggcttggaaaagtagggacggacattttctgtcactatatgccatcaaaagttaagtctggcatcttgctgattaatcccaatacaggcatagccatcgacccggatttgcagggtttttacttcgactcattcacgatagtagttcgcaatgcgagtattacaaaatctgttgaaatggccaacaaaatcatggatatccttcctgttagcaacgttgagtctgaccgggtattcttcaaaatggttaggccgatggcgatgccaataacgtatccaataaatgacggatcgcttattgaaacggggattccacttgaatttgccgggtactttattgaactgaataaataagtaagtatatacttactattgtgtgtcggaatgacactgttttaacggaaaaaggagttttccaataatgtccaatacccatgttaaaaacatcaagcttggcgcctgcaaggtgtcgtttggtggcgtggatctgggttacaccaaaggcggtgttcaggttgaaatcgcaaccgaaacgctgaaagtgaccgtagaccagctgggccagaccacgatctccgagctgatccaaggccgcaacatcaccattactgcgccgctggctgaatccgtgttgaaaaacatggtcgatctgatgccaggttcaacgctgagttctggcgaagataccgtaactatcacgtctgcgcagggtgtgaacctgatcgacgttgcaaaagagttggtgctgaccccgcaggatgcgacggattatgttctgaccatccctaaagcagcaaccgcgggtaacttcaccatgacctaccagtctgacgacgttcgcgtgttctcagttgagttttccgcttacccggacgacgctggcgtgttggggaaaatgagcctcccaaagccggttgagagcgtcacgctgaccccgtcttcaccgaccgtaaaagtgggagctaaagttcagttgagcgcaacctttaccccggccgatgcaaccaataagactggcatgtggagctctgatgcgactgataaagcgaccgtagatcagaacggactggtaactggtaaagctgtcggttcagccaatatcaccttcacaactaatgacggcgccaagaaggcgaccaaagccgtctctgtaactgccgcaagctaaattgtgataacccaagaggcccatggatgggcctctgtatgagtttaaaaggatttaaaccatgaccaaattactcgatctcgactccattctgccgccgaaaaaaagcatcaaatttggtggcaaagaatatcccatcgttgaaatgaccgtcggcctctttgtttctatcaagcagatggaagacaaagacctcatgaatatgtctcccgtcgaccaggtaactgcctacgcagaactggtacgcaaagtcattccgtcagtacctgactccgttctggagaaactgactgtccagcaactccagcagatcttcaccttcgccatggaagtgattgatgaagagaacgaaaaagcggctggcgaaggggcaaagtaatatcccgcgatgaatccggggtaaagaccgtttcgatagatctcggattctatttcagtcgtgtagttgctcactacgccgtatcgccaatagagctactgagtgtcccgttaaccatgttctggatgctcagccgcaatatcgatcgtctgcgagcggaagaggatgtccgcaatctgcaggtcgcccgcgtcgcccaagcggatggcgatggcgttaaggcgttcatggagggtttgcaactcaggattggaaggccagtcgttactgataaagtctaccgtccgcatatggataaggcagaccccgacgccaaagagcagctgatgcaaatttttggcagaggatgacaagggaatgtcacaaaacgtagagtttatcctgtcgctggaagacaaacagtttacggcgtcaatcgaccgggcgggtaaattacttaccaaatttggcgagcgggctaccaaaccggctcaaaaaattaaaaacctcgagcgctctctgggttcggtctccagcattcttggcgctcttgaaacacgactcaattctacggcagacaaactgcaggacgtagctgccggttttgagctcgtttccaacacctctcgaaaggcacaacgtgaactgtccgctatcagcactgatttgcggacattcacagatcgcgttgattcggccacatcgtctacgcacaagttcctggcctcattgcggaaggttcagtcggaactcaatgagttttctgattgggtcaaatacgcaggagaccatgccggcaaattcaacactgagattaagggagccactacttctcttggtggaatgaacaccagactaaatgcgaccagcaagcgtctgagcaattgggggacaacgacaagccaggcggccgaggggttaaaaaaagtcaaagatcagatggatggcgttattcgaagccagcagctgatcagccgccctgtcagggtcagaacaaccacaacgggtgggggaggcagcggaggtggcgctgatcgatttaccgctgcgccccatcgcggtggcagtcgtgaaaatagcgtcttctctgggttacgcggcaatatttttcttctgggggaaattggcgatgcggccagaacggttactgacatcctgtttggttggcagaagccgatcgtagaggctgcggccgagatgcagcgtatgcgtgtcatgttgcgtggcttgaacaaggataaagtcaatcctggagaagccgctgctcaagatatgcagtatatcgtgaacatggcgaaaaacgccccatttgcgatgcaggccttaaccgactcatttgtgaaattccgttctgctgggctcgatcctactgatggctcgttaaaggcactggtggactcagtcgcacgttttggtggcgatagtgaattgcttaagcgagcggcggtggctgtccaacaaatgtctggtaagggcgtcgtgtcgatggaagagctccgccagcaattgggtgaagcggttccaaatgcgatgaaggcgatggcagatgcggccggtatcacgatgggggagctaaccaaagccgtctccagtgggaccgttgaagcgaaacaggctctttcgttgatgtttgttggtttgcgtgcggaaaacgaaaatgccgccaaagatatgatgcaaacctataccggtgcgttggcgcagctgcaaacctctttcactctgtttgctgatcgagtggggcaggctggataccttgactcgctgaccaaggggatgaaagagctggcggccataatgaacagcgcagaaggcatttcgttcgctaattcattgggagaggggcttaccaccgcgattgatggcctgcgcgagctggcgcaatggttggctaagaatcaggagttggttattacgctgggcaaaattgtcgccggattggtggcatttaaaatgctcagagcgggcattttaggtgttgtcggcgccggcggccagatgctttccaccttcatgaagatgtccactgtaatccagacaccattcacgctgggggcgacggcggtcactcgtttcaatcgtgctgcacgcatggggctggcaccaatcccatcgctcatttttgccattcgtggcgcgattacggggctgaaaggggcatttgctgggctgactgcgtttatcgcagcaaacccgattggtgctgcgtttactgttgcaacagtggctgttgccgggctgatcacctacatgaccatgcttcgcaacgaaacgtccaaagttgttgaggagattcgcaaaatccccgaagcgatgacggcagccaagcgagcacaaatggcggagcgcgcatcgcagctagagaagcaaattcagcgggaccagcaagcgcttaaaactggcgaaagtgttaactacatttccactgtcgccggccctgtcgccgttaaggagtctaaagaggttgttgaggctcgactgaagaaaaatcaggaagagtacaagagaaccactgacactatcgcgctgggggatggcgctgtatccaaacgtctggcgaaagaggctgctgaatcccagatcgagaaaatccgggcggataatcagctcttctcagctacgtttgttaaagcgcgtcaggaggcactggacaaaatccagaagatcaatgacgacaaaacattgtccgatgatgagaagaacaagctgcttgcaccgctgcgagagacagtaaacaaatcttatctgcagccggcccagaaacttgtcgactctttatcatcgcgtaagaccgcaactgaaaagcagatcgcacattttagcgatttgctggaaaaggcgaaaaaagaaggaaacacagaacaggtacagaagctgcagggcagtattcgcggctatcaggaacacctggagacgattgctcaggaactgacacaggctgagtttgaacgcgataacgcggcgaaaaccgggaagggcgtgaagaccaaccaaggaacagtgcttgggttgggcaccagcgacaaaggcgctgacaaagcgctcgcgcagtacatgcgcaaccagatggactctgcggtttaccagcgaacgctacctgatggcacaccaatgatggattttgaaggaaaacctatcattgggccgaagcagcttaaaactcagcttaacctgcagaaagcctcaactgcatcttctctggaaaagatgagcgagaaggagcgtgcagccgccatagccgcattaaccaaagctcgtgaacaagatgccgctgctgccgagagggcagggaagcgtactgcgaatgcctctgaacgcgcagcgaaaagggaggaaagagcgcaacagaagctggctgccggctaccagaaggctctggataaagctgatcagctcatggggcaaatgggcgaaagttcaaaggctactgtgtcgtttgatcagtcgctgcgtgatgtcaccaagtcactaaccgatcttgcaaacgccacgcctaacgagtttatctcgcaggagatggttgaccaggccaaaaaacgtctcgcggatttgaggaacgctacccccgaataccgcgaaatgtttaatcgccgcaacgtcgagcaaatgatcagcgcttgggcgccggaatcggattcgattatcagcgcaggcttgatgcaaagccatgaggagaaggctgccgagttttcggatacctacaatcgcaatcttaaggcgctgatcgagctgcgtgataaggcgactgacccgaaaatcatctcgctttacaacaagcagcttaatcagctggtggccgctggcaacaatgcgctgattaagcaaacaggtacagcgacccagcagttggctctggagtatgagaacctggctgaacagattgagggcacatggacagatctgtttagcggcttaactgacacgcttactgactttgttgttaacgggaagatgagcttctccagtctggccacatcgatccttaaagacatcaccaacatggtcgtgaagacccagatcactctgcctctcatgaatatgttgggaatgggaacgacaaacgccggcaatgcacaaagtggaaatctcatgaatggcgtagcgtctgcgatcgctaatcaaggggttcagctcggtaattctggtggggcggtggccaatggggataaatctgtcggcgaggccactaaggagacagcctccggcgtgaactctatggggcaagcgtctcagaatgcggccagcggtttaagccaggcggtgaatggtgtctgggactggacgaagtcattgttcaccggtactgacgctacgaaagatcaaaccaaagcggttaacagcagcatcctcagtatggggaatctgtctaccgcggcgggggcactggcagcaacattcgccatggtaggtgcttcgtcgtcgagttcgtccagccgttggctgaatttcggtctgtcactggccagtaccgcagtgtccgcttgggctgggtcttcgacgccatcaggctcaaagccaaatgtgaagaagcacgccaatggcggcatctttggcagggaaggggttgtgcctctgagagcttatcagaaaggcggaattgccacctcaccacagttggcgatgtttggcgagggctcaatgaacgaggcttacgttccgttgccagatggtcgaacaattccagtcacactttctgcagagtcggctggaaagagcacgggtaacgcggtgtcccctgtctcaattcagatcaatgtgaccaaggatggacgaaccagcgagagcagcagtggaagcgagagcaatctctggaacggtgcagcgcggcaaattaagtcgattgtgcttgagacgattgccgaagagaaacgttctggtggttcacttaatccgcataccaccagagggtagtaaagccggccgccttagcgggcggccatcacaaggaagtgatatgtcgaggaaagtatttaattggtatccagattatgagtctgagaaaacggtaaagcctaacgtgaccgtgctgaactacggcgatgattacgagcagcgccagtcgcaggggctcaatcggattaaagaagagtggtctctcacgttcacccgtagccatgacgtggtaaacgacgttgatgactttttgactgcccgcgcaggggtggagtcattcgtttggactaacccaagaggcaaagcaattatcgtggtatgtgatagccatacggtaaagcgttacccaggttatcaagtgcttacggcaacatttagacaggtttttgagtcttaatttgcgactatagataagtaagtacttatctattattatatatcaacgtcacaggatgtaacgttgagtttttcaaggatgaagtgatgggtattagagctgatattcagagtttatcgccttctgcgctcattgagttgttcgagctggatatgtcggtgacaacctccggcggcaagttgtatttccatgccggcaccaacgggcttagccagccaattgtctggcagggagtttcctatgagccgtggccaattaaagcgtctggctttgataaaagcggtcagggaacacttcctcgtccaaagattcaggtttccaactacgacggtgtaatttctgccgagctgcaggccaatgacgatctgattggctgcaaaatcattcgcaagatgacgctggcacgttttctggacgcggtgaactttcctgatggaaacccgaccgcagacccaagtcagcattttgctgatgaaatgtggttcgtcgaacagaagaccctggagacgcaccagtatgtcgaattcgagctgtccagcgtcttagatctgatgggcgttcaactgccgtatcgtcagatcatcaaaaacagctgcccgtggaaatatcgcggaacagagtgtggctacaccggcccatatttcgacaaaaacaaccagcaaacctctttggccggcgccgactactgcaccaagcgttacgacgcctgtaatgctcgtcgcaactacttcgcgaatggcgttattcattttggcggatttattggggcgacacgatatgagtaaccagacgttacctgagctgggctcagaagtcatgcaggatatctatcgctgcgctatccaacgttacccgaatgaagcgtgtggctttctggtacgcacacagggtgagaaatatcgctttatggaagcgatgaatgtctctgaaacgccacgtgaggattttgtcatgcgtgccagcgacattattgcggccgaagatgctggggaagtgatcgctatttggcactctcacgttgagcgcagcgcagaggcgtcagacccggatcgctccgggtgcgaggcgacggaactaccgtggatgattctggcaattcgcaaaaatgtggaaagcgatatgccattccaccttagcgaaatgaacgtcatttatccgtgtggttttgagatgccctacctcgggcgcccatacgtattcggtgtgtttgattgctggatgctgtgccgcgattacctaaagcgtgaatttgacgttgagctgaatgcaaacgcccacctgcatattccttcctggtacacgggggacaacgacatcctcgaccagaactaccgaaatgaaggacttgtccgcatggcgccggggacggaaccccagcgcggcgacatcttcttcatccagtacgggaaaatgccagatcactgcgcggtatacatcggcgacggcatgatcatgcatcaccagatcgaccgtctcagctgtcgggcttattacggtgggatgtatcagaagcacacgacgcatcacctgcgtcacagggatttactcaagggagacgagacgtgtctgaattagttcatgttcagctcggcggtgcgatggcaaagaactttggccgccactggaaattgaaggtgcgcaacaccaaacaagccatcgatttgattgaggcgaatcgcccgggctttaaagcctggattaagcgtaaccgtaaccacttcgataagtaccacatccaggtcacaaataagcagggccacaagtggtcaatggacgacaccgaataccagatgatgggcgagtcggaaaatatcgcaaaaatccgcattactcccgtaccacgtggcagcggtggtaaggcgtttgggtggttccagactttcgtgggcgccgcgatgatcgctgtcggcgctctggcctctgggctgacttttggtgcgtcttccgcgctggtaatgggagggatgtcattgatgatgggcggtgtgtccatgctgatttcgccgcaggcatcaaatgcgtctgtcagacaggcggataacacggattcgttttacttcgatgggcctcaaaacaccagcaaccagggaaacccggttcagcttaattacggcgaggaaattttagttggctcacagattgtgagttcttcaatcaccatagaccaactgtaagggaagttttttgaacatggatcagttcaagaaaaagagattgcccctcctgattgcgggagcgggcggcaaaaagagctcaggctcaagccgtacaccagttgaagcggatgataccgttaattctcgcaccatggcgtctatcctcgatctgctcggggaaggtgttgttggtgggttgattgacggtgctaaatctatcttcgtcgatggtgtggcgctacagaacgaagacggttcattcaaccgttccggtgtaacttgggatttccgggatggttcgcaagaccaaagcccgatgcctggtttcgattttgtcgaaacgccaaaggccgttaatacacagctgaaaaccacaaacgcggttacggttgccatcgataacgacgatgctgatcgtgtccgagtgatcatgaagttcccgtcgctgcgtagcattgacaagaaaacaggggacacaaacggtacttcggtccagtttaagttccagctggccaacggcaatggctctttctatgacgtgattgctgcaggtgagagcagctctgacgtgacgctgactgcgaaaaagactggtgtctactaccgcagttacgaaatccagcttccaaagcctgggcgtgcctataaagtgcgcgtgcttcgtctctccgccgacagcaacgatcagtatctctttaacgatacctgggtcgactctatcggtgagatcgttgacaccccaatgaactacccgaactccgttctggttggccttaaggttaactctgagcagtttggtagctctatgccgtcacgttcgtatcttatccgtggcctcaaaatccgtgtgccttcgaattatgatgaaaacacgaacacttataacggcgtttgggatggaacctttaagcttctgtcgtcttccaaccctgcatggattctgttcgatctgctgaccaatgctcgttatggcctcggcaaatttgtttcggagtcaatgattgaccttggccagctttatcagatcggtcgctactgcgacgaagaggttgatgatggctttggtggcaaagaaaaacgctttgcaatcaacacccagatcaccagtcgtcaggacgcttatcgtctgattcaggatattgccggcgctttccgtggcatggttttctgggctggtggcatggtgaatatcatgcaggacagcccgtctgaccctgtcatgctgtttaccaacgcaaacgtaaaagatggcctgtttacctataaaggctctgctcgaaaagaccggccgtccgttgcgctgattacctataacaacaaacaagacggctataagcagaacgttgagtatgttgaagatcaggaagcgatggcccgatacggggagcgcaagaccgaggccgttgcgttcggatgcaccagccgtggtcaggctcatcgtgtaggtttgtggctgctctataccgcgcgtatggagtcagacatgatcacctttaccgcgggcctggacgcctcgttcctgatgccgggcgaaaccgttctgatccagaacaaatatcgtgccggcaaacgcaattccggtcgcatcgtctctttcaccaaaaacagcatcaccctcgatgcacctgtctctctgaaaaagagcggtagcttcatccgtatcatcaatcaggaaggcaaaatcgttgagcgagacatcaacgagaccggcgacaacatcactaaagttaccttcaagacggcgttggccacagccgatcaaccagtagcgaatggtgtctggacgatcaccgaaccagacctggttccaatgcgggcgcgcgttgtcgctatcgcgcaaggtgaaaccccggggtcgtttgatatcacggtggtgcagaacaatgcatctaagtaccaggcgattgataacggggcagcgctcgttccagaaaatacgacggttcttgatcccacatattccaaaccgagcaatctggtcatctcagaaggcacttatctgtccagtccgggcaacttgtccgtgaagctgatgcttgcctgggaaggtaaatcaccagaatactgggtcagctggcgccgctccgacgagggcaacgtctccaactggcaatctgcccgcgccacggaagaacaatatgaaatcgtcaatgttgccgaaaatgggcgatatgacttccagctgtattccgtttccttcggcggcaaaaaatccgagatcattactgctgtctatcaggtaaaaggcacgatgacgccgccaggggcgcccacatcactgaccgcggtgggggattatcgtaacgtggtattgaattgggttaaccctgattcagtcgacctcgcgcagatcaacgtgtatgcgtccaagacaaataagctggacaccgcgacactcattgctcaggccgccacaacgactttcactcacgctgggctgggtgacaacgagacctggtattactggattcgtgcggtaaacaaacgtgggatggtaggccagccgaactcgaacctcggtacagaggccaccactcgcgacgtattgtctttcctgaaagataagatcacatcttctgaactcggcaaggagctgctcgacgaaatcgacagcaaagccactcaggaggcggtagacaacgccattggcgaggttcagaactcagtcaacgagtctatccagcaagttgaaaacgatctggcgcaaacctcctccgaaattaaggcgcaggttgactctgtcaatcagtcgctgaaagaggacataaagaccgtcaatcagacgattgttgacaacatcgataccgtcaaccagacgatcaataccaacatctccaacgtaaacagccaaattgaagctgcaaaacagtctattaaagacggcgacgcggctctgtcgcaggagattaagaatgcgcagtcatcactgacaacgtcgctgtcccagaccagcaaagatctgactgcggccattcagaaagagacgaatgaccgtattgcagatgttaatgatgcagccaagcaagcggccgaccaactgctgagcgcgaagaatgagctgaaaacctctatcgatagcttgtctgaggttgtgacctccggtgacgaaaacctcgcgcgacagatctcgcagattgccgctggcacaggggaacagtttgactctctgaaaatctggtatttcgaccaggacgctgaaggctggacggaagatgataatggctacacgccaatgagcgtcaccagcgatggctggctgaaagcgaacaatccgacctcaacctgtcgttcccctaacggcttgacgatcgatgcccatgcttatcgtttcattaagatgcgtattaaaaaggttggcaacccaacctggaacgccaaaatgttctggatcggcgctgatgaaaccggctggaatgctggtcgctccgtggttatcaatgaaccggaatacgatgacaagggtattgcgattctgaccctgcacgacattgagtggcgagattcgacaacgattcgtcgtttccgcttcgatttcacttcaggtcaggatgcggacaattacctgttattcgactggatcgctgtcggtcgaccgacgccgggcgcaggcatggccgcgttacaggaagagcagcaggctcgtgcgaatgcggattccgccgaagcgcaggcgcgcagcacattggctgcacaaatccgcggttcctctgaaagcggaaatctggacgacattcgctccggtctgatctatcaggagaaaaatgctcgtatcaccgccgatgttgcggaagcgagtgcgcgtgaatccttgcagactgaattcaacagaaacaaagcctctgttgcagaagagctgcatacgctgtccactgaacaagcttcccaggcaagcaagattaccgggttgcaaacaagccttggccagaaggccgatgccagtgcggtacagacaatttcccagaaggtcgaagagcagggcaacacccttaaatcacaaggggcggcattgtctacgctggataatcgcgtaggaagtgttgagtctggtgtatctgcgaacagcaaggcgatcacgggtctgcagtcgaccgtaacacagcaggataaaacccttagcagccagagtgaaagcatcaccaccctgaataactcgctgagcgatatccagagcgataccgatactgccaaaagcaacccgagcaatttgctggttaacgcctcctttgagcgtgacctggcagggtggtctgcagggaacagcgtatccagtattatcaaggcgagtgcgccccattctggtagcaaaattcttgtttgcgccgccggaacggtgcaaatcacgcaatctgtaagcgtcgtcgaaggacggacatacaagctgtcctcttttgtgcggtgcaccactgatgcggtgatcagcagccctggcaacaacaaactgcgtattggcgcggccacgttgctcaaagagattccgatccgtccggagaatctgcccaaagatgaaacatggaaagaggtctctgatacctggaaggcgacgctgaccggtaaagttgacgtatcgatcatgtcttctctcaaaaccggttctcagtacttcgatgatgttggttttgttgacgtcactgatgctctggcgattgaggcgaacgccagtgccaccaatgctttgacctctcgggtatcgtctgttgagggcaccatcacaagtcaggggcaacagatcacttcgatgcagaacagcatcaagaacaaagctgacgcctcagctgtgactaatctgacaaaccgcgtaactgctgccgaaaatcagatctccagccagtcccagagcatcaccagcctgtcaaactcgctggataacgccaatgctgatgcggatgcttcgaaagcgatcatcggcaacatgctcaaaaacaactcttttgaacgtggtttcgaaggttgggagtatgttggttggactctgctggaggcccaaaaccccaaatcggggaaatacatcatccaggcgggcaaactggcctctggcggtgactcgggctgcaaccaaacgatcgagctgcaggctggcaagacttatcgtatcggcgcatgggttcgcaaatccgctgacttcaccatcaataatgccggcaacaacaagattagtcttcgaaacgcagatctgacgccgttaaaggatatcccgatcactggcgccgggctgtcgactaactgggcgcttattagtggcgagtatacgccagccaaaaccgcgagcgtggttgtgtctctgcgcgcaagtgtcgcttccggctatatgtatctcgatgacgtcttctgcgttgacgtgagcaatgagaaggcgattgatgcgacgtccaatgcgttatcaaccctcaacagtaccgtgacccagcagggaaaagacattacgtcgaactccaacagcatcacttcgctgtcaaaccagatggttaacggccgccagaacatgtgggtgcgtagcgtatacaacgtacaactggcgaacaatgccaccgagccgacctttagcgatatcaacggtaaggcgccaatctcgatcgatgaggttcctgacgcggcaaaactggactttgcgagcgccggcagttacgtgatcgcgcattacaaagccttcgtgaaagtcaatgctgataccaccatcactatggcaccagggtctcgtgtttttgatgatacgggcgccgtgtacgtgaacggtgttagggttgcctttggtaatgcgagctggaatacggttagctttgatctgaaagctggctggagcacggttgagttcctggtgaaccaatggactggtcaggcttacattaacctcggttttaaactgtccgagaaggtagcccagctgaattctgctcttgggatgaacgcgctttcgaatgccattagcgccgtcacctcaaacgtcagcaccgtaggtgatcgcgtcacgagcacctcacagagcgttactgacctgcgaaatagcctcgaacagaccaacgctaatctggcgaataaggcagatgcacaggcgctgtctacgctgcaaaatacggtctccaagcagggggatacgatttccagccagggtaacagcatcacgaacctgaataacaccctgaccgctgccagaaacgccggtgacaacctgatcccgaactacgatttcctgcagggtgcaactgcgtgggatatccagtatccggcgggcgttactttcggcaactttggtgatggtaaggctggggttaagctgaaccggacgaccactaccagcccaggcatcttctccaacaacaacaagccgctgccgcttaatggtcagcgcaaatatcgtgttgtggttaaagccaagggcgtgtccggggcgatgaacatgttgatccggcgccagaataaaatcggccagaccgacagcaattatgaagataaaaacgtcacactaaccagtgagtggcagaccattacctgggagactggacttactgcctctaacgctgatggccagaactttaagctttacgcgcacccggctaatgccgaaatctgggttgatacctttaaggtctttgatatcacggatgaggtgaagatcaaggctaatagcgatgcgctgtctacgttgtcgagcacggtgacgcagcagggtgacaagatcaccagtcagggcaacagcatcactaagttgaccaatgacctcgaagccgctgacgcaaacatcgcgaaaaaggccgaacagtcggcagtcactacgctgacaggtcgggtagagaagacggagtccggtctgacggcggcgaacagcaacattacgtcgctcaacagctctctgaaccagcaatccaaacgcggcgctaatctgcttcctgatggcacttttgaaagctacgcggttggccacaatctatcaaataatcgcgttatcgtgaccactgatgactcgcatggcggtaataagtgcatccgtgtgacgcgtccgaatgattacaacgctaacgcaactgataacagcgataatcacattttcagcggtttccaggtacgcgataacgcagtcttctatatggaatgctgggttaagcgggatgccaagagtaccgctatggccgagaatgcacagatctccattggcttatcgctccagtatcaggacaactcctggcagtggccggcagttaccaaagcggcaaaggatctctcttcaactcaatggacgaaggtttctggttacctgaaatcaacgaagagcggtattaagcaggcaatggtcaggatttctattcctaacgttagcagcgttaaggcgggtaactcattcctcattgatgacctggtcattaccgaagtgactgatgcctacaatgcgcaaagtacagcagacgctaatgccaatgcgatttcgacactggactcgaccgtctcccaacagggtgaccagattaccagtcagggtaacagcatcaccaaactgacaaatgacctggcaacgaccaataacaacgtcagtaaaaaagctgatcagagcgctttaagcgtgttgtccgggcgcgtcgatcaaacagaatcgggcttatcctctgcgaatagcagtatcactgcgcttaattcatctgtacgcgcagggaatgcgacaagtggcgatttgattagcaacccgacatttgacccagagtttagtcagatgggcttcactgtggtttccagctcgtctgagggcgtgccagccaattgcccatacgcttatgttgcacgcattgcggctcgcgaccatcacccaaattttgctgctattccggcgacattgggggatgtctatgaaatgtctgctctcgtcgcgtgtggcactggctccgctgatttcaacctgtatctcggaaccgcaacacggccaagcggcagcgtgggcgcgcctctgtcatctggcggcaaccgcaaggcgtcggccacatggcagcgagtaacctggcgtttcaaaattactcaggggattgtcgatcgcggcttcttccgtccattcctgcaaatcaaccagtccagcccgttcggcaccgtctggtatgtgaccgactggcatctgcggaacgtaaccgactcctccaaagttcaggattctctcgatgctacggcgaaagcggttgattcgctgacctctacggtaaatcagcagggggagaacatctccagcattggtacacgtactaccaatcttgagaataatttgagaacaacaaatgcaaacgttgctcaaaaagcggacgccaatgctctgacggcactgaccaaccgtgttacccagaccgaaaaagacattaactcaacgagttcttctgtcacgaatctgaacaataaggttgatgcgatttctgtcggcggtacaaacctgatcaagaactccggcgatatgaccggctggtcgaacgttgtcagcgatacgtatcgtggtaatgcggtaattggcgcaactgtaaaagccggctccggttacaaggatctgcgggaaatcacgcttgagtcgccggtcgatgcaggtgagtacgtttacagcttctatgcgaaaggcggcgttactggccagacgatgacggcgttcttctacaatccgaacaccacaacgtctatcgagaccaaccagggtgcgaaaggtagcaacagtgatggccgtgcgcagttcacgctgaccacttcatgggcccgctattgggttaagtggaaacagacacctaccacgggcaccaagcgcctgattctgtgccgtatcgagagcaatacctccaaagaccagacggtgtacatcaacagtccgaagtttgaggtaggtaacgttgtttccgactggaacgagtctccgtctgatagcgccagtgcgtcggctgtggattcgctgacaacgaaagtgaatcagcaaggcacttccattagctctatcggaaatcgcaccacatcgctggaaaacgggctatcgacagctcaaaacaacattgccaagaaggctgatgcttctgcattgcaggatctccggaacacggtgacatctcagggtgacgatttaaccgcggcgaacagcagcattaccagcctgcaggcctcgatgaaccgtcgcactgtgtttactgtcactgcacggggtaatggcaacagcgttacccatggggtgtttgatgaaagcggcaagaatctgtttacccctggtcgcagctgggcgctggtcacttttgcaaaacacagcgacggatcaacggtgattgcgacctccaaaacatacgatgtttttggcagtgcgaataatggtgccacgatgtcggctgatatcgaggcgttggccagtggcacttacgtttgcgtcctgacattcgatgagccatctggcaaccgaggtaagatattgtctgctctggaatctcttggtggtacatccgaagtcgtcaactccttgccgtatcgtggtgcctacattctccttggccgcaaaggcatgaagcctggcgatggtctggaactgcgtgcgccaaccggtggcgacggcaccgcccacatttcgacctcagtcgagtttgtgaacggggtaatgatgggactgggcgccgccggcggtgtgatgatgaaggctgatgcgaacgcatctgcaattacaacgctccagaacacagtgaagaaccagggagataatattgactccctgagctcctcgacaacggcgctggaaaacagccttgcgtccagtaacgccagcgtggatgcagcaagccagatccccgggaacctgattgtaaacccgtcttttgagcgtggtacggagggctatacaggctggagcgggattgccacggtggtaacgctgcaggttccacatcttggcaccaaagccgccaaactggcggcgggtggttctgcaggcgtgggccagaagatctccttcaaaaaggatcggtcgtacaaaattggtatctgggcaaagcaggaccctaataccaccattcagtcgactgacaacacaaaattccgtgtggcagaaggtaacggtctaatcgcaagtaaggcttatggcccgtttacttcgaactggcaggaagtgtcctggacctggaaggcgacaaaggatgtcgttgctgacgttcagttcactgctttcttgtccgcaggcgcgatgtactttgatgatttttatgtcgtcgatgtgaccgactctgttgaaactcaggcgaactcgagcgcgatcactaaactcgatagtcgtgtgaccaagacagagaatgacatcaccagtcagggcagccaggttacgcaacttaagaatgaccttgctaccacaaacacaaatgtttcgaagaaagctgatgcggctgcgttaacggcattaacgaaccgcgtcacgcagaacgagaaagaaattgaaacccagagcagccagacaacttcgctcaaaaactctttgagcactgttcaggcgatggggagcaacccgtggtttgatggttctctggagacgtactccgaaaaccagcagatcagcggctcgcgtgcggtcgtcgtcagctctcagaaacgaagcggaacgaagtcgttgcgtgtttcccgcggcgccggtgagggcggaaacagcgataaaaccatcggtaagtggattgctctacgtgaaaatgcggtattccgcattgaactctgggcgatgatgccggcagatcagtcgccatcctctgggtggtcaacgatcgttggtttgcagacccaaaacgctgccaacaacaataactggccgtcggcgatcaccatcactgaaggttcgttggggggcagagggacctggaagaaattcaccggcacgctccgtgtagcgactggtcacactcgcggcgtgttctggatttctacccgcggatcaactggcgccggtacgccggggtatgatctgtatatcgatgatgtagttgtcaccgatatcacggacgcaaaagaggcacaggattcggctaatgcgaacgcatccgctctcaccagccttacctcacgtgttaccaatgtggaagggcaggtaacatcccaagcgtctcagctgtcctctttgacgtcccaggtgaatgatgcgtcttcgaaggttgatcagatggcacagaccattaccaacaacgagaaaacgcagtcgtcgctgaacaccagtttgcaatcgcaaattgacgcgcaggcatcggcaaacatcaaaaaccagacggagttgaataacgccaccacctctctggcggcaattaagtcaactcagcagacccaggccacaacgataagcgcactgtctcagcagcagacgaatttgacagctcaggtaggaggccagtcagccgagcttcaggagctgaagaaaacggttgttgaaaacggcaacgttaacagcacctggatggtcaaaatggaaaccaacagcaacggtaaaaagtatgctgctggtatagctttaggtatcgatggcaaaaatttgcagagccagtttctggttcaggctgatcgcttcggcttaatcaatacctctaacggaaacacgaccacaccatttgttgtggaaaatggcgttgcctacataaatgccgctgtgattaaggatggctccatcaccaatgcaaaaattggcggtgaaatccgatctgacaatttcgttaacggttcaaatggctggagaattggaaaagacggtagttcacagttcaacaacgtagttattcgtggtgaagttcacgcaaatactggtgtgcttaataacgtgactattaacgagaactgcactgtgcttggcactgttcaggccaataaaattgttggtgacgttgtgacaatgaccgaccgtgttgttaaaaactggccagcttccgggaatacctcatccggcacgcgctacctgattgcaacgattgacggtatgccctttgaacggcgtatggtgttcaatggttccgttgcgattgttcaggtatggcgtcagaacgtaacaattcgcgttgatgaaacgaccgtttggacttttgactctggaaacgatggtaaggactttgaaacatcaatcttctcaatccgtatcccggcgtcaaacttcggtcaacgtcaccagattaccattcagtggccgaaccgtggcgatagcggtcagttccggtttacaggggttgtctcgatgtacagaactactggctccatctctctggcttaagtttcaggcggctctttgagagccgctcattaaaattacaaggaatgtaattatggcaatgtatgaagttggcaccgtaacgggtgcagcaaaccaggcaaaggttactggtatttcaacaaagtggtcggagcccgcacttggtattcaagagggttcaattttagtcatttatcgcaatggaagtgctgatctgtatgccatcaaatcagtaaataatgacactcaactgactttgacgagaaacatcacaacagctttttctggcgcgaaatatggaattatcacatcagaaacagcgagcacttcatcatttgcaaatcaactagccagcgcatttaccctttggcgtaacgttgttcaaggatggtctacagcactaacaggtagtggcaatattacgatgacagaccctataacaggtacgcaggtgaccgtaccggcgattgccgggatggcaaaggcctcggatctggatgcgctggctaaactttcagggggaaacaacctcgccggctcgcaaattataaccagcgatagttccggttttattttgggcaggaacaacgatattggactggtcaaaaaatcaggcacctacggaaagctgatggtaggcagcggaacgcgcttcagcgtggtgaaggggaataagtcgactattagccctgaagatacccagacggagattatgggggtcgatagtgccggcaatatgactgttccgggcaacatcagtgcggggaaatattttgcgcaggcaattgagctttcgatgagcactccgtacatcgattttcatcataacaacagtaccaacgactacactgctcgtttcataaccacagccgctgatcaactgagtgtgcaggggagccatctacgggtagacagagacctgcgggtagggcaagcggccgacatcggcagctggatacagtgtcgctatgactgtgtgtcccagcagaccgacttcggttcccctgccattggcgcgttagtttccggtggcagagtccggtcccgcatgacagggcgtggcggaaacggcgacacgtctggagcgtggggtggtttctacctggaagaatacgttgggtacaaccaccgggtggtactgtatatggacggttttgacagaaaagatgcctggctcttttacaccggtgggacaatctccacacctaaaggcgatgttatgaccactggctcagacgtgcggctgaaaaaagattttacggattctcagaaaggggcatccaagcgtattaacgcgctgggggtatgtgagttcaacatgaaaggcgaaacacgccgtaggcgtggatttattgctcaacaagctgaaaaagtggacccgatttacactttccaaagcggtgatgtagaaattgatggcgagaagatcaatatccttaacgtagatcagacagcaattgtcgcagacctggtaactaccgttcaggagcaatgcaactgtatcgaaaaacttaaagaagagctcaaaaatctaaaggatctagtgatgcaaacgccagaaacagcagcataaaagcaatcgatattgtatgtaagtacttacctacaattaatttctaatttatgatataaatctgccatccgatttgacttattcatggaggaagacatgtcaaacgagatggcaggcgtgacgccagagcaggtggagcgcattgccgcaattgtggcgcgagaagtcgtaggaaaattaagtaaggagcttcgcgatgatattggccaggaggtcaacgatcagctgcgaacctactttggtgatatgactccggcgcaacatagcattcagcattccaacctggacaaacttcttaatcggctcgacacgatttcaagcgggttctttgggggcattatttccaagattacctcgttcctgatcaccgtgctgcttttgggtttggccgcttatggagtgaaaaatggactgcaataacaggagaacaaggatgagtactccaagaggcattcgtaacaataaccctggtaacctggataaggggtcgccgtggcaagggctagtaaacaatccggcggaaccgcggttctgcacttttaaagaccccgtatgggggattcgagcactgacagtaacgctcatcacctaccatgataagcgccgcgcaaaagacggttccagcatcgatacgatccgcgaagtcatcgagcgttgggcgccgccgcatgaaaacaacacggccgcatatatcaatgaggtctctaaagccgtaggcgtgacgccggacatgatcatcgatctgcatgactacaatactatgcggccgctggtggaggcgatcattcgtcatgagaacggtcgtggccctttgaaaacactcaacagctggtattcggcagaagttattgacgaaggtatgcgtcgcgccggcgtcgttaaaccggtaactgcagtgaaagcagtacccgtcacgaaagaaacagccggcgcaacggtgactgcaggtatcggtattgcgcagctgacggacgtaatgccgcagatctccgttgcgatggataaggcccagggacatatcaccagcggggataccgttcgcattatcttcggtattgcgaccattgttgtcgccggctttattgcctggtcgcaagttcgtaagcatcaggcaggagtggtgtaaccatgaacggcagcctgctttcaaaggtcaaatcgaccatcatgactttggctgccgtcttctttgtgctcgttggggcgtacacctggggtggacgcgctgcccggcgggccatggaagaaaaggcgcagagagaaaccaacaaacggcttcaaggcacagtggatgtgaaaaatgagacgattaatgaactcaggactaaggatgcttctgccgttcatcgcgagcttcgcgataagtggatgcgtgattagacctcagaccgtgggcgtacaattctgtgatggggcaaaccctatctacatcagcaaggacgacgccctgacagaagaaactgagagggaaatcctgatccacaacacgctgggtgagcggctgtgtcgttgggggtacgcgaagtagcacatacgccgcgcggacataattagcgcggccttagtcatgaactacaagatgtcagattttcacgttacttatctttaacccggctttctcctgtaactcagtaagtgctaagacattggcagggtggcgaaaaaaattgtatgcattcacggccacagactcgtttaaaaaaccatggcttagcagagagtccacgctggcatcgtatagcgcctcaagagaattgaatttctctgccagcaaccaagcttcttcctcttcaacaccgtagataccgcaggcgaaaagaagcgggcctaagcgaacgttttttgctcgttctataccctcataaattttcctagcctgcttcaaaccacctctgtcgataccaatcagcgctccataacctataaagaacatgtttagtggcttttgtattagccttttctctacgagctgcttgagagttttttcccctaattggtctatatgtactcctcgaggctcgaagaagcgccagcaagcagagtatgggtttcctgagttcagaaggccgtaagtgttttgggtactgcttagctcaatgctcatagtgagtactcgacgaaatgctagacgctaatcgtggtctatgttcgcacgatcaaggggttggcatattaaagcactcaccacatccgaaactacggtattggtcaaagaaactcgtgaccgtcgccaaatgcctttcatttcacctttacaccgcagccgtaggcatttaggctatatcgcatataagaaaacaagttgtttcatacgacgataaatcacacgtagggatatcacgaatgactcagatcattgtggtgggcggcaccaagggtggcccaggcaaatcgactgttgctcagcaaattgcagcctgtctgaaaatcaaaaagaaaaagaaagtccagatcactgatatcgacatccagcgcaccacgacagggtggtgtgaagaccgccggcacaatgaagaactggagctgatcccgttcgcctatgtccaggatgacatcatcaaacacatcacttcgcttcgcggccgtttcgattacgtcgtcgttgacgctggtggtttcgactccgaaattcagcgccaggctatgctgatggccaacgtgatccttatcccgcttcgcccgaaacgccgcgatctgaaatccttgcgtgacatcgaccccatcgtcgacagcgttagcagcgtgaatgaccaaatcaaaatccgtgctgtaatgaaccagtgcccgtctctgccctcccaggctgcgcgcattatcgctgcaaaagaaattgtcgaaacctttggtatcgaggcggtgccggtgaacctttacaaccgcaacgtctatgacgatgccgaagaggcgggtcgttccatctttgagatgaccggagccgaacgcgacaaaaaggctgaggccgagattgaagcattagtagaatacgtaatgaccttggagggtgaataatgtccatgaaaatgggtgatctggcaaaacgtccggctgcggaagctgctgcacctaaaagcagcaccccgatgcgccagcctgtccgtccacaaggccgtccaacacgtggcaaagagaaaatcaaaagccgcacgatgtctcttgaagacgagtatttcgaattactggagatgatgaagttcatccctcgcttcgagaagttcacccgttctgatgtgatacgtgcagccattttccatctggcagagaagtcaccgcaggaaattgaggacatcgtaaagatgaacgaagcgatcaccgctgctgatgtgacgatgcgtactgacgaaataaagcgcgagttgatgaagaaaggctgatataaatttctaaggctgtctatgcaggccagccttagaaatacaacgttctatgacagttattcgtagttaagttcaccgaacaggctgaacatcaagtcaccatccagaatttcaaatggcagctcaacatactcatccttatgcctcggaatcgctttgccgtcgtttggggcgttcttggtgtagccttttacatgctcaccgttttcctttgtatacggtagaacgactattcgaccgtgattttttgaaatgatagtaccttctttccagagcgtattgcctcttgaggtaatttcgctgtcatttgcttctttaacactccaacctatctgatttatgtcttcgaaccagaaaacaaagctgccaacgacgattatttttcgtccattccggagagcctcatccagcattctttttacgctggcgagttgtagtagctggttggcacgtggcagaagcattgagcgaatagtcgcttttgttttgccccaatgtgcagtgcctgataaaccaaaccctcttgcgatacgttcctggtagcaaattttggatgattttgctctggggctatgcacttgctcccaggtgttaggttctgttagtctgaaacatgtctggaaggtgggtaggaaaatccaatgcaagtaaggcatctcgtgtagtatgtctagcagatagggacgtacgattaacccttcaggtttgataattagctcatctgatgacaaacgtcgatcgttcgtgtgtcttctaatggcctcatttagcatcatatgctcctcatccatcagtcgcgattttgagatgagcgccttatcaatttttaagcgtagtgattctctttgctgctgagttaaagatagatcatctatattgaaagctatgtttttatttagttcttccgccgcttttcttgcatcaagatagctatcgtagacgtcatcaaaggcgaggtttggcatacctcgatcaacatatcgcctataccaagccagagttccatcatcacgaagtttcagacagaacatagaccaattatttcgttcgtatttaggctgaggccagaaagccagctcgggaagaccatatccgggaagtttgttcatgcgcatattgataatactcac

SEQ ID NO: 137 - DNA, 101153 bp, Unknown
  source: /note="Description of Unknown: MKP2_2161_1 Mutant Bacteria sequence"
aggccgggccgatcgacgtcgaggtgtacgccaactacggctttgactcaaaggcggtggacagcgacgcgcgtctcgaagcctggcagggcgggctggtgctgagccacaccaacgacagcggggtgaacaaggtgatcctgcgctattccgacaactcggataacagcgtctataacaaaaccgacgacctgaccacggtctacgccagctttgagggcagccataagttcacccagcaggcgcagatcgaatacctgctggccttccacgactacgacaacggcaaggacaacaccgacaaccgcaaaaactacggcgccatcgtccggccgatgtacttctggaacgacgtgcactccacctggctggaagcgggctaccagcgcgtggattacgaccagggcggggataaccacggctggaagctgacgctgtcgcagaacatcgccatcggcatggggccggagttccgtccgatgctgcgcttctacgtgaccggcggccaggtggacaatgagcataccgcgaaggtgaacggcacccaggaccagcagctggattcgctgaacgtcggtgggatgtttgaggcgtggttctgatgcgatagcgttgccgaaggagcgttcccggctggcgctacgcttagccgggctacaactggtgcgctccatttatgccggatggcggcatacatgccttatccggcctacgttccttcctgcgggctccccccccaggaccggcaagcgcagcgccgccgggcagtcagacccgtgccctggtggcgtcatcaattctttatctctggcttaatcggcgggcgatgcgctcaagcttcatcatcaacagcagcgtgacgcccaccagcacaatggtcagcgccgagccatcggcgatattgccgcgatcggtgaggctgaaaatggtcaccggcagcgtcgtccagcccggcggatagatcatcaccgtcgcgcccagttcccccatcgacagcgataagctcagcgccagcgccgagatcatccacggcgtcatcagcggcagtgtcacatggcgcaggcgataccacggcgaagcgcccaggctggaggcgacgttttcaatatcagcggaaatacgcgccagcccggtcgttacgttgctgaaggtaaaggcggagatcagcacgaagtgcgccgccagaacgataaagaaggtgccgttcatctgcagcggcccctggctgaacgccaccagaatgcccagcccgacggaaaccgaggggatggcgctgggcagataaaacgccaggccaagatatttctgtagcgtcgcgccatactggcgcagcgccagcgccgcccacatcccgcacagcagcgccagcaggctggcgcagaagcccaccatcaggctcgaaaacagcgaatcccacgccgcgccgcgaaaggcgttaacaaagtgggcaaaggtaaagccggtgggcagcaggccgttccattgtttactcaggctggagagtaaaatcaccgccagcggcagcaggaaaacgccggcaaaaagcgtcaccgccagcgcgcccgccgccgcgcggcctttacacgaccaaatcaacatcgttaactccttacgccagtgcgcgccgccgccagccgatagagcataaacagccccagcgacagcagaatattgatcagcgcaatcatgcaggccacgctgtaatccgactccagaatcgccttgctgtagaccatcatcggcagggtattgacccctttggcgccaataaacagcacgatcccgaactcgttagtggtcaatagcaggcacaggctgccgcccgccatcagcgccgggagcgccgccgggaagataacctgggtaatcacccgtaacggatgagcgccgagaatactcgccgcttccagctggctcttatctatctgccgcagtcccgccatcagcgggcgcatcaccagcggcgtaaagacggtaatctccgccagaatcacgccgttaatcgaatagaggaagtctaccggcggcagttcaaaagcaaacagcgccatcagggtgccgttgagcagccccgccgagccgtaaataaaggtgaatgcgagagtgataagaaaggtcggcagcgcaataaaagtatcaatgacccggcccaccagttggctgccggggaacggaataaacaccagaatcagcgccaggaagctgccgagcaccagacagccaagggtagcgaacactgcaatctgtaaggtattgagcagcgcgccaataaagcgttttgagtcaatcacctgccagaaagtctcgaggctcaggttgccgctggcgtcacgtaatgcctgttcggcgatcaacagtagcggatagaaaaacagcgtcgccagcaccagcagcggcaatgccagccacaggtaagggcgtaggtttcgcgccggacgcgcaagcgtgagggtttgcgccatcattgcacctcgatcagaaccgcatcgccaggttcgaagtagagcgccagcttgtcccccgcgcgcggcagcgggttcacgtgggtcatcacaatccgcaccgcttcgccggcaacatcgcacagcagatgcgtcagatcgccctgccaatgtaccgaggtcagggtagcattgagacgattactggttgccgatcgcggcgccaggctcatgtgctgcgggcgaatgcataacagcttgttgttgccatgcaggccgccccggctgaaggcgttaatcaggccgccgccacagctcacgctaaccagccccggctcggggctgtctttcagcgccgtcgcctgcaggatattggcgcggccgaggaattcggcgctaaagcggttcggcggatagtgatagagctcgtgcgtttcgccgtgggcgattagcgagccatctttcatgatgccgattttgtccgccagggtcagcgcttcggtctgatcgtgggtgacgtagagaatggtcagttccggcagttcgcgatgcagacgggcaatctcttccaccatgttatggcgaatttgcgcatccagcgccgacagcggttcatcaagcaacagcacccgaggacgcacggcaatcgcgcgggctatcgccacgcgctgctgctggccgccggaaagctgatgcgggtagcgggtggcgtaatccgccataccgacgatttttaaggcttcagtcacccgctcggcgataagccccctgggctgcttttgcgcccgcaggccgaaggcgacgttatcttccaccttcatatgcgggaacagcgcgtagttctgcaccaccatcgccagcccgcgtttgtacggcggcagttgggtgacgtccgtatcgccgatcaggatccgcccgccagccggttgcacaaaaccggcaatcgcccgcagcaccgtggttttcccggaaccggaagggccaatcagcgccagcacctcaccgggctcaatggtcaatgacagcggttttaagaccacgttgccgtggtatgaaacgcgcagcgagtccagggtgatcccggacgtccccgccagcgacggggaagaagtgacggtggttttcatcaacatcaggcttactcgctatcggtcactttatgccagcgggcaatgtcagccgacagcgataccgcgacatcatcccagttcggctcccagctcttcacgccgtcgagcgccgctttcgccgccttaaagttagcatcatccggcgctacatcgctgcgtaccggcaggccccaggagcgcgcgctgacgctggattgcgccggtttatccagcaggaaattgatcagctttttgccgttttcgctgttcggtccgttctgcaccagcccgatggtgtagggcagcgccagcgcgctgcgctcgcctttgtcatccgccggccagaaaattttaacgttcgggttacgcgccatctgcgacaggttcatctgcagatcgccgttggcgacgtacagctcgcctttgttgaccagcgccgtcagcttaccggtcgaggccgatgggccaacgttattggcctgcagcttacccagatacgcaaaaccggcgtctttaccgccgaggctatggaacgcctgcagcatcaccgcggtaccgtcgcccgcctgacccggcgtggagtactgcaacttgttcttgtagcggctatccagcagatcctgccagctggccggcgcgcttttcagcaactggctgttatagatgaaggtcagatagttattcaccagcggcgcgtagcggtcgttagcgccggggatctgcgcgcttccctgcggggtaaaggttgccagcaattgctctttcgcggcgcgctggataaacggcggcaccgtgaccagcacatcagcctgcggattggtgcgctccttggccagacgttcgacgatcgcgccggagccgccttccacatactgcactttgatgcccgtcgctttggtgaaggcagcgaactggctctgataccagctgttatcgccgtcatgcaggccgtcggcggagtaaaccgtgacgacgccgtccgcccaaaccggagagctggtcagcgcgaacagggacagcagagcaagtcgggagagtttcatcgtgtaagcctcatcggatagtcagttattctggtgtagaccagatttagcttcacgctaccgggggtttatgacaaaacgatgaaagaagtgtgtcgaaggagttaaaacgagcgggatgcgtagccccggcacgcgctagcgccaccggggagatcaaaaaatttaactaataaaatcaatgggtatcgacttcgatccgcaggctgtcatgccgccagtattcaatatcgtaatcgagaatacgcccgtgctgatcgtaattcagcctgcgcaacagcagcgccgggcgcccctccatcacccccagcgcctcggcggcctgcggcggcattgaggtgggataaaacgacagatgcatactggtatagatcaggtcgtagtgagtttgataaatctcggtcagactgccgttgagatcgtggcgcagcagctcaggcacccgcgcgggcagacagtggttttcgcagtagcacaccggccggccgtcggcatagcgcagccgggtcagcaggtagacctgatcgaagggctgcagcgccagcggcgccattacgtccagcggcacggcagccaggcggccatcaagcagcaccgttttcggttcgcgcccctgttcgagacacagcttgtggaagttggtattttgcgtcggatccagccacagacgctccggcgtcacaaaccagccgcggcggtcggcgcggtaaatcacgccgctggcctccagctgcgccaggctctcacgcaccgtaatccgcgtcgtgttgaacagcgcgcacagctcgcgctcggaaggcagcttgtcgccgcttttgagggcgccgttttgaatacgcgcctgcagctgcgccttaatcatcaggtattgcggcatctcgccagagggtgatttcatgtttactcactgccacttttcgtgcgctcattatacatagccagatgaattttttgttgcagcgccacatttcctttgaccctgccccggctttgtctccatgataactataaatctggtatagaccaaatggtgagacaaatgacttcacgaaattacctgctgctgacccccggcccgttaaccacctcccgtacggtgaaagaggcgatgttgttcgatagctgtacctgggatgatgattacaatctcggcgtggtacagaccattcgccagcagctggtgcagttggctaccccggccgacggttataccgcggtgctgctgcagggtagcggcagctacgcggtcgaagcggtgctcggcagcgtcatcggcgaacagggcaaagtgctgatcgtcagcaatggcgcctatggcgcgcgtatgattgagatggcgcagctgatgggcatcgcctgccacccttacgactgcggcgaagtctcccgtccggacgcggccgcgatcgaacagatcctgcagaacgacccggcgatcacccatatcgcgatggtacacagcgaaaccaccaccggtatgctgaatccgatcgcagaggtggccgaactggcgaaacggtacgataaacgctatatcgtcgatgcgatgagcagctttggcggcattccgttggatatcgccgcgctgaatattgattacctgataagctccgccaacaaatgcattcagggcgtgccgggctttgccttcgtgattgcccgtgaagcggagctggccgcctgcaaaggccgttcgcgctcgctgtcgctggatctgtacgcccagtggcgctgcatggaggacaaccacggcaagtggcgcttcacctcgccgacgcataccgtgctggccttcgcccaggcgctgaaagagctggcgcaggagggcggcgtcagcgctcgccatcagcgctaccgcaacaatcagcgccggctggtcgccgggatgcgcgcgctcggcttccggccgctgctcgacgatagcctgcactcgccgatcattaccgccttttattcaccggatgcgccgcagtatcgctttcacaccttctaccagaagctgaaagaccagggcttcgttatctatccgggcaaagtatcgcaaagcgactgcttccgcatcggcaacattggcgaagtctacgacgccgatatcaccgccctgctggcggctatcgacaacgccatgtactggaaacaataaggaaccgccatgaaccgtattagcgcactgatccttgactgggcaggcaccaccgtagacttcggctctttcgccccgacgcaaatcttcgtcgaggccttccgccaggccttcgatattgagatcacccttgaagaggcccgcgtgccgatggggcttggcaaatggcagcacattgaggcgctgggcaaactccccgctgtcgatagccgctggcaggccaaattcggccgcgcgatgactgccgccgatatcgatgcgatctacgccgcgtttatgccgctgcaaatcgctaaggttgtcggtttttccgcaccgattgccggcgttgtcgacactatcgccgcgctgcgcgccgagggcctgaagatcggctcctgctcgggttatccgcgcccggtaatggaaaagctggtaccggccgccgccgcccagggctacgccccggaccactgggtcgccaccgatgaccttgccgccggcggtcgtccgggcccgtggatggcgctgcagaacgtgattaccctgggcatagacgatgtggcccactgcgtgaaggtcgatgatgccgcgccgggcatcagcgaagggttacatgccgggatgtggagcgtcgggctggcggtgtccggtaacgaattcggcgctacctgggaggagtaccaggcgatgtcgaaagaggaaatcgccacccgccgcgagcgggcggcaggcaaactgtatgccgccggggcgcattatgtggttgataccctggcggacctgccggaagtgattaccgacatcaatgcccggctggcaaaaggcgagcggccttaagcgggtgaattcaccttcactttggccgccaccagcaggccggtaaacagcatcaatatccctgacaacaccagcggcgacagcagccctaagtggtcaagcgcaatgccgccgaccgcggcgccgcaggtgttggccagctggatcaccgccacctgaatcgacccggctttttccgcctgatcggagagggaacgggtgatccacgttgaccaccccaccgggatcagcgcaaacgcgaagccccagataatcgccaccgtcgaggcgacgattttgctctctccccacagcaccagcgccaccgcgcaggcggtcagcaccagcggcgcaatcgccagcgccgctttcaccgaacgcttgagcagcaccgaggagagcgaggtgccgataaagctggcgataccaaagctcagcagcaccagcgtcaggccgtcgacatcaaacccggcgagggtcatgtacaccgggcgaatataggtaaagaaggcgaactgtccggcaaaggccatgaaaatggcgcacattccggccatcacccccggacgcttcagcagaccaaacatattttgctgctgagaagccgattcaccgggcagcgacggcagcgctttcagcacccagagcgtacacagcacgcccatcaccgccgcgccgttaaagacgttgcgccagccgataagcccgccaaggaaactgcccaacggggcggcgatcaccagcgcgattgataccgcgccgaagataatcgatagcgctttcggcaccacgcgcatcggcaccagacgcatggtcagcgatgcggacatcgcccagaaaccgccgagcgccaggcccagacaggcgcgccccagcagtagcagggtgaagctatcagcgaaagataccagcaggcaagaaagggtcagcagcagtgaaaacaggataaccacgtagcggcgatcggttttacctatcaccgtggtgataaacaggctggaaaacatcgcgacgaatgccgtcgtcgtcaccgactgcccggccatcccttcggagatgcctaaatccagcgccatcggcgtcagcaggctgaccggcaaaaactcaacggtaatcaggcaggcgacgcagaaagcaaccgcgaaaaccgccgaccagtttggccgcgcgagatcgcgtgcatggggtttggtttcatttgaatgactcatgagtgacctgcgaagaaagtggcggaaagctgcgcagtgtaacattttgtatgtgacgtacttaacgttttcgcaactcttctcgcttttcataagaggttgcgtagctgctcgcatgtttaaaaaaacgatgcttgctatcgctttaacaaatctcaggagaatttaatatagcaccatgtgctatacttttaacgacaggatgtcagcaatgcgtatcttcaaaaccaaatggttcgccagagaggctagctctcatggcatttccgacgacgagctctatcaggcaattcaatctgcgcttcagggcaaagtggttgatttaggaggaggggtttataaaaagcgactcaacaagaatcgcgatcgcgcaatcatacttaccaaaagcgcagagtattggttttatacctttctatatgccaaacaggatatggccaatatcaaccatcgcgaattaatggggtttcgtgagttagcaaaacactatgccaatctttctgaagagagaacgacggccttagttaaaagtaaagaattagtggagatttgcgatgacagcaaaaaataaatacaaaagcccggctttcgaagcgatccatagcgctgcgtcggggctattcagcgttggcgcaatcccacaggaaacaatgcgccattttgatgaatcatgtctcggtagcgtagccgcacttcaacccattgaaattaaagcgctacgtgaacaactcaatgttagccaacccgtgttcgctcgttatctgaataccagcgtgtctaccgtgcaaaaatgggagactggcgctaaacgaccgagcggaatgtcattaaaattgcttagcgtcgtacaaaaacacggcctgaaaatcctactgtagttattctgccggatggcgcttacgcttatccggcctacaagtgacgagtgcggaaaccgtaggccggataaggcgcagccgccatccggcacacaaaagcgatgaaccacaggccggataacaatgagatcagtgcagccagtgcacgccgtcttccgggagaaacaggtcgttgtagcgctgctgtaggttatgcaaatcgctcatatccggatccagctcgcgcagaaacccttgcgccaggcggatctgcgcctcggtgatcggcgccgctaaacgcgctttttgcatcaggcgataccagtaatgcaggtttttttcgctggcgtcgacaatcgcgacctgccagatcagcagcacctgggcggcgttctgcagatgtgcttcattcggccgctccaggtaacgcaaatactcattaccggcgggttttcccagctgatcgatcatcgattccagcgggacaggcgtgatgccgaggcgttcgctcaggcggcggatcgcgcggcgtgaatcagaggtaagcacccgaaatcccacaacaaacaccactaccagggtggccagtcctatccagatcatgcatcctctcatccaatcgcagcctgactatcataatgggaatttgcctgctgtcgactgtcgggcctggcataatgcgcaagaaataaaaaagcccggcgcgaaggccgggcaaggttaccaaatacctggtgaatcaggcggtctgcaaaatacggttctttttctcgcggcgaattttacgctcttcaaagatagccacgatggccatcaggcagatacagccgacggcggcggcgtccagcgccgcaaaggtgccggcccagccggtcaggccgaagaccggggtgccgtcggcgatcatcccgagacccagtttggcgaagctatcgccgatcagataggcgaaggtgcccttgatcccatcggcggcgccgatcgcttttttcggtacgaaaccgacggcggcgacgccgatcaacagctgcggaccaaacaccaggaagcccagcgcaaataacgaggccagatagacgtactggttgctggcgtgttggtaaaccccgagggtggcgataatcagcgccagcgcgatgcaggccaccagcgcgcggcggccgttggccagatccgacaaccagccccacagcagcgtgccgaccagcgcgccgacctcaaacagggtaaagccctgaatcgccacctctttcgacagcttcagctcctggaaggcgtacacggtggaccactgatcgataccgatacgcaccacgtagaggaagatgttggagaagcacagcagccagatcactttgtttttcagcacgtactcaacaaagatctgccacttggtcatcgcattttcttcggtctctttgtcctcttcgctgatcgcttcgccaaacagctcttccgccgtgccgaggccgtaggattccggagagtcgctaccgtagcgcaggccgataaagccaacgatcagcgcaataatcgacgggaagataaacatgccgatcacatggccgtcgaacagatagttggcgccaaacagcgccacgcccgccgcgcccgcgccgccgaggttgtgggagatattccagaagccgaggaaagtgccgcgtttgcgtctgggcgtccacttggtgatggtggaatagctgcacgagccgccggtgctctggaagaaaccgctcagcgcatagaaggcgatcatcaggaacaggctggtagaacccgcccccatgctggcgctaaagcccagcatacagatggcggagaggatcagcataaacggcaggaactgcttggtgtttttgccgtcggcataataagagaccagcgtcttgcccacgccgtaggtgatggagaagcccaggccaatcatccccagctgggtcatgctcagcccgtaggtggagatcatgtcgttctgcgcgatgttaaagttcttgcggatcaggtacatggtcaggtagccgatgaagaccaccagataggactgcatgaaaggtttgaaccacattttgcgccgcacatcgagcggcagatccagggtcggcttgcgcacctgattcagaaaggccagcatgggtatctcctgagctgattttttatgcctgcgtaataaccaggcattgtaaaaaccagcgcgccgtctggcctgagacggcgtccaggtaaaaccgggaaaatttcttagttttgtcccgttcgcggcgaaagggtgagctacatcacgcttcgctggcggtacgcggcgcctgcgcgtttaaaaacggcagcagcagcagcgcggaaatgccggcggcaatcgcaatcaccacgaagaatccggtccagtgccagatatccatcacctgcgccagcggccagccggaaagcgaggcgccaagataagcgaacaggccgacaaacccggttgccgccccggcggcttctttatgcgaacattccgccgccgccatgccgatcagcatctgcgggccgaaaacgaagaaaccggtagtgaagaagcaggccgcctgcatgacatagctggcgaacggcatcagccacaggccgccaaccgacagcaaaattccggcggcgaaaatcaggttcatcggcccacggttgccgttaaacagcttatccgagccccaccccgccaccagcgcgccgataaaaccgcccagctcaaacatggtcaccgccgagttagcggtcaccagatcgacgccgagcgtctccgacatatacagattgccccagtcgttaatcgccgcccgcaccacgtacaccagcacatagcacaacgacagcagccagatgtagggattggccagcacgtagcgggtcaggatcgctttacgagacatcccagcgccttcctgctgctgggcgatttccagcgcatcgtgacgccagtcacccacggcgggtaaccccaccgcctgcgggcgatcgcgcagccgccagcacagatacagtccggcgaggatcgccagacagccggcaatggtcatcccggcacgccagccgtagtgcaacgccgccgctcccaccaccatcgggatcagcgcgccgccgacgttatgcgccgtattccatagcgcccaccagccgccgcgctcggtccgcgaataccaggccgtcagcagtcgggcgcagaccggcgagccccagccctggaagaaggcattcagcgcccacagcagcgcgaaagcccatagtgaggaagaaaaaccgaacagaatattcaccaccccggtggcgataagccccagccccataaaatagcgggcgtcggagcggtcgctgacgataccggagaaaaatttcgacagcccgtaggtgatatagaacagcgtggccagcaggccaatatcgctgcgggtcaggacgttgctggcgagaatttccgggaccgcggcgttaaagcttttgcgggtgaaatagaacagcgcgtagcccagccagatggtcaacaggatatggcgacgccagtagcgataacgcgcatcaagctcgcgtttatcgctaatcggcgcagcgtccggcggggcttttaaaaaggcgaacatcggcgatcctctcaggcgtaacgcagcggtagattgacgcacacccgggtaccatgggtgcaggagatcgtcagtgtgccgcccagggcggtcacgcgctcgcgcatgccggtcaggccgaacccctgcagattcgaccccggcggcaggccgcaaccgtcatcttccagcaccagcattagtcgctcatcctgctgccagccctgcagagtgacagcgctggcgctggcgtgcttgacgatattattcagcccctcctggcaaacgcgaaacagcgtcacgcgctggttctcgctcagtcccgcctcgttaatccgccagtcgagatggctgacaatgccgcggtcctccagctccatctcgcgcatcaacgaacgtaccgcctgctccagcggcaggtcgtcgagctgacgcggacgcagacggcctagcagtctacgcaccgagtcgtaaactcccagcgacagctgttctatcagctgaccgctctggcgcacgctggcattgtccggcgccagccgctgtacgatcccggcctgggtgcggatcgcggtgatggtctggccgatatcatcatggagctcgcgggcgacgtctcgccgcacgctctcttcggtctccagcaggcgttcagccagccgacgattacgcgccagctcgctttgtaatgactggttcagctcgcgtaaccgctggatccccgcccccaacagcagcccggtgaggctctgtgccagcagggaaagcaataaatcgaccgggtgatcgtgccaggtctggctggcaatcaaggcgatagcgttcatcagggtggcgatcagcgcgccctgccagccgtagtgccaggcgagggcgataatcggcagcgccagacaaaacggggtaaagcgggagagctcggcgggcaggccaagctgcagccacaggctaatggtgaataacagcagataccagatcagatgccgcccgcgccagttaaccggctgcgccaccagcgccggccccagcggccgccagacggtgctggtaagatagtgccagaaaaccaggcaggtcggcgccagcgtcaggccgccggtcagcgtcaacagcagggcgttaagcccctcgtccccctccgccagccacggcagcgattgcagcagcgcggcggccattaacgccccgccctggcgcagcagcgtcagccagtcgcgctgctgccggtagcgcgagatcaacgccaccggcagcagagtcagcaggcttccggtcatcaaaattatcgggtgcgccagcgccacctcctgcgccagccagaagataagcagccactcggttcccagcagcactggccagtagccgcgggggcattgcagcattaaccccagccgcaggccaaagggaaccagcagcaccgctaaatccgcgcgttccaccagatgcagactgatgctccacaggcagaaccaggcggccgcgaagataaaggcgcagccgatgaccgacagcaatcgtgagacgacggccttcattgccagctatcgaacatgcggcgcgccagctcaacgtcgttgctgacgcccagcttttccagcaggttggcgcggtgtacgtggacggttttcggcgacagaccgagctcggcggcaatctctttcaccgccatgccctgcgccagcttttccgccacctgacgctcgcgtttggtgagcggatcctggcgcccggcggccagcttcatggcgatatccggcgtgagatagcaaccgcccgccgccaccgtgcgtaccgcggcgataagttcatcggggctgcagcgtttcgacaggaagccgcgcgcgccggcattcaacgcttgctcgatcagcgccgggctatcgtgtaccgacagcatgatggtcgccatccccttcggcagctggctgagcagctccagcccggaaatatccggcattgagatatcgcagatacagacctgcacgccgcgccccggtagccccgtcagcgcctcgcggccgctaccaaattcggcgacaacctgaaaatcagcttccagccccagcagctgagcaaagccggagcggacaatcaaatgatcgtcaataagggcgatggtggtcatggtgtgtcctggtgcctgaaaacgccggatggcggcgtaaacgccttatccggcctacggattcactgcctgtaggccggataagcgcatcgtcatccggtaaaggcgcttaccttagcgataagcgcgtggctgttcaagccttgagcgctattcgaagaacaccgcaattttgttaaacatggtgggatcggactggttacgcgccactttggtgacatcttccagcttttcaatctggctaatcatctgccccagtcgctggtcatcatttaccagcagccagatgcggctgtgttcgctgccctgaattggcagacagagaatgccttcgacgttaaacgcgcgacgggcaaaaagcccgcacacgtgggtcatgacgccgggatggttgcggacggtgagttccagaatgacgttgtcacattgtttttgcatggcttattcccccaccatttcagtattggccgcacccggcggtaccatcggatacactttctgctgtgcgtcgatgcgcacgtggatcagcgccggccccggacggtcgatgatcgcctgcagcgccgcctgcggatcgacttcattatttaaatcacaggtttgcaggccaaaaccggcggcaatctgcataaagttaatcatccccggataggtggcggcaaaaacgccctgctgatagaacaggctctgctgctgatgcaccagccccagcgcttcgttgttcagcaggataatttttacatccagctgattttcggcggcggtggccatctcctgaatattcatcatcaggctgccgtcgccggagaagcagataaccttgcgctgcggattcgccagcgccgcgccgatcgccgccggcaggccgaagcccatggtgccgaggccgccggaggtcagccactggcgcggacgattgagcgggtaggcctgcgccgtccacatctggtgctggccaacgtcggtagtgatgatcgcttcatcatccacgcaggcggccacggcgttaatcaggccgtaatgggagagcgggtcgctttcctgcgggatggcgcaggggaattcgcgctgcaagtcggccaccagctggcgccattcctcgcgcggctgcgcctcaatctgcgggttcagctgggctaagacttccgccacatcgccctgaatcgccacgtgcggttgcttgattttgcccagttcggcgcggtcgatatcgacgtggataatcttcgcgttcgggcagaactgctcggtcttgccaatcgcccggtcatcaaaacgggcgcctaaaacaatcagtaaatccgcctcctgcagaatgaagttggtgctgcgcgcgccgtgcatccccagcatccccagcgacaaaggatgcgccttcggcagcatgcccagcgccattaaggtcatggtggtcggcaggttggctttttccgccagctcacggatcgcctgcggcgcgttaatcaccccgccgcccagatacagtaccgggcgtttcgccgcgttgatcattgccgccgcttcacgcacgctttcaggcgcgaatgccggtgccggggcgcgctcgccaggctcaggcagcgcttccagctcaatggtcgccgactgcacgtccttaggaatgtctatccacaccggcccgggacgcccggactgggcaatacggaaggcgtcgctgatcacctgcggcagctcggcaatgtcgcgcaccagatagttatgtttggtgatggggatagagatgccgtaggtgtccacttcctggaaggcgtcggtaccgatcatcgaggccggtacctggccggtgatgcagaccagcggaatcgaatccaggcgggcatcggcgatcgccgtcaccaggttcgtcgcccccgggccgctgcaggccatacagaccgccggcttgccttcggtacgcgccatcccctgggcgataaagcccgcgccctgctcgtggcgcgccaggatgtggcggatctgcgtgctctggcttaaggcatcgtagataggcaggatggagccgcccggaatgccgctgaccatagtgataccctggcgctccagtaaatgaacaaccagctgcgcgccggtaaagcgcattgtgtttgatgtggtgcccgaacttgccatgctccagtccttttcttctgggccgactttaccggggggctcgccaacaaaaaaccccgctcggtttgcgccggcggggtttggaattcgtgttgttccggaccctacggcgcattgccgacgacgaccaccacagacacgacgaccaccgcggctggcgcggtttttagtagggtcgaagcgatcagggttgcgttcattagggacctgttgtgtcgaaaaataagctgaatttatacaaacacaggttttacgttttcacaatggatttattttcatccacgaaaatttgcgcgaaagatcacagttcggcgcaaaagggcagaaaacaaaaaaccccgccggagcgaggtttttatcagcatggttacaggtggtagccgcaagcacactgtattacgtcaacgccaaaagtatacgcgatcgctgcagttcgcgcaatttaaggtcggtttttctctgtcatagagtatggatgagaggggcggatttgtccaaaaaatactgttcatccatacagtatttatctatactgggtgtgttcactttgtgccattcgggggccgcaagtttgaccggcgcaacgaagtcctggctgaaacgggtggtgccgtcagtgccttaaccccgggagagcacactgtgttacgtcaacaacgtgcagtcactggcccgcgcggcaacgcgtggctcagcgctgcgcacccctgtcgttgcaggcggcgggccgggaagccgttcatggaaaggacgaactatcggccagggcagacgccgccggcgacaggcagggataagctggcaacgggcagcggaaaggtacgtcagcttattgtgctccttaaccacaggagacgcgcgtatgggcggaatggatattattattttgatcctgaaactcatggttgctgtgttgcaactacttgatgcagtcctgaaacagttccgctgattcaggttcaagtcgcacctgaggggggcgggaaaccgcccccctgcaggcgcccgccgggcgtcccgggatgacttgatggaggaagctatgccacccctgttaattgccgccacgacgccggatgccccggggttcgcggcgctacgaattgaaagccttgaacagcatttcaatatgctgcgccgcctggcggaaaactggcagagcggcaaaaaccgctttaacgcgccgggcgaaacgctgctgggcgccttcgtcaaccaccagctggtaggggtatgcggcatcaatagcgatcccttcagtccgcagccgcgggccgggcgcattcgccacctctacatcagcgaacgctatcgtcgccggggcatcggccagcagctgctggtctcggttatcacccactccagcgcctggttcgactttctcaacacccatgccccggcgcaggcctggcccttttatgaaaggcttggttttcgcccggtgtacgatgaaccgcgggtgacgcatcgcctgttttgttcgctttaacccccgctggcaggcagcgcgggcgcgtgttacattccggtgaccttcactgttgaacctgtctgcgatgaccctcaccgtattctgcattttgctgttcgccgccctgctgcacgccagctggaacgctatcgtcaaagccagcgccgataaaatgtacgcggcgatcggcgtcagcggctcggccgcgctgatcgccctggtgatgctcccctttgccccgcagcccgcgctggtcagcgccccctatctgctggcgtcgtgcgcgttacaggtggtgtatacggtgctggtggcgaagacctaccaggtatcggatatgagccagacctatccgctgatgcgcggcactgcgccgctgctggtggcggcgataagcgtgctgttcctcggcgatcgtctgtcgccgctggcctggctgggtatcggcgtcatctgcctggcgattctggcgatggcctttaacggccgcgccagctcgcgcaaaggcatcgtgctggcgctgatcaacgcctgctttatcgccggttatacgctggtggacggcaccggcgtccggctggcgggctcggcgctgggctacaccctgtggaccttttttatgaacggcttctgcctgctgtgctgggcgatggtggcgcgacggcgtgaggccagtcgttatttacgtgagcactggaaaaaaggcatcctcggcgggatcggcaccatgggctcctacggcctggcgctatgggcgatgacccaggccccgctggcggtggtcgccgcgctgcgtgaaacctccattctcttcggcgcgctgatcgcctttatcgtcctgaaagagcaactgatgccgctgcgcatcgtggccgcctgcgggattgccgccggggcgatcctcctgcgcctggcgtagcctgagatggcaacattagttgccgttcctgtttacataatctgcctggaattccctcaacaatcggcactttgcagttgttctgtcattttaatatggtagattcctccatcgtttacgggatgtgccagtcacatattcttcatttctctttactcacaaagtattcatcgacatgaaacggcataagaacttcaatttgttgttgatgctggtactgctggtggccgtcggccagatggcgcagaccatttatattccggccatcgccgacatggcggtcgcgctgaacgtccgcgaaggggcggtacaaagcgtgatggcggcctatctgctgacctacggtatttcacagctgttctacggcccgctctctgaccgcgtcggtcgccgaccggtgatcctcgtcgggatgtcgatttttatgctggcgacgctggtagctattaccacccatagcctgccagtgctgatcgccgccagcgccatgcaggggatgggcaccggggtcggcggcgtgatggcgcgtaccctgccccgcgacctgtacgaaggcgctcagctgcgtcatgccaatagcctgttaaatatgggtattctggtcagcccgctgattgccccgctgctcggcggcatcctcgacaccctgtggagctggcgcgcctgctacgctttcctgctggtcctgtgcgccggggtgaccttcagcatggcgaagtggatgccggaaacgcgcccggaaggggcgccgcgcaccaaacttctggccagctacaaaacgctgttcggcaccggcgcctttaactgctatctgctgatgctgatcggcggcctggcggggattgcggtattcgaagcctgctccggggtgctgatgggcgcggtgctcggcctgagcagcatggcggtgagtattctgtttattctgccgatcccggcggcgttcttcggggcgtggtttgccggccggccgaacaagcgtttcccgaccctgatgtggcagtcggtgatctgctgcctgctggcaggtctgatgatgtggatcccagggctgctgggcatcatgaccgtctggaccctgctggtgcctgcggcgctgttcttcttcggcgccgggatgttgttcccgctggccaccagcggcgcgatggagccgttcccgttcctcgccggaaccgccggggcgctggtgggcggcttgcagaatatcggctccggcgtgctggcctggctgtcggcgatgatgccgcaaaccggtcagggcagcctcggcctgctgatgatgctgatgggcctgttgattctgctgtgctggctgccgctggcctcgcgcttcacccaccatcagcagccggtataagcgcggcagtggttcaccggatggcggctgacgccttatccgggctaccggactggtcgtctgccggcccgcgcaagcgcagtgccgtcattttgccgggtggcggctcacgccctacccggcctccctaacaacaccgagggatagcccggctcattttcaggtcaggctatgcagccactcgataaaggcgtcgattttcggccactgacggcccggcagggtgctcacgtaataatgctgatggcatttcagcgtcatatcgccgaacggggcgatcaactccccactctctaaccgcttctgcaccagccgtttacgccccatcgctaccccgacatgattcatcgccgcaatcaccgctaaatcagaacgatcgaagccaatgcccgacgattgcggcagttcaatcccaaattgttgtgcccaactgaaccattcatcggtgccggaatcattgctccatgcctggcgatcgtgaagcagcgtacagtggcgcagattggcaggatttgacgttaactgcagctggcgggcgtaatacggcgtacataccggcacgatcgcctcatccatcagaaaatggtggcttagctgcgacgacggcgcgtcatcaaaatagattgccagatcgatacccgcccgctgcaggttgacgttatcgttgccggtcagcacggtcagcgagatggccgggtagcggcgactgaaatcccccagcgccggcaccagccagcactgggcgatagagggccgcgagtagaccgtcagactgccggagagctcctggtttttgatgtccagaatctcctgattgaggccatccagcgacgacttcagcgcccagtaaacgcgtttcccttctcgcgtcagctccactttgcggtgcgagcggacaaagagctggatccccagctcctcttccagctgattaatccggtgactgacggcgcttggggtgagcgccagctcgtcggcggcaagggcgaacgactcgtgccgcgccgccacctcaaacgtcgacagcctggagagttgccagccgttcagcaaccgggtacctaaggtttttagcacatccattatgcgctcctggcgataatagggagtctggatgataaaaaaataatgccggaacttccgctaaaggatgagttaatttgacccatagcatatttagaggtcacttttagagctaaatcacctttttgatttaatttggctcatctgaaaggtcatttatatcgtttgtcagcccatgccgagtttctgttcaataaccacacgttacttacggcgaggtggggtatggaatcgcaaatttgggttgtgagcacattgctgattagcatcgtgttaattgtattaaccatcgtcaaactgaagtttcatccgtttctggcgctgctgctggcgagctttttcgtcggggcgatgatgggaatgggcccgctggagatggtcaacgccattgagagcgggatcggcggtacgctgggcttcctggcggcggtgatcggtctcggcaccattctcggcaagatgatggaggtctccggcgcggcggagcgcatcggcctgacgctccagcgctgccgctggctgtcggcggacgtgattatggtgctggtcggcctgatctgcggcattaccctgtttgtcgaagtcggggtggtgctgctgatcccgctggcattctccatcgccaaaaaaaccaatacttcgctgctgaagctggctattccgctgtgtaccgcgctgatggcggtgcactgcgtggtaccgccgcatccggccgcgctgttcgtggcgaataaactgggggctgatatcgggacggttatcgtctatggcctgctggtcggtctgatcgcctcgctggtcggcggcccgctgttcctcaggctgctcggcaaccgcctgccgtttaaaccagtgccagccgagttttccaacctcgacgttcgcgaagaatcgacgctgccgtcgctcggcgccacgctgtttaccgtgctgttaccgattggcctgatgctggtgaaaaccgtcgctgaactgaatatggcgaaaggcggcacgctgtatacagtgctggaatttatcggcaaccccatcaccgcgatgtttatcgccgtctttgtcgcctattacatgctcggcatccgtcggcaaatggggatgggcgttctgctgactcataccgaaaacggctttgggtccatcgccaacatcctgctgattatcggcgccggcggcgcattcaacgcgattttgaaatccagcggcctggccgatagcctcgcggtgatcctgtcgaaccttgatatgcacccgattttgctggcctggctggtggcgcttatcctgcacgccgccgttggctccgccaccgtggcgatgatgggcgctaccgccatcgttgccccgatgctgccgctttatcccggcgtaagcccggagatcatcgccattgccatcggttccggcgccattggctgcacgatcgtcaccgattccctgttctggctggtaaaacagtactgcggcgccagcctcagtgaaacgttcaagtactacacgacagcgacatttatcgcgtcgctacttgcactggccgccaccttcctgctttctttcattatctgagcgcaaagagacgtatgatgaaacacgctgacctgaccaccttaaccgcgaccttcccgcttgtgcaggatctgatcgccctgaaagaaaccacctggtttaacccggcaaccaccaccctggcgaaggggttgccttacgtcggtctgaccgccgacgatgtgcaagacgcccatgcccgccttcagcgcttcgcgccctatctggcggcagccttcccggaaaccgccgcgagcggcgggattatcgaatcagaagtggttgccattccggcaatgaaacgcagccttgagcaaaaattcggccagccaattagcggcgaactgctgctgaaaaaagacagccatctgccgatctccggatcaatcaaagcgcgcggtgggatttatgaagtgctgacccatgcggaaaagctggcgctggaagccgggctgctgacgaccgcagacgattatcgcaaattgctgacgccggagtttaaacagttctttagccagttcagcatcgccgtcggctccaccggcaaccttgggatgtcgatcggcatcatgagcgcgcgcattggttttcaagtcacggtgcatatgtccgccgatgccagggcgtggaaaaaagccaaactgcgcagccacggcgtaacggtggttgagtatgaagaggactatggcgtggcggtcgaacaggggcgcaaggcagcggaatccgacccgaactgcttttttatcgatgatgaaaactcgcgcacgctgttcctcggctatgccgtagccggcgagcgcctgaaagcgcagttcgcgcaagcaggacgcgtggtcgatgccgatcatccgctgttcgtctatctgccgtgcggcgtcggcggcggccccggcggcgtggcatttggcctgaagctggccttcggcgaccacgttcactgcctgttcgccgaaccgacccattcgccatgcatgctgctcggcgtctataccgggctccacgaccagatagcggtgcaggatttaggcattgataacctgaccgcggccgacggtctggcggtcggcagggcgtccgggttcgttggccgggcaatggagcgcctgctcgacgggttctatacccttgacgaccagacgatgtatgacatgctgggctggctggcggcagcggaaaatatccgccttgaaccctccgcgctggccgggatggccggagcgcagcgggtctgcgccagcaaagcgtaccatcagctgcaggggctgagtgagcaacagctgcagcaggccacccacctggtgtgggccaccggcggcggcatggtgccggaagaggaaatggcgcagtacctggcgaaggggcgctaatctttagcgcagcagcggcatcagcgcctctggcggccgctgctgtcgccgcaggtcccgcatcactcgcatatagggcccgctaaaatcgtagaactgccggtaacccgcgcacagcgggtcttcctgttcgccacagcggcacaggcgcagccacgggcagccgtagcaggtgctgttggccgccggcgcgcctggctgggtcagcgtctcgccgcaccaggcgctcagcgtctcgctaaacagtaaaatattgatgcgcccaatatcttcccgcacccagcggtgaaagactgcgcagagaaactctccccaaagcgcggcgtcgccggccgccagctgcggaataaaatggatagcggtgagcccctgttgacgaagctgcgcatagaacgcctgcggttgatggcaatgatgcgcctccaccacgacagcctgaaagggagtgtcatgttgctggccgggggcatgagtgagaggcaaattcgccggacatcctgtcatgacatatccctaatgaataaaacgatcggttgaaggtgagtaacagcaaacaggaatgccagagaaagtactgcgagtgcgatcaaaaatttgtcacgaaccgcccgcggctgtaaaaaatcgctatcgtcgacatccatcagatgacgacggcgggtatagccccagaggatcaccgccacaatcgccagtacgccgatcgacagccagaacggcaggccggcgcggtgccagctgtgcttaatcgccagcgccatcagcgcgccgtagcccaacagggtgcgaaaccaggccagcgaggtgcgctctggctgaagaccgggatcgctttcccgccgcgcccggcgtttatccgccatacaccaccagcagcatcaccgcggccaccaccgccagcagcagaatgctaatcaccagcagcgtgcgggtatagggaaggtcctgcttgaggcgcatcgccttctcgttattcagccagcgcagatagccatagatggccatgccgccggcaaagagacacagcagcagggcgagaatttcacggatcagcggcgtggcaaagtccggcgctaactggtcaaggccgacgccggcggcgagaaaaccgagcgccgtgcggatccatgccagaaaggtgcgttcgttagccagcgaaaagcggtaatccggcgcttcgccgaggcgggagattttcattacagttccttgttcatcgcgctgcaggcttcagcatagcgtaaatcaggaaccggggagaagaaccggcgccccgcagggcgccggtattacaacggggattaatgcagctcaggccagtaatctttgttggcggcaatgaggtcgtcgaggatcgctttcgccaccgaggcgctcggcacggttttcgacagggtaatcgcctgccacagcttgtggtacgagcgctgttcccaggcatcgaccaccagtttttccactgccacctgctggctcatcagccctttctggaaatgcgggatgtcgccgaccgtcagcggctccggtccgttgtggcctaccagacaagggatctccaccatcgcgtcggcgtcaaagttatggatcgcgccattgttcggcacaatcagcagcatcctttcctgcgtgttaaaggcgatagccgtcgccagatcgacgatataggaggcatgctcgtcaatctccagatcgccggcggtggatttcccggcggcgatgatcgcccggcaggcgctgaagacgtttttctcccgatgatccatcacctcattggcgcgggtgcgttccgggttggagtgggctaccacatagtccgggaacagataatatttcaggtaggtattcggcatggtctgcggatccagcgcctgcacatctttcgctttggcaaaggtgtcgttccagctggcctcggtgtgcggatcgttcgagggcggcacatagccgtatttcgccacatattcgcgcagtttcggcatcaaatcattgccgtcgaggtcctcaatcgaggtccaccagccgaaatggttgaggccgtagtagcgcacgcgcatctgtttacggtctttgaggccgacaatctgcgccatccgcccttcaatgccgatcggcatatcgcagatgttgaggattttggcgttcggccgcagacgacgagtggcttccgccacaatcgccgccgggttggagtagttaagcatccaggcgttcggcgaatatttttccatataatccaccagctccagcacgccgccgatagagcgcataccgtaggcgatcccgcccggtccgcaggtctcctggcccagcacgccgtggcgtagcgggattttctcatcctgttcacgcatcggatatttcccgacgcggatatgcgccatgacaaaatcaacatcggtaaacgccgcctgcggatcggtggtatagctgaattcaatctccggcgcctgctctttgaggatcactttgcacgcctcggcgatggtctcctggcgcgcgccgtcgttgtcgtaaaatttcagcgaccgcagcggaaaacgatcctggtttgccagcagcatcaggacaatgcccggggtgaaggtgctgccgccgcctgcgataacaactgagaattttttcatgatactgcctccgtcatggtggtatgttcggtcgaaagagaatctttcatcaggttttccagctggtcgcgcacctggggaacgtgcaggccgacgatgacctgaatcccgttgccgcggcgtactaccccgtgggcgcccagcgctttaaagacatcgtcactttgcgttttcgccatatcgaccagcgcgatgcgcagtcgggtggcgcagttgttgatgctttcaatgttgtcggcgccgccgagggcctgcaggaagccagcggcctgacccagccgggtctctggcgcggcggcggccgtggttttacctcgtgccgcctggtaatcggccttgctgtagagcttgatttcgctctcttccctgccaggcgtcttcaggttcagacgcaggatcagggtacggaagactacgaagtagagggcggtgaaacagaggccgatgcctatctgaatgaacatcatcgaagcgtggtgatggaacattgggatccagttttgcggcaagaattgatcgagcaggccgccgccgaagttgcctactaccccgcagatgtacatcaccgtcgccatagtcgccgccagcaccgcatgaacggcgaacagcagcggcgagatgaagaggaaggtgaactccagcggctcagtgatcccgaccagcatcgcggtcagggtggcggggatcagcagtccggcgaccttgacgcggttttccggcgcggcggtgaagtagagcgccagcgcaatccccaccgacccaaacactttcgagttaccgtgcagggcaaagccgccctccgggaacagcgtcttcagcggttccgtactctgactgaacgcctgcagatgctctgcccagtagacctgcagtccgccctccaccaccgcagggccaaagatgaacgggccatagacgaagtggtgcaggccggtggggatcaggatgcgctcaaggaagatgtaaacccacaccccaagcgccccggctgagcgcagaaaggcctgcagcgattcaatacccagctggacctttggccagccgagcagggtcagccaggcgcaagggatcatcgcgaggaaggcgacaatgaccacaaacgatgaaccctgaaagatgccgaggaataccggcaggggtttatcgaaatagcgattgtgcagggccgtcaccagaccggagatgacgatggcgccgataatgctggtgtcgagggttttaatcccggcaatcatcgtcaggccgctgccggccgtgggttcagcggaaaaatcgacgccgaagaagtggccccaggtcatccccatggcgttgataaagtagttccaggtgagaaagctcaccagcaccgccagacaggcccggccctgggcctgtttcgccaggccgatcggcagaccgacggcgaaaatcagcggcatattacgaaagacggtccagccgccctcctcaatgatgtgaacgatctgggcaaacaggctgtcgggtgcggtcagcgcttcgccgacgaacatcgggttgcgcagcatgatggcgataccgaccacaatcccggcaaaaggaaacaataaaaccggggtaaacatggcgccgccaaaacgttgtatttgactgagcattgggaaatcctcatgtaacaactcgtagggtgagtggccttctttttcttgattaccggcctgactggagaataaaaatttgcccgtccgacaacatgccgcgccgttgcgattcgtgatcccattcatggttttaatttggccaaagttgtctacttcgataacaaaagttagacatcgataagtcaggcagcgaaattaactaaatgaatgtgtcttaattgattgtaattaatctatttttttagaaaaaagagcacaaagcgacatccccttttcctgcacaagaggactactggtgatctacaaatccattgctgaccgcctgcggctgcggctgaattccgccgacttcgccatcggcagcccgctaccaggagagaaaaaactggccgaggagttcggggtggcgcgcatgactattcgcaaagccatcgatctgctggtggactggggattggttgtgcgtcgccacggctcgggaacttacgtggcgcgtaaagacgtccatcatgaaaccagcaatctgaccggcctggcggaagtgctgcgcaagcagggtaaagaggtggtgagtcaggtgctggccttcgaggtgatgcccgccccgccggccatcgccagtctgctgcggattaaaattgatgaacggatctacttctcgcggcgggtgcgctacgtcgacgacaagccgctgatgctggaggatagctatatgccggtgaagctgttccgcaacctgtcgctgagtcatctggaagggtcgaaatttgattatattgagaaggagtgcggaatcatcatcagcgggaactatgaaacgctgacgccggtgctggcggacaagcagctggcgcgctcaatgaacgtcccggagcagacgccgctgctgcgtattacctccctttcctacagcgacagcggcgagtttcttaactattcggtcatgttccgcaacgccagcgagtatcaggtggactatcacctgcgccgcgtccaggcgcaaagcccgctagctcagtccccagaacagcacggcgagtagctgcggggtgataatgcgcaggaacatcaccagcggatagacggtggcgtaagagagcgccgctgcgccgctggtggcgtgcaggttgttggcgaaggccagcgccggcgggtcagtcatggagccggccagcatgccgcacagcgtcagatagttcattttcgccagcatgcgcgcgaggatgcccaccgtcagcagcgggatggcggtgatgaaaatgccgtaagcgatccagctcagaccatcgccctgggtcagggtggcgacaaagtccccccccgattttagcccgaccaccgccagaaacagcactatccccagctcgcgcagcgccaggttggcgctcggcggcataaaccagtacagcttgccgatactgccgatacgcccaaggatcagcgccataatcagcggcccaccggccagtcccagcttcaatgctgcagggaagccgggaataaacaacgggatagatcccagcagtaccccgagtccgatgccgataaacaccggcagcatctggacctgctgcagcttctgctgagcgttacccagttcggcggccacggcgtcaattgcctccggacggccgaccaggttgaggatgtcaccaaactgcaggctggcgctgctgctggctaccagctcgacgcctgcccggttaagccgggagatcactacgtcatagcgctgtttgacgtgcagatcgcgtattttcttccccagcactttttcgttagtgaccaccacccgctccactttcagatcggtgccgcgcgtcgacagcgaggtggccacctcctggcctatcaccagctgcgcattgtgcaaatcctcaggtcgccccaccaggtgcagcaggtcgccagcctggataagggtgcccggcgcaggcaccatcaacagctcaccgcgtttcagccgcgaacagacgatgttgtcgttgttgagcatcggcacatcctgaatcgccatctggttgaggttggggttttccacccgcacgttgatggtgtgcaaatgagcgtggccgttaccgctgctctcctcaaaccgctgggcctctttctcgacattgatgcgaaagaacagacgcaccagccacatggtcagcagaatgccgcagatgccgaacggatacgccatcgcatagctcatccccatttgatcgaccacctcgaacggtacgccgagatcgcgcagaatttgctgcccggcccccagcgccggcgtgttggtcaccgcgccggagaagataccgagcaccaccgggagaggaatattgaacagcttatgcagcaccgcggtcaccaggccgccgaggataacgataaggatagcgaacagattgagccgcaggcctgagacccgcagcgaggcgaaaaagcccggccccacctgaataccgatggtgtagacaaacaggatcaagccgaattcctgaataaaatgcagcatcgggctgctgagggtgacccctgcctgatcgacaaagtggccgacaataatcccgccaaacaggacgccgccaatgccaaagccgacgccgcggattttgacattgccgatccacaaccccactaccgccaccagcgccagcacgctgaccgtcaatgctatctcactcatggtaccgtccctgtgaataacaccattaactacagggattatgaccgctgccaggtggattgtatgccgcctggcgcacaataatcatggagtaagatacgctactcaggcgcgttcttatttttcgctgcgatagtgagttgctgaatacttttctccggggaaggaagtgcttcaggcatagtgccacccaggtctttaatagtctggcgtactttttgccctacgtcataatgcgttttgttggcgagttgcttcgaatcaaccgcgtcccgacgtagtttttcttccgtttgggtagcacgaaacaggttggccgcgagctcagtcgatcccatatagtcgagtattttttggcttttctttaggcccttacgctcatggattgctttttggtcaagaccaccatagagacctttataaccatggttttgaaagacagcaaaatcaagagtcgtctcaacaccagcacgttgggccgtttcaaccagatgtttattatgctctttgagctcattgtgcaggaacagtcgcttttcatcctctcgtagagacttaaatatttgatcatcttgcaattcctggcgccgggtttgcaaggcaaagtacgtttgccccgcagcaatcaccggtttcgacggatcgccattttgcactaccagatagcaggcgtagcgtgagaggtggaaatcttcaagattcctgctggcgccagaacctaattcgaccattttgttggtttcaacaaaatggtctgccgagggatgaccactcgcctcacatgaaattatcgcttttgcaatgaccttataaaaattccgccactctttatagtcaagcaggggaccaaggttgcgggcagaccaatactcccgccccgcctcatcgctctttctaatcgcttcaaatggctgctgttcgttcataacgtatccttgtttgagtgagtcccaaagtatgattgttttttaaactgaaacacccgttgcagcaaggaagtttattgtgctctcgcacacaaaaaagccccgaaaatcggggccttataagttattcgcttaattaactatttaatgccggtcgttcgctgatggcgatacgctgcggggcgatctgctcaggctcattgcgggtcagatcgatatgcagcaggccattggtgaaggtcgcgccagagacctccatgttgtcggcgagggtgaagctcaggctgaaggcctggctcaccaacccctggtgcagccatgtggtctctttttccggctgctgcggcgtgcctttcaccaccagacgggtgccttccagttgaatatccagatcttcctgacggaaaccggccagcgcaagggtaatgcggtagtggttatcgtcgcttttttcgatgttatagggcgggaagctttggctttcaccggcggtttgcagggcgctggccagtttgtcaaaaccgatccattgacgcagcaggggggataaatcgtagttacgcatactgttttctccttctaagaagcgagtgaatacctgcgaattctgtaaattcgcatctgctccctgacggcgagcaggttgttacatcaggccgccacgcggcctgaaacggacaattagttgatttcgatgcggcgcggcttgttcgcttccgggatcacccgttccagatcgatatacagcaggccgttcaccaggttggcgccgcggacgtgaatgttttccgccagctggaatttgcgctcgaagttgcgctcggcgatcccctgatacaggtaggtccgctctttctgctcggcggcgtgggcgcctttgacgatcagcagattgtcctgggcagtgatctccagctcgctttcagcaaagccagccaccgcgatagcgatgcgatagtggttttcgtctaccagctcgacgttatacggagggtagccgccgttgctctggctttgattgttttccagcaggttgaacaggcggtcgaaaccaatggctgaacgatatagcggggaaagatcgaagttacgcatagtaaatagctcctgaaaatcagcgagaatcaaatgaccttccatcgtggacaggccgcggtaatccggaatacccctcaggcgtattctcagtgggttacacctataaaatgggtttctccccgtccttttcaagggattgagggcaattttttttgcagtttatcgatgattgcttagactgggtggaggagcacaaaaagcaaagtgcgatgcccgccacagtgcggcgcaataacactatgcattcacgggatggcccgatataaccgctgaaaggttatctcaacgcccgaaacgacaatggaagaacaatgaaaagcagacgactgttaaagctggtcctgttcagcgggataataagcctgagcggttgctccagcgtaatgtcacataccggtggcaaagagggaacctatccgggcacgcgatccagtgcgcaaacgctgggggacagcgataccaactggggtgtgaaatcgctggtggcgctggacatgccgttcaccgccgtcatggataccctgctgctgccgtgggatatgttccgcaccgacagctcaatcaaatctcgggtcgaaaagagcgagaaggctacgctggcgaccaactcggtgatcccgccagcgccgatgcctgcccagtaagttatcgtccggtctgcgtaacccacagctgacgataaccgtccacctcctccatccaggcaatctgtttaccgtctggcgaaaagacgatcgcgtccgccgagggcgcatgcgcatgcgtatcggttaaaaaggtgatatctcccgtaccggcatggcagcaggcaatccgatcctccagcgcaaaacccagccactctcccgacggatgccagttaaacgccgactggatacccgacgcgtgatgcgtcaactgccgcggctcgcccccctgcggggaaataagccacagctgcactacgccggcgtcgtcgcgcatcagaaaggctatcgccgtcgcctggggattggcgcgcacccagtggcgcgggacgttcaccagtcccgggtagcggcgatggtgggtgaaggtcaaacgacgctggctgacgcccgccggcggcgccggcattgtggttgcggtaccggccagcggcgccccgccaggctgcttccagccggcttcatcctgcggcagatcgacaataaacagctcaggcactttatcgccattttccgccagcgtatcgccaataaacgccagagtatggttcccgacccagccctcctcataggcgcgattaatctcatcgctgcccggcgcgggtgccggcgtcgtgcggcttaccagcacgcaccagtggctgccgccatattcgcgcggatgctgtccctgcggcgtcaccggtccatagggcgccgccacgccgacgttgcgcagatccagcgccggatcgcgctcgtgcagcacgtgatcgttgtaggtaaaactgacaaactgaccgttggggctatagacatggacgtggctgccgccgcgcagcgcgccgggcgtgtaggggggggtaatgtccatggcgtccagattctcgacagccccctgaaaggccaccaccccgcggcgatgatgaaaatcatactgccactgcgcatccggccgctcggggccatgaataaacacatagcgctcctgggttggatgcacggttaccacgcccacgtgcgcgccctgcgtggcacgataaatggtctccacagtaccgctgtttacgttcactcgctcaatggtttcgccggtaaacgatgcgccggacggacgaacgtcgaataccagccactggctgtcgggagtccaggtattaatattggtaagctggtgatgacggggagcaaaagtgacttgtttcatgacgataccctgatgcgagacttacgcatcagggtagcgtatcgcaaaaaattagcctacacgtttcacatcgccgaccagcaggatataagacagcgcgcctattaacgccaccacggagatataaaccagcgccgggccaaagccgtaatcctgcgccagatagccaatcaccagcgggacggtgatgccgcccaggccgccaacaaagttaaacaccccgccggtcaggccgatcaggcgcatcggcgccagggaggagaccagcgaccaggtgatagacgcaaaaccgttaccgaagaacgccagcgccatcagcgccatgatccagatggggtcgttggtgtagtttgcccccatgatgcaggtggagatcaacagtccacagatgatcggcgttttgcgcgccacgcccagcgagtagccttttttcaccagcttatccgccagccaaccagacagcaggacgccaaaaaacgcggcgaggaagggcaccgtggtcataaagccggccttcagcgcggtgatgcctttttcctgggttaagtagttcggaaaccaggtcaggaagaaccacagcgtcgaggttaccgcgaactgtccaaggtaaacgccaaccagcttgcggtgaaaaaccagcttccagtccgctttcgataacggttgacgcgcctctttcttcagcggcgcatcgccatccaccaggccgccgccgtcgcggatatagtcgagttcggctttactgatgcttttagtcaggcgtggcggttgataaaccttgaaccagatcagcgaccagataatgccgataccgccggtaacgataaacacccagtgccagctcaatagctcctggatccagatcagcagcggcgtgaggaaagccagacccacaaattgccccgaggtataaaacccgacggcggaagcgcgctcgtgctccgggaaccagctggtcaccatgcggttgttggtcgggaaggctggcgcttcgaagatgccggtaatggcgcgtaaaccgataagcgacattaaaccggtggcgaagccttgtagcaacgtcgccaccgaccagccaaatatagcgataaagtaggtaagcctggatcccacgcggtcaaggaaccaaccgccagggatctggcagagggtatacagccaggcaaaggcggaaaatacgtagcccatttccgctttgctaataccaaactcctcctgaatatgcgccgaggcgacggcgaggttggcacggtctacataacaaataaccacggtaataaagatcatgatgagcgtcagataacggcgacgcccggtttttacagcggtaactgaaatatccatcgcaatctgtctccagattttgggcatagcgaagccgctcaccatgcccggtaatttacagagggtgtttttgttttttattaataactatgttgcgatgcgctaaataattcgtgctggggaaaggcggcaaattttcgcatccctgggagcatacaatagtatgtgaccagggtaagaaaatgcagccaacgcatcaccagtgcgaagtatgacgcgcatttaccattcggcgacagatccatcctcataccgccacaacggatttcgccagtccggcgcgtttttacttaactcaatcacgcgggcctcatcaatttccacgcccagccccggcttcatcagaggtttaaagaagccgccttccatattgaaatcttctttgtttttcacaaaatcaagcagttcggcgcctttgttgtaatggatccccatgctctgctcctggaagaccgcgttatgcgaaacgaaatcaacgtgcagacaggctgccagcgcgatcggccccagcggacagtgcggcgccagcccaacgtcataggcttccgccatgccggcaattttatagcattcggtaataccgcctgcgtgcgacagatcgggttgtaaaatagccaccccgcccgcttccaggacccgtttaaattcaaagcgcgaaaacatacgttcgccggcggcaatgggaatatgggtttgcgccgccagccgcggataatattccgcctgctcggctaataccggctcctcaataaataatgggcgatatggctccagctctttaattaataccttagccatcggcgcgctaacgcggccgtgaaaatcgagaccaaactcaatttcattgccaaacgcttcgcggatttgcgccacggtattcaccgcggcatcaaccgcgcgggaattatcaatgatacccatctcttcgcagccgtttaatttaaaggtgtcaaaaccaatgccgcgcagcttcttaatcccgtcaatcacttcggcggggcggtcgccgcccacccagctgtaggctttaattttgtcgcgcaccagcccgcccatcagttgccacactggggcattcaggaccttacctttaatatcccatagcgcctgatcaataccggcgatggcgctcatcataatcgggccgccgcgataaaagccgccgcggtacattacctgccacaggtcattaatccgcgccggatcctgaccaatcaggtaatcgccaaattcatgaacggctgcctccaccgtacgggcgcgcccttcaatcaccggttcgccccagccgacgatgccttcatcggtttcaatcttcaggaacatccaacgcggaggtaaacggtacgtggtgatattggttattttcatttcactgcctctcgatacgcttttacgaatgcggctgcctgctgcgcggtacgttcaaccggctggccggcacgatagagatcgctacccaatcctgccccaacacagccggcattaatccactgcgccaggttttccggcgtcacgccgccaacggcaaagaccggaacctcgggcggaagcacggctttcaacgctttgatgtaatccgggccaaaagccgatgacgggaagattttcagagcctgcgcgccggcatcgagcgcgctaaaggcttcgctggcggtggcgcagcctggacacacggtcatgccgtaacccaccgctcgccggatcacttccggttgaatgtttggcgtcacaatcagccgacagcccatggccgccagcctgtcgacctgctccggttgcagcaccgtgcccgcgccgataagcgcctgctcgccgtaagcgtcgacgacctgcggaatacttttctcccactgcggcgagttcagcgggatttcgaccgcgtcgaaaccggcgtcgataacggcgccaacgtgagccagcgcctcgtctggcgtaataccgcgcaggatagcgataagtggaaggttagtttgccactgcataagcgatgctccttattcctgtctgaaatgccgtatcgcccgcaaccgcgctgacttcgcggccaatggcggcgaatgcctgctgatagcgggatgttaacgatgacccagcgacgagactgatcgcctgctgtccggcgaatgtgtcgctgagggtggcaacttcagcgccaatcagcaggccggaaagaaattcgctaacctgctcgcgaggcagcgcgcccagcacgtgcgaagcgcgaacttcaaacagctgcggcaggacggcggggttgttgataccgcgctgcagacctgccgcgaatgcggcagcggacgtttcctgcggcggtaagccggcgcccaccagcgagtgctgaagcaacagatgatgcaattcaccggtcaaaacggtacgaaaatcgtgaatttgccggcgatcggccagtacccacttgcagtgggttcccggcatcacgtagacagacgaaggggctaaggcgcgagcgcccagcagctgcgtttcttccccacgcatgacgttatggttatcgtcacgggaaacgcaaaggccgggaattatccagatattgtcgccaacggcagttaactgctggccaatatccgagaaagcggcaggaagcggcaaataaggggcgattttccagcccacgttgctgccgaccatccctgccatcaccaccggtgtggcgccatcgcgccagtgctgtgtgatttccgctaacaccgcagcgggagagcgaccattcaggcgcgttacgcctgcttcagattgcctgctttccaggcattcttcgccctgataaagccaggcgcgtaaattcgtcgatccccaatctattgcgatgtagcgagccgtcatgtgatttccttaagccttcgtgtcgagctggcgatcatcgtcaacgccgcctgctccgccgcgtcgctatcctgatgccgaatggcgtcaaatagcgctttatgttcctggagggttttcggcatgttgccttcatcgcccatccaggtccgttcaaataccgcccgctgcagcgaactgatcgccacgctaagctgctgcaaaaccgggttatgtactgactgcagcaccgcctcgtggtagcgaatatccgcttcgttaaaggcatcccggttttggttgttggcgatcatgtcattgagcgccgactcgatttccgccagatcgcttgaggtggcgcgttccgccgcccaacgggcaatggcgggttcaaccaggttgcgcacttcactcatcgcgctgataagacgcgggtcatagtcattttccagtacccactgcagcacctcggtgtcgaggtagttccactggtttctgggagcgacaaacgcgccgcgatagcgcttcatttcaatcagccgcttcgccatcagggaacgaaacacttcgcggatgatgttgcgcgaggtttcaaactcctcacagagttccgcttcggccggaagcgccgaacccgggacgtatttaccgctgacgatctgtttgcccagcgagatcacaatgcgatcggtcttattgagagtcatggagagtccttgtgctctatgtgtactgctctactttaccgtcgctgctgaatttcgcctcatgtttgtactactaacgtgatgctgtacgttatcaacatgagcgtaatgtagtacaacattattgtattgtactacaatttggatcacaaaaagaacaattcatgaaaattaaagcgcagcggccctggcaagaggcgataagagagaaaattaaggggaggaggcgttaaaacgcttcgccgacctggaagtaaaagccgctgctgcctttgccgataccgtagtcgaggcgaacattaacgcgaggtttgaattcaaagcggtagccaacgcccgccgaaggcagccagcggccattattcagcgacgacagtgagggccccatggttcccgccccggcccaggcgacaatcccgtgccgccaggtgagctgccggcgatattccagctgaccgctgacgacgtttttatcccggtagcgcccctggtagtagccgcgcatccgttcatcgctgccgagcagcggcatcatgctccacggtacctcgccctgggtgaaggcgccatcggcctcccaggcgagcacgcttttctcgctcagggcatgataatggctatagtgcagctgaaattcctcaaagcgggtatcgctacctaatccgggcgcatagtgggtatagcggaggttggcatactgaccccggcgcgggttagggacaaagtcgcgatcgtcccagttaatatcgatgctggcgccggagctgaataccgacggcccctgcggagtgttttctatcttcggccgatcgtcatggtccatctcagcggcattctgcgccgccagcgaccatcccgccccgagataaacatgatcgataagctgccgataaagggtgggtcgcagggtcagtacctgggcggtatacttctctttttcattgtctttatctccggcatgaaaaccctgcccccaataataagtgggcgtattggctatcgacccttcgacaaaaacgcgccacagatcacgatcgaaaaaggtgtagtttttcacgttgaggccaaaggcgccggtagagctggcgtagccgctgagcgtcagggtcgagttctggctggtggtaacctgcgggtcgggacgatacaggccgacgacagcggtgccaatgcccaaccctagttccggcgtatagaacggaccgggcatcacgccccagtcgatgcctttgctggcgtcgaacttatcgctggcgccgagatgctgcagccagccgtcgattttctcgcggctgagcgcctcggcctggctgcctgtcgggcaggccatcagcagcagaaaagtgataaacagtcggctcaaaagcgatactcgccggcaataaagaaactgttacgttcggcaaagccaaactcggtagtaatattaaaattctgcgtcagctcgtattgcgcgcccaccagaacgttccatggcgactgaagatgctgcttcacatcgaagcgaccgttattgtcctggttggccagattaaccatattctgcagcatcggcgacggcatcgagagatcgctgaggctgcctttaaactcctgctgcacatcctgatacatgctgccaacccacagatttagctttccggcggggagatgcagcgcatcgaccgatggcgtactgaaacgatagccaacgcgcggcgaaaaggtaagcgcatcgatgctgccgtcgaggatatcaaagcgcgtttgcgtgtagttggcgtccagcacggtaaaccaattgccgacgccgcccaccagggtggtgcccatcccgtaggtagtacctttaaaatcgagacgaaagtcgagatcctgcatccccggcaggggcaccactttaccgttcggtcccttcaggccgacagctatctgcgaaattgaatgcccttcggtgtgccccaccaggccataaacgttcataaacggcagcagccaggcatccagcttgagcgtctcggttttgctgctttcccgcgtatgaccaacgccaatctggaaagcgttatccagcgagaccggcccattagcgaaaatgttattcacggcgtgcttgcagacaggatccttaccgcaatcgatattgcggccatccagcgacagcccggtgaagtttatgctgtcgacattaatattctgccgcatatccatatagttaatgctgacgccaaacggcagcggcaggacgtagccgcgctttctggcctcatcgcctagcaaagggagtagcgaggacgatgctgccgccgcaggctggcgactttctggcgccggcagatccgcgggctctgcgccgtgataggcatacgccggttcgagcggcgccgttggttccgcggccgcgcaaatctgaacagaggcgaatggcagcgtaaccaacatcaaacggtggtatatattcatgaaaagtatgatgttagttctgagttgctaaaaagagggcgggtagcttatagaatcccctgcaaggattgagggatttaaatgcggattaacatctgttcatgaaaaaagagaagacagacccggcgaacgccgggccggaaagaagtttacgctaaaacgtatttttcaatggcgaaggcaacgccatcttcaaggttcgatttggtgatgaagttcgccgcttctttgaccgcaggaatggcgttatccattgccacgccgacgccggcaaattcaatcatcgcgatatcattttcctgatcgccaatcgccataatctcttccggcttgatgcccagcgcatcggccagcgacttcacgccagtgcctttattgacgcgtttatccagtatttcgaggaagtaaggcgcacttttcagcacggtgtacttctctttcacttccgccggaatacgggcgatggcctggtcgaggattgccggctcatcaatcatcatcactttcagcagctggatctcaggatccattttctccgcttcgcagaacaccagcggaatggttgccacataggattcgtggacggtgtagtagctgatatcgcggttcgcggtatacagcgtattgcgatccagcgcatggaagtgggagccgacctcgcgggagagctgctcaaggaagcgatagtcgtcatagctcagcgcggtttgcgcgacggtgcttccgtcaccagccttctgcaccagcgcgccattgtaggtaatgcagtaatcacccggctgctccatatgcagctctttcaaatagctgtggacgccagcgtaagggcgaccggtggtcagcaccacgttaacaccgcgctcgcgcgccgcggcgatggcggctttcaccgctggagagatggtatggtcgggcagcagcagcgtgccgtccatatcgattgcaatcagtttaatagccatagggtccccgggtaagatgagtctcccctcatgctaacgcgattccgctcaaaaaacagtaaaagtgtcggccagaaagggggatggaaccacagcagcggattcctcttttagcggcaaaagaaaagcccgatcgcgcgatgcgaccgggcttatacatcctgttgccccggtaaaactcgttaccgggaaacatgcggcttaaatatcgatattcgccgctttcagggcattctcttcgataaacgcgcgacgcggctcaacggcatcacccatcagggtggtgaacagctgatcggcagcgatggcatccttgacggtcacgcgcagcatgcgacggctgtccggatccatggtggtttcccacagctgatccgggttcatctcgcccagacctttatagcgctggatggagagaccgcgacgggactctttcaccagccagtccagggcctgctcgaagctggctaccggctgacgacgttcgccgcgctcgatgtaagcatcttcttccatcaggccgcgcagtttctcgcccagggcacaaatacgacgatattccggccccataatgaactcgttatccagcggatagtcggtatccacgccgtgggtacgtacgcgaataaccggctcaaaatgctgcagttctttgttctcgtggagatcgaatttccactggctgccgtgctgttctttctcgttcagctcggagaccagggtgttcacccagcgggtcaccttctgctcgtccgccaggtcggcctcggtcagggtcggctgatagataagctctttcagcagcgctttcgggaagcggcgctccatgcggccaatcattttctgggtggcattgaactcggcaaccagtttttccagcggttcgcccgccagcgccggcgcattggcgttggtgtgcagggtcgcaccgtcgagcgcgatggagatctgatactgatccatcgcttcgtcgtctttaatgtactgttcctgcttgcctttcttcactttgtacagcggcggctgggcaatgtagacgtggccgcgctcgacgatctccggcatctgacgatagaagaaggtcaacagcagggtacgaatgtgcgagccgtcgacgtccgcatcggtcatgatgatgatgctgtggtagcgcagtttatccggattgtactcatcgcgaccgataccgcagcccagcgcggtgatcagcgtcgccacttcctgggaagagagcattttatcgaagcgggctttctcaacgttaaggattttacccttcagcggtaggatcgcctggttcttgcggttacgaccctgtttagcagagccgcccgcggagtccccttccaccaggtacagttcggacagcgccgggtcgcgctcctggcaatccgccagtttgcccggcaggcctgccagatccagcgcgcctttacgacgagtcatctcacgagcgcgacgtgcggcctcacgggcgcgcgcggcgtcaataattttgccgaccacgattttcgcatcggatgggttttccagcaggtattcgctcagcagttcgttcatctgctgctccaccgccgatttcacctcggaggagaccagcttgtctttggtctgcgaggagaatttcggatccggcaccttcacggataccacggcaatcaggccttcacgcgcatcgtcgccggtggcgctgactttcgcttttttgctatagccctctttgtccatataggcgttaagagtacgggtcatcgccgcgcggaagccggcgaggtgagtaccgccgtcacgctgcggaatgttgttggtaaagcagtagatgttttcctggaagccgtcgttccactgcagggccacttccacgccgataccgtctttttcggtggagaaatagaaaatattcgggtggatcggcgttttgttcttgttgagatactcaacgaacgccttgatgccgccttcgtagtggaaatggtcttctttgccgtcgcgcttatcgcgcaggcggatagagacgccggagttcaggaacgacagctcgcgcaggcgtttcgccaggatgtcatattcaaattcggtgacattggtgaaggtttccaggcttggccagaaacgcaccatggtgccggttttgtcggtttcgccagtcacggccagcggtgcctgcggcacaccgtgttcgtacatctgcttgtgaactttgttatcgcgctggataaccagctccagcttctgcgacagggcgttaaccaccgagacgcctacgccgtgcagaccgccggaaactttataggagttatcatcgaatttaccgccagcgtgcaggacggtcatgataacttccgctgcggagacgccctcttccgggtgaatgccggtcgggatgccgcggccgtcatcctggacggagacggagttatcgctgtggatggtgacaacgatatctttgcagtaacccgcgagcgcttcgtcgatagcgttatccacaacctcgaataccatgtggtgcagaccggtgccgtcatccgtgtcgccgatatacatacccgggcgcttacgcaccgcatccagccctttcaggactttgatactggaggagtcataagaattcgacatcaacgtttctcgctcatttaatcttgggttaatccgttattttacctttttccacgcggaacatcttcgaatttttgtccgacatgtccataacgtgttcagcgctgatcgcgctgacgaaaacctgcgactgcgtcgctttcaggcggctggataacagaccgcggcgggcatcatcaagttccgaggcaaaatcatctatcaggtacaggcagcgccgcccgctgacgcgggtgaggaactctccttgcgccagacgcagggcgcacatcagcagcttaagctgcccgcgcgacaaggtatcttccaccggcgccccgtcggcgcgaatgcgaaaatccgctttatgcgggccgtgggcggtgtaggttaacattctgtcgcgctcgaaattccgctccaacacctccgcgtagtcggtctctttttcccagccgcgctggaaagagaaggtgagcgtgaattccggtaaaaattgctgacaggtatccgccatgtcttcgacgatagcggcgctgtattcggcacgccagcggctgatctgctccgccagcgggattaattccagatcccaaggccgcagctgggcatagcggctgacctgacgcagcgcggcgttgcgctgcttgaccaggcgcttcagattgctccaggcggtgaagaatccggcttcgttatgaaagcatccccagtcaaggaatgctcttctgtatttggggccgccgttgagtaaagtaaacccctccggcgtaatcagctgcatcggcatcaggtgcgccagctccgccactttgtggccgtcggtgccgtcgatacgcaccttgctgtcgccctgtttgtctttggtcaggccgatggcggtttcccgctcttcgccctgcagacggccatgcagaacaaacgcatcctgctcgtggcggatcacccggccaatttgcaaactgcgaaatgcccggccgtggccaagcgtatagatagcttccagcacgctggttttgccgctgccgttcgcgccaaccaggaagttaaagccgggagataaagcgagatccgcatgttcaatattgcggaagtctttgatgagcaagcgcgtcagtgacatatcagcgttctttgggccagggcgttatcggcgcagccagtttcaacgcggactgcgcgcagaccctggagcgtacacaaagtacgtgacaggggcgagcacagcccaggttgaaaatggcaagtaagatagcccgatattttccactacaatctcataggcatgacgacataggctgcggattgagaggccgcatcctcaatctgcacgctcgacaccgaatccgtcagcagaatgcgtacattctcgcacttcagcgcattcagcacatccagcacatagctaacgttgaagccaatctccatctccgttccggcgtaggtcacatccaaaatctcttccgcttcttcctgttccgggttattggcggtgattttcagctggttttcgctaacgtacagccgcacgccgcggaatttttcgttggagagaatcgccgcgcgcgcaaaagcctgcttcagaatatcgcagcccgcttcgaggtgtttatccggatttttcggcaatacgcggcgataatccgggaaacggccatcaaccagcttagaggtgaagataaaatcgccaacgtgggcgcggatattgttgctgccaatctgcacgcgcagcggggtatcgccgccgtcgagcatccgcatcagctcaatcacccctttacgcggcacgatcaccgaatggttcggcagcgacgcttccagaggcatcgaacagaccgccaggcggtgaccatcggtggccaccgtgcgcagttcgctgccttcggtttcaaacagcatgccgtttaagtagtaacgaacatcctggtgcgccatcgagaactgggtggcttcgatcagacgcttcatggtcgcctgcggcagggtaaactccacttcactctgccagtcatccagattcgggaaatcggcggcgggcagggtcgacagcgagaagcggctgcggccggaacgcaccagcatgcgatcgccttccaactgaaccgcgatctccgcgccttccggcaggccgcggcagatatcaaagaatttccgtgccggaacggtcgttgcgcccgcttcgtgcggctgaaccagcgccacgcgcgccaccatctccatttcaagatcggtaccggtcagcgacagcgcgccgtccgcgacctgaagcagcaggttaccgagaatgggcagcgtcggacgaccacctaacggaccgctcacctgttgcagcggttttaataaatgttcacgttctacggtaaatttcatagcgtcacgaggataatgttctgattaaattggaaaaatcttctttaatgtcgtggctttcttcacgcagctgctcaatcttgcggcaggcgtgcagcacggtggtatggtctcggccgccaaacgcatcgccgatttccggcaggctgtggttggtcagctctttggccagcgccatcgccatctggcgaggacgcgccaccgaacgggagcggcgtttggacagcaggtccgctaccttaatcttgtagtactccgccaccgtcttttgaatattgtcgatggtgaccagtttttcctgcagcgccagcagatcgcgcagcgcttcgcgcacgaaatcgatggtgatcgcccggccggtgaagttggcgttggcgataacgcggttcagcgccccctccagctcacgcacgttcgagcgcagacgcttggcaataaagaacgccacttcgcccggcaggcggatgtcgttctcgtcggcttttttcatcaggatcgcgacgcgggtttccagctccggcggctcgatcgccaccgtcagcccccagccgaagcgggattttagacgatcctcaacgccgttgatctcttttggataacgatccgacgtcaggatgatctgctgattaccttccagaagcgcattgaaggtgtggaaaaactcttcctgggatcgttctttattggcaaagaactgaatgtcatcgatcagcagggcgtcaacggagcggtagtaacgcttaaactcttcgatggcgttgttctgcagcgctttaaccatgtcctgaacgaaacgctcggagtgcatatagaccactttcgcgttcggcttacgcgccacaatgccgttccccaccgcgtgcagcaggtgagttttacccagacccgtcccgccatagaggaacagggggttgtaggcgccgcccgggttacccgccacctgacgcgccgccgcgcgggccagctggttagatttaccttcgacgaagttatcaaacgtgtgtttcacgtgaacgttagagcggtaggtcggctccgccggcgccgggacattatcccagccagggcgcacgatcgtcggcgccgcgcgcgcggtctgcacctgcgccgccggaatggccgccgcagccgggcttaccgcccctttctgcagcgagctggcgggcttagcgcccacctcaaaacgcagctgcggggcgtccgcaccgcaaaaatcattgaggagtccattgatattattgaggtatttgtcccttacccagtcgagcacaaaacggtttggcgcatacagtgccagcgtgttatcgctcagttccgcctgcaatgggcggatccacatgctgaattctgtggctggtaactcatcctgcaatcgggcaagacactgctgccaaagcgaaagtgacacggcggactccactcgaacataaaatcgatatcaaagaaaaactgaaacaatcgtgattgttggcacacgtcgacaagaccctgcattagccgaaaagcccctgcacaaaaggggtgacgtgcgaaccgctatctgcggttattacccgctgcggatccggggatcgcgatcgggaccggggatcatagcctaaactgagaaagagatcttgtgtttctcaacagattcttcccgatttatccacaggaaggatcgaaaccgggtaagtgtaatcgatcctgcggggagtgaagcacgatttccgccgcatattggaaaaattaatgagctatgccgcttttgggcggaaacgatctaataaagatccttgcggatccttgcgctttactggccaggccgtataatcccccacccggcgcgtaatgcccgttttcgtcacgcgtctcagcttattttttgtgcgacgaggtgcgagaaataaggaaagagaattgactccggagtgtacaattattacaatccggcctctttaatcacccacgctgaggcgtaagtcgttcgaagttcgttcgggtctacgcaaaagtcagtgaatttattcaagtttaggtagaaatcgccatgaaacgcacttttcaaccgtctgtactgaagcgcaaccgttctcacggcttccgtgctcgtatggctactaaaaatggtcgtcaggttctggcacgtcgtcgtgctaaaggccgcgctcgtctgaccgtttccaagtaataaagctaaccctgcgtggttaagctcgcatttcccagggagttacgcttgttaactcccagtcatttcactttcgtcttccagcagccacaacgggctggcacgccgcaaatcaccatcctcggccgcctgaattcgctggggcatccccgcatcggtctcaccgtcgccaagaaaaacgtgaaacgcgcacatgaacgcaatcggattaaacgtctgacgcgtgaaagttttcgtttgcgtcaacatgaactcccgccaatggatttcgtggtggtggcgaaaagaggggttgccgacctcgataaccgtgctctctcggaagcgttggaaaaattatggcgccgccattgtcgcctggctcgcgggtcctgatcggcctgattcgagtttatcagcgcctgattagtccgctactcgggccgcattgtcgtttcaccccaacctgttctcaatacggaattgaggccttacgcaggtttggagtgataaaaggcagttggttgacgatgaaacgcgtattaaaatgccaccctttacaccctggtggtgacgatcccgtcccgcctggaccatttgataccagagaacactaacgatggattcgcaacgcaatcttcttatcatcgctttgttgttcgtgtctttcatgatctggcaagcctgggagcaggacaaaaatccgcagccccagcagcagaccacgcagactacgaccacagcagcgggtagcgccgccgaccagggcgtaccggccagtggccaggggaaactgattacggttaaaaccgacgtgcttgagctgactatcaacaccaacggtggcgatattgagcaggcgctgcttctggcgtatccaaaaacgctgaaatcgaccgaaccgttccagttactggaaaccacgccgcagtttgtctaccaggcgcagagcggcttaaccggccgtgacggcccggataacccggcaaacggcccgcgtccgctgtacaacgtcgataaagaggcgtttgtgctggccgatggccaggatgagctcgttatcccgctgacctacactgacaaagccggcaacgtcttcaccaaaaccttcaccctgaagcgcggtggctatgcggtgaacgtgggttacagcgtgcagaatgccagcgagaagcctctggaagtctcaaccttcggtcagctgaagcagaccgctgcgctgccgaccagtcgcgatacgcagaccggtggcctgtccacgatgcatactttccgtggcgccgcgttctccactgcggattcgaaatacgagaaatataaattcgataccattctggataacgaaaacctgaacgtcagcaccaaaaacggttgggttgccatgctgcagcagtacttcaccaccgcatgggtgccgcggaataacgggacgaataacttctacaccgccaacctcggcaacggcgttgtcgctattggctacaaatcgcagccggtactggtgcagccaggccagaccgacaaactgcagagcacgctgtgggtcggcccggctattcaggacaaaatggctgccgttgcgccgcatctggatctgaccgtcgactacggctggctgtggttcatctcccaaccgctgttcaagctgctgaaattcatccacagcttcctcggcaactggggcttctcgatcatcgttatcacctttatcgttcgtggcatcatgtacccgctgaccaaagcgcagtacacctccatggcgaagatgcgcatgctgcagccgaagattcaggccatgcgtgagcgtctgggcgacgataaacaacgtcaaagccaggagatgatggcgctgtataaagcggaaaaagtaaaccctctgggcggctgcttcccgctgattattcagatgccgatcttccttgcgctgtattacatgctgagcgcctcggttgaactgcgtcatgcgccgtttatcctgtggatccacgacctgtctgctcaggacccgtactacatcctgccgatcatcatgggcgcgaccatgttcttcatccagaagatgtcgccgaccaccgtgaccgacccgatgcagcagaagatcatgacctttatgccggtcatcttcacggtgttcttcctgtggttcccgtctggcctggtggtgtactacatcgtcagcaacctggtcaccattattcagcagcagctgatttaccgtggtctggagaaacgtggcctgcatagccgcgagaagaagaaatcctgatactcttcattcttcaagccaacgcatctgcgacttggataatttagagtagttacggtaacgttaatgccagagaaggcggtcaatggaccgccttttttacatctacatagagagtcaccatgagccataacgacactatcgtcgcccaggcaacccctccgggacgcgggggtgtgggcatcctgcgtatctccggtcttaaggcgcgcgacgtcgcgcaggcggtgctgggcaagctgccgaagccgcgctatgccgactacctgccgttcaacgacgttgacggtaccccgctggatcaggggattgcgctgtggttccccgggccgaactcctttaccggggaagatgtgcttgagctgcagggccacggcggcccggtcattctcgacctgctgcttaaacgtattctgaccctgccgggcctgcgcatcgccaggccgggtgagttttccgagcgcgcgttcctcaacgacaagctcgatctggcgcaggcagaggccatcgccgaccttatcgacgccagttcagagcaggcggcgcgctcggcgctgaattcgctgcagggggcgttctccgcgcgggtgaatcatcttgtggaagcgctcactcacctgcgcatctacgtggaagcggccattgacttcccggatgaagaaatcgatttcctttccgacggcaaaattgaagcccagctgaacgaggtgatggccgatctcgacgccgtccgcgcggaagctcgtcagggcagcctgctgcgcgaagggatgaaagtggtgatcgccgggcggccaaatgccggtaaatcaagcctgctgaacgccctggcgggccgcgaagcggcgatcgtcaccgatatcgccggtaccacccgcgacgtgctacgcgagcatatccatatcgacggcatgccgctgcatatcatcgataccgcaggcctgcgcgatgctaatgacgaagtggaacgtatcggcatcgagcgcgcctggcaggagattgcccaggccgatcgggtgctgtttatggtcgatggcaccaccaccggcgccgttgacccggcggagatctggccagactttatcgagcgcctgcccgctaaactgccgattaccgtggtgcgcaataaagccgatgtcaccggcgaagcgctgggtatcagtgaagtaaatggccactcacttattcgcctgtcggcacgtaccggcgaaggcgtggaggtgctacgtaaccacctcaagcagagcatgggcttcgataccaatatggaaggcggcttcctcgcccgccgccgtcacctgcaggccctggaagaggcggcgaaccatctgcagcagggcaaagcccagctgctgggcgcctgggccggcgagctgctggcggaagagctgcgcctcgcgcagcaggcgctgagcgagatcaccggggagttcacttccgacgatctgctgggccgcatcttctccagcttctgtatcggtaagtaaccgtcagtccgtaaacgttcactaacccgtattaacgccgcgttaatgcgggttttttcttgccctttgcaacgcaacgttctctacttttatctccccctctgccgcgagactaaaacatgaccgttgaatataccgtgatcgagaaggtgccctccgccgaagcgttttgccacctgcgggtagccgccggcatgtcgccgcgccccctggaaggcgccagagccggactgccgcatagctgttatggcgtacatatcctctggcaggagacgccgatcgcgatgggacgcatcgtcggcgacggcgcgattaatttcgatattgtcgacgtcgccgtcgatccggctcaccagggaaaaggccttggccggctggtgatggagaagctggtcgcctggctggacgctaacgcctttgatggcgcctacgttacgctggtggcggatgtgccggaactgtacgcgaagttcggcttcgaaagcgttcgcccggagagcgaggggatggcccgcgtctggcgaacccgcagtcgttagctcgcatttcctgccaggaaaagagcgttgtccaaatggcaactcgtcttacggcgcgttcctcactatgctgaacgccattcacatcgcgaggatcccatgacacgctttcttctctgcagctttgccctggttctgctctacccctccggcatcgatatgtatctggtcggcctgccgcgtattgctcaggacctgggggccagcgaggcgcaattacatatcgccttctcggtctatctggccggtatggcctccgcgatgctgtttgctggccgcatcgccgaccgctcggggcgtaagcctgtcgctattgtaggtgcagcgatctttgttatcgcctccctgctctgcgcccaggcgcataccagcagccacttcctcatcggacgctttatccaggggatcggcgccggcagctgctacgtggtggctttcgctatcctgcgcgatacgctggacgaccgtcgccgcgccaaggtgctgtcgttgctcaacggcatcacctgcattatccccgtcctggcgccggtgcttggccacctgattatgctgaaatatccgtggcagagcctgttctacacgatgaccggcatgggcgtcatgatcgctgtgctgtcggtctttatcctgcgtgaaacgcggccgacggcgcctccgcaggcagcgtcaccgcagcatgacgctggcgaatcgctgttgaaccgctttttcctcagccgcttactcattaccaccctcagcgtgacggtgatcctgacctacgttaacgtctcgccggtactaatgatggaagagatggggttcgaccggggaacttactcaatggcgatggctctgatggcgatgatcagcatggcggtctccttctcaacgccgttcgccctgtcgctgtttaatccccgcaccttaatgctgacctcacaggtgctgtttctggcggcaggcgtgacgctgagcctcgccactcgccaggccgtcaccctgatcgggctgggcatgatttgcgccggcttctccgttgggttcggcgtcgcgatgagccaggcgctggggccgttcacgctgcgcgcgggcgtcgccagctcggtcctcggcatcgcgcaggtgtgcggttcatcgctgtggatttggctcgccgccatcatcggactcagcgcaatgaatatgctgatcgggatactcattgcctgtagcatagtgagccttgttttgttactggtcgtcaccccgccgcgggttgcgcaatacgatgaagaagccgctgtcgagtcttgatcttaatttactcctctgcctgcagctcctgacccaggagctcagcgttacccgtacggcgaagcggatgaacgtttcgccgtcagcggtgagcaagtcgctggccaaactgcgcgcctggtttgacgatccgctgtttgtgaaaaccccgctgggcctggcgcccacgccgctggtcagcagcatggagcaggatctggcggactggatgcagatgggcaaccaaatcctcgataaaccgcaccataccatgcccagcggcctcaaattcgaactggcggcggaagcgccgctgctgatgatcctgtttaacaccctctctcagcgcatctatcagcgctatccgcaggcattgattcgtttgcgcaactgggactacgactccctggacgccatcatccgcggtgaggtggatatcggcttctgcggacgcgaaagccatccgcagtcgcgtgagctgctgagcctgctgccgtggtatatcgattttgatgtgctgttcaccgacctgccgcaggtctggctgcgcgccgatcatccggcgctcagggaagagtgggatctggcggcattcttacgctatccgcatatcactatctgctgggaacaacgcgatacctgggccctggacgacgtgctgcaggagctggggtataagcgtaacgtggcgctgaccgtgccggggtttgagcaatcactttttatggccgctcagccgcagcacaccatgctggccaccgcgccgcgctactgtcagcactataatcagcagcaccagctgccgctcgtctcccggccgctccccctggaggcgcagcatctggaaaagctgcgcgttcccttcaccctgctatggcataagcgcaacagctacaacccgaagcttgtctggcttagagatacgctgaaagcgctctattccggtacgctttaagccttgtttcgtgcccatagcaccttatttgcgcaagaatttgtaaaattcaaacaaattcccttttcaatgggggatttcggcattaaaacctgttaataccaggcgataatagcgcccgcagttttatccagaccattactcacggagcgacgtatggcaacgcattttgcaagagggatactcagtaccggggagccgctatcgacacgtttgtcagcggcctgtcatcaatccgcacgtcttctcccgacatatcgccaggctcgcttttgcgcgtcgcgctcgctgcttgccgagctgctgtttatgctttacggcatcagcgagctgcctgaaatcatcaacgaagccaatggccgaccggtttttagcgatcgccaactcccccgcttttcgatcgcttatactggcaatatcgttggtgttgccctcaccaccgagggggattgtggcctcgacatggaactgcagcgcactgtccgcagccacgacgccgaccggcacaatttcagtaacaatgagaatctgtggattaacatacagcatgatccggacgaagcgcgcagccagctggtagcgctgcgccgcagcgtgctaaagctgaccggcgaagcatcaacgcagctgcagctgctgcccggctctggccgcctgcgcaccgccggcagtcagccaatcgaagcggtatgtgacgccgaatcgctgctggtatggtccattgccgcaaccccgaacatcggctcgctgaaggtctgggaatatgatgctaagggaggtgactggcgcagcctggcggatgcgcagcagcgcgcacgcgaaccgtcagcccgcctgatgcgctttaccagcttacccatggaaaaaaccttatccctcaattgaccggtcttgccggcatcatgatccaaaggagcaatcatgtcagataccttgaaagtggttacgttactcggcagcctgcgtaaagggtcgtttaatggaatggtcgcgcgcaccctgcccggcatcgcgccagcgggcatggatatctccgcgctgccgtcgatcggtgatatcccgctgtacgatgctgatatgcaggaggaagaaggttttccgcagcgcgtgcaggagattgcgcaacagatccgcgaggcggatggggtagtgatagtcactccagaatataactattccgtgcctggcggcctgaaaaacgccatcgactggctgtcacgcctgcccgagcagccgctgtccggcaaaccggtactgatccagaccagctccatgggcgctatcggcggggctcgctgccagtatcatctgcgccagattctggtcttcctcgatgcgatggtcatgaacaagccggagtttatgggcggcgtcatccagaacaaagtcgatccgcaggcgggtgaagtggtcgatcagagcacgctggaccatctgcgcggccagctgaccgcctttggcgactatattcggcgggttaaagcataaaaaaagcccggcagcgatgccgggctttttcatcatgcgtgcggattaatgtgcatcgataaagacaattttcagcacgaacagcagcgaaacgataatcacacacgggctgagctcgcgcagccggccggtaccgatcttcatcacgcagtaagagataaagcccagggcgataccttcggtgatcgagaagctaaacggcatcatcactgcggtgatgaacgcaggcaccgcctcggtcaggtcgctccacttcacgcgcgcgaggctggaggtcatcagcacgccgacgtatatcagcgcgcccgcggcggcatagccaggaaccatccccgccagcggagagaggaaaataaccagcaggaacaggataccaacgacaacggcggtcaggccggtacgcccgcccacggaaacgccggaagaagattcgatataggccgtcaccgacgaggtaccgatgaaggagcccgccaccgacgagacgctatcgacaaacagcgcttgcttcatgcgcgggaatttaccgttggcatccgcgagacccgctttatccgtcacgccaatcagcgtcccggaggagtcaaacaggttgaccagcataaaggagaagatcacgccggccaggcccaggttcagggagcccgccagatcgacctgaccaatcaccgaagccacgctcggcggcgccgagacgatcccggtgtaatgcacgtcgcccagcatccagcccagcagggtggtcacaacgatagagaccagtaccgcggcgtgaatgttgcgcgacgccagaatcgcgatgataaagaagcccagcacgcccagcagtacgctgtgggaagtcaaatgaccaatgctgaccagcgtttccggattggcgacaatcaccccggcgtttttcaggcccatcatgccgataaacaggccgataccgctggtgatacctacacgcaggctaagcggaatattggcgatcatccagtaacgtacgcggaagatggtcagcagcagcaggcccacggcgccccagaagatggcgcccatgcccacctgccacggcagccccatcgcctgcaccaccacaaaggcgaaaaaggcgttcaggcccatcgccggcgccagggcgaccggcaggttcgcgaacagacccatcaggatactgccgaaagcggcaatcagacaggtggtcacaaacacggcgctggtatccatgcccgctacgccaagaatttgtgggttaacaaaaacgatatacaccatcgtcaggaacgtggtgaaaccggcgatggcttcggtgcgcaccgtggtgccgtgctcgcgcagcttaaatacgcgctccagcagaccctggccagaagactggctggtttgttgttgactcattatcggtttccgaacgtaaggagggaaaattcgaggctatcctataccaaattacggcaccaggcgcggttgtatggtaatttttttcatttattttgcttatacggcaacgattgcgtcgcggcattgagcattacgaaaacgttaaacttgttaatatggaaaggctatgactcaaccagaagcagtattttttgactgtgacggcacgctggtcgacagcgaggtgatttgctcccgcgcctacgttcacatgtttcaggaattcggcattacgctggacctcgccgagatttttaagcgcttcaaaggtgtgaagctgtacgaaattatcgacaccatcaacgctgagtatggcgttaatctgcaaaaggccaccctggagccgatttaccgggcggaggtcgctcgcctgttcgatagcgagctggaggtgattcccggagcccaggcgctgctggatgcggtaagcgtcccgatgtgcgtggtttccaatggcccagtcagtaagatgcagcactcgctcggacgcaccggcctgctgcgccatttcactgaccgcttgtacagcggctacgatattcagcgctggaagcccgacccggcgctgatgtttcatgcggcagaggccatgcaggtaaaagccgaaaactgtattctggtggatgactccagcgccggcgctcagtcggggattgccgccggcatggaagtgttttatttctgcgccgatccgcacaaccagccgatcgatcatcccaaagtgacgacctttaccgatctggcagagctgccggcattgtggcaggcgcgcggctgggatatcacgcgttaagggcctggtgagcggcacgttggcatcgatgaacccccgctatgcgtctgcgtaagcggggaatagaactagcggctttttattgctgcaactccgccgccgccgctttatcggcaataatcaccagtgaagggtgcaatttgagcactgaagccggcacctgcacgctgaccggaccttccaccacttgctttaacgcgtgcgcttttgccgcaccgctgacaattagcaataaatttttcgccgccatcacgcttctcggccccatggtgacatagctgtctggtactgccgagatatccccgcccatctcgctgttagcgataagagcaatcatttccccatgaatcggcacttcgaccgtctgatcatgaaagcgggtggtattcggcaggttgccgcaaaaatggccgtcggcccccagccccagcaccatcagatccagaccgccagcctcttccagctggcgatcgtgctgagcggcgttgtccagcgtcagcttgtgaatgttctcttctttgatctgcgccggggtaaaaaacagctggcgcaaattagatatcgtgacgccttctcgcgactggccgcgaaaagggatctcatcgaagttgtaatagtgcacccgatcatagaatgctttgcctttcacggcggcggtcaaatgctcatacatccgctttggcgtgctccccgccgtcaccgccagattcacccgccgcggcgccgtgatatagcccagaacatgatggctggcgaccaggctcatctcttcataatcttcggtcacaatcattttcatcttgtcgtccttcacaagcacaaaacgggggctgaaggccccctaaaggttatttaaacagtttttgcacaaactcggcgtaggccgggcgccagacgtccatttcatggttcaggccgggatactggtggtaatcaaatttaatctgctgtttttccagctcgcttttcagaccagcaatgtctttaccggtcacagaatctttttccccgacgaccacggtaaagttacgcagctgcttattgatcgcgtcaggctgcttcagctgcgcttccacgccggcattcggcaccgtggtagtcgtaacgccgctaaaggtggcgagccagccaaagctctccagatgattcattccggaaaccagcgcctgataaccgccctgcgagaggcccgccagcgcccgaccgtcggcatctttacgcacgttaaatcgggcatcgatcagcggaataatatcctgcatgagctctttatccgccgcctgcgcattaagtggatagaaggttttgcgccgctcctgcggcgggaagttttccgcgaccgcttccgggatatcggtttcggtatccgggaccaccactagcatcggcttaatcttgccctccgccagcaggttatccatgatttgcgggatccgcccctgatcgatggccgacaggccgctgtcgccaaagccatgatagaaatagagcaccggcagcggatcgccggttccgctatagcccggcggcgtccagacatagagacgacgttcggcgttcagagccttcgagtgataggtgagggtgcgcagatcgccatgcgcaacctcccgatcgtcaagaatactgcccggcaccagaatcaaactggtgttcacctggcgctgcggcttctgatagcggctgccggtatctaccgagcggaagccatccacatcgaaatagtattcatagagattgggcttcatcggctcgcttttccatgtccagactccgtccgctgctttggtcatgtcgtgcgagacaaaggagtccggcgtggcgccagtcactatcgagacccgccgggcatcaggggcaaacaagcggtaagtgatactcttatccgcgttaacctgggtgataaagtggctcaccggcaggcttgggtccgacatcgcgggtaatggcgccgcctggagggtaaacgccgcgccctccagcgccagggcgaaataaattgcatgtcgtttcatcgttgttcctctttcgttgtgtccgttcagttatcgtcttaccaccagatttccgcctgcgcccccacggcaaactgatcgttcttcccgtcttcaaaaatgctggtggtattattcgcggccttatccaggtcaatatccttcgctttaatataggtggcatagaaacgaatttccgggcgcgaggtcagcatactggtattgactttgaaggtatggaacagcgtggtcttgtagccggactcgttatatttcttgccggtaacatctttgttttgctgtttgaagtaccccagctcgacgccggtctggttatatttatcccagatataagccggtcgcagaaccgtacggatagattcaaaatcggagtgggctccggtttcgtagctatagacgtcgttaccaaaagagtagacgatggcattcgccataataacgtcatcgcgtaaataggtttccccctgcgtggttaagcgcacggcggtgccattggtatgatcgccataatagcggccattaaaggtggtataggggctggatccggcatagcgtgagaagctgctggcaatagagttattggccagtaagaaagagaattcgttaaagccgccgttagcaaatttctgcgttaacgaggtaccagccatccaggtatctttccacggataataaccttcattgccctctttatatttctcagaggaactttggttggcggcgacatagcgtccgctaaccatcaggctggctttatcccacagcggaatctctttgtaacgaacgtccagggtgttggtgttaatttgctgcttattgcttaaagaacggtcataatcatcgacatcttcgcgaatcaacgcgatatcgaatttcccggcgcccacctgccagttttccagccctacgccggccgccgcatcggttctctgcgttttccagtccagcatctggatttcaatttttggcgccccgtgtttgccgacccagaaatcggcttccggcgcaaacggcaggaaccctttggtgttaacatacatatccgagaattgaatgtagttttcgccgccggcattgtcaccaaaccagccagtggaatactgctggccgacgttcccgtcgagcatcacgatggcgtcgacgcgtttatcgccttcctgaaacacccgctgcttcagctgcagatcgaaccagccggaatattcattgcccaggcggccaagcgaaccgatcgcccatgattttggcgagccgtgcgaggcggtcccccagccggaacggaagtagccgttatagctaaagccaatttcatctttcacgaacttgctaaagtctttcagcgtcatcgcgctgtaggctggcgcgccatcggtgacaggttgttgatttttaaccagcaccgcatccggtttaaccgccgttttcggcccggcggtcgcccccccggtcttgcgcttctgaccttccgcaggaggagaccatgaggcccaaatctggtctctttttctttcctggtcctgatattttttgagctctttttgcgtgtctttgagcgctttttccagcagctcaagccgttgttccaccgtcaactggctcgctagcagattagttgaataacaaagtggcgccagcaagactatcgccgaagcgatcctgttttttctcatcataatattcccttatataatcattggcgtaaataaaacacgacaacaaccctattccgtgccggtgctaatagccgtatccataccgtttgacgtcgcggcggctgttatttttgcggttagacaaaaacaaaaaaacctgaagaagaccatctgccttggcagataatcctcttcaggttttgcccgcgcatcgcggtagcaaccctcattcagccattattggcccgcataaaacaaaaaacctgatatcgcccccaggagcaatatcaggttttgcctgctgtcgcagtcacaatccgtttaaaccatcctgagcgttaaaactcagtgagtggcagctgattgttacgcgataaaatgaataactcaaacgggcagattgttaattgtgacgataatctcagcaatctcgctgccgcggggtaaaacatatctaattctgataaatccatttaccagaattagacagaatgattattactctttcggatctttgccagcgagcagtttatccagctcatcgccgccaacgtgacggaaatcctgacctttgacgaagtagaaaatatattcgcagatattctggcagcggtcgccgatacgctcgatggagcgcgcgcagaacagcgcggtcaggacgctggggatagtgcgcgagtcttccatcatgtaggtcatcagctgacgcacgatgccttcatactcctggtcgactttcttatcttcgcgatagatacgtaccgcttcgtcgagatccatacgcgcaaacgcatccagtacgtcatgcagcatctgcaccgtgtggcggcccagcgattcgaggctcaccagcagcggctggtgctgctgggaaaacttctccagcgcggtgcggcagattttatccgccacgtcgccaatgcgttccagctcagcgatagtcttgatgatcgccatcaccaggcgcaggtcgctggcggtcggctggcgcttggcgatgatgcgcacgcacgcttcatcgatagccacttccatcatgttgacctgcttgtcgccgtcgatgacgcgtttcgccagatcgctgtcctggttatgcatggcggtgatggcatcagagagctgctgttccaccagcccacccatggtcatcacctgggtgcggatatactccagttcagcgttgaactggccggaaatatgtttgttaagatttaggttgtccatggtgtctcctgattgcccaactggtgagagcctgaaagcacaagggcaaatcaaccgtagcggccagtaatataatcttcagtttgtttcttcgcgggcttagtgaacaggtcatccgtgttgctgaactcaatcagctcgccaagatacataaatgccgtatggtcggagcaacgcgcagcctgctgcatgttgtgagtcacgataacgacggtgtagtcctgtttcagctcggtgatcagctcttcgatacgcccggtggagatcgggtccagcgcggagcacggctcatcaagcagcagcacttccgggcggatcgcgataccgcgggcaatgcacagacgctgctgctgaccaccggagagagaatacccgctctggtgcagtttatctttggtttcgttccataatgcggctttggtcagcgcccactgcacgcgctcgtccatatcggcacgggacagcttttcaaacaggcgcacgccgaaggcgatattgtcgtatatggacatcgggaacggcgttggtttctggaacaccatgccaaccttagcgcgcagcagggcgatatcctgggtgttagtcagaatgttgtcgccatccagcaggatctcaccttccgcgcgctgctccggatatagttcaaacatcttgttgaacgtgcgcagcagggtggatttaccacagcctgacggaccgataaacgccgtcacctggtttttggtgatatccaggttgatgttcttcagggcatggaatttgccgtagtagaagttcaggttacgaactgaaatcttacccggagctgtattcaccatactcatctcaatctcttcctcattcagcgcagcagttgctgcgccgcaaaaaattaaccgtgtttcttcttggcgaagataacgcgcgccaggatgttcagcagcaagacgcacagggtgataatcaacaccccggcccatgccagttgctgccactccgcaaacggactcatggcaaatttgaaaatggtcaccggcaggttagcaatcggctgcatcatgtcggtgctccagaactggttggacagcgcggtgaacagcagcggcgccgtttccccggcgatacgggcaatagccagcaggatcccggtcataatccctgagacggaggctttcagggtgatcgccgagatcatcttccacttcggcgtccccagcgcataggccgcttcacgcaggctatccggcaccagcttcagcatgttttcggtggtacgaataacgataggcacctgcagcagcgccagcgcgataacgcccgcccagcccgagaagtgctgcatctgcgccaccacaatggtgtagacgaacagacccaccacgatagacggcgcggaaagcagaatgtcgttgataaagcggatgatttccgccagcaccgacttgcggccatactccgccagataaattccggcgaggatacccagcggcgtaccaaatacggttgcccacaggatcagcaggccgctgccggcgagggcgttagccagtccaccgcccgccgtattcggcggcggcgtcatttcggtgaacagcgccagactcatgccgtcgaaaccgcgggttatcgtcgccatcaggatccagataagccagaacaaaccaaacgccatggtcgccatcgacagcgctagagcgatacggttcttcatgcggcgtttggcctgcatcttgcgacgggactccgccagttcggcggtagtttgcaattcaatggtcgccattagcgtgccccctcattcttcgcgaggcgcataatcataaacttcgacgcggccagaacgataaaggtgataacgaacaggatcaggcccagctccatcagcgccgccacgtgcaggccggtttccgcttcggcgaactcattagccagcgcggaggtaatactgttccccggcatatacaacgagatgctgtcgagctggtaggtgttgccgatgataaaggtgaccgccatggtttcacccagcgcgcggcccagaccgagcatcaccccgccgatcaccccgtttttagtgaacggtaaaacaatgcgccagataacttcccaggtggtgcagccgatgccataggccgactctttcatcatcaccggggtctgttcgaaaacatcgcgcatgaccgcggcgatgtaagggatgatcatgatggccagaatgacgccagcggcaagaataccgataccaaacgccgggccggcaaacagcgcgccgacgaacgggatggtcgacagaacgttgccgaccggctcctggaagtaagtcgcaaacagcggggcgaaaataaacaggccccacatgccgtacacgatgctcgggattgccgccagcagctcaatcgcaatgcccagcggacgcttgagccaggcgggggacaattctgtcagaaacagcgcgatgccgaagctcaccggaacggcgatcagcagcgcgataaaagaggtgaccagggttccgtaaatcgggaccagcgcgccgaagatctcgttaggcgcatcccactctttggtccacaaaaaggcaaagccaaacttttgaatgctcggccaggaagagatgatcagggaaacgatgatgccgcccagcatcaatagcacaatcagcgcagccagttttaccagcgcactgaaaatcatgtcaccctttttccccggaggggtaaatgcaggcttggttgcagccatagattactctttacgtattaaaacttgttcgaataaatgcccggtggcgttggctcccgggcctacagtctgaaccgtagggcgggcagcgcctgaacgcccccgccatcttcgtcaaaaatctactgttagtacagcgctttaccgctgctgtctttgacgttggttttccatgccgcgcgaacctgctctaccacgctttccggcagcgtcgcgtaatccagcgcattcgcttctttcccgccgtttttatacgcccagtcgaagaacttcagcacttcagcggtctgttccggcttgttggtcgccttatgcaccaggatgaaggtggttgaggtgatcggccatgcattttcgcctttctggttggtcaggtcctgagcgaaagacttgctccagtcaacgccttttgcggcgttagcgaagttgtcttcagtcgggctaaccggcttgccgtcggcagagaccagtttggtgtaggccaggttgttttgcttagcgtaagcgtattcgacgtaaccaatcgagccaggcagacgctgaacaaaggcggcgataccatcgttgcctttaccgcccagaccggttggccagtttacggtagagccggcgccgattttcgatttccactcttcattcactttggacaggtagctggtgaaaacgaaggaggtacctgaaccatcggcgcggcggaccacggcgatgttctgcgacggcagcttcaggcccgggttgagcttagcgatcgcttcgtcatcccattttttaattttacccaggtagatatcaccgagggttttgccatccagcaccagctcgccggatttcacgccaggcaggttaaccgccagtaccacgccgccaatcacggtggggaactggaacagaccttcctgggtcagtttgtcatcagccagcggagcatcagaagcaccgaaatcaacggtgttggcaataatctgcttaacgccaccagaggaaccaataccctggtagttcactttattgccggtttctttctgataggtatcagcccatttggcatacaccggcgcagggaaagttgcgcctgcgccagtcaggcttgctgctgcgaaggcagagaaagcgctcatcgataaggtcgcggcgacaactgttgcgacggtggtacgcataacgttcataatgtctcctgctgggattcgtaaatcattgtttcgaggctatggtgagcaaaataggtcaaagaggtgacagtaaaatgtacgaattatgacagttttatgacaggccgggagagtggattttacgccaaataatacgcttataactcagatggttatctttaatcatgaccgtggaatgacaaaataattttctttttatgacggcgaaatcggaccgtaaaacgatcgtttgtcatctaccgccagccaaaatattgcgcacgtaatcggtggaaaacagcaggtgcaaataaaaagggccgccgtcggcagccctttgcaggataggatgctttactcaaccgttaccgatttcgccaggttacgcggctggtcaacgtcagtgcctttgatcagcgcgacgtgataagccaacagctgcagcggaaccgtatagaagataggggcgatggtctcttccacatgcggcatctcaatgatgtgcatgttatcgctaccgttgaagccggcttcaccgtcggcgaagacgtatagttcaccgccgcgggcacgaacctcttcgatgttggatttcagtttttccagcagttcgttgttcggcgccaccacaatcaccggcatttccgcatcaatcagcgccagtgggccgtgcttaagctcgcccgccgcataggcttccgcgtgaatgtaggagatctctttcagcttcagcgccccttccatagcgatcggatactgatcgccacggccaaggaacagcgcatggtgcttatcagagaagcgctctgccagctgctcaatacgcttgtcctgggagagcatctgctcgatacggttcggcagagcctgaaggccgtgcacgatatcatgctcgatagacgcatcctgacctttcagtcgcgccagtttcgccaccagcatcaacagcacggttagctgagtggtaaaggctttggtcgaggccacgccgatttccgttccggctttggtcatcagcgccagatcggactcgcgcaccagcgacgagcccggcacgttgcagatggccagcgagccgagatagcccagctctttcgacagacgcagcgccgccagggtatcggcggtttcaccagactgggagagggtgatcatcaggctattgcgacgcactgcggacttgcgatagcggaattccgaggcgatttccacatcgcacgggacgccggctaacgcttcgaaccagtagcgggaaaccatcccggagttataggaagtcccgcaggcaactatctgaatatgttcaacctgagccagcatttcattggcgttgggccccagttcgctgagatccacttcgccatggctgatgcgcccggtcagggtgttcttaatcgcgttcggctgctcgaaaatctctttctgcatatagtggcggtagatacctttatcgccagcgtcatactgcagattggattcgatctcctggcgcttcacttccgcgccggatttatcgaaaatcaccaccgaacggcgagtcacttccgcgatatcgccttcttcaaggaagatgaagcggcgggtaaccggcagcaatgccagctggtcggaggcgataaagttttcacccatccccaggccaattaccagcgggctaccggagcgggccgccagcagagttcccgggtcacgggtatccatgatcaccgtaccgtaagcgccgcgcagctgcgggatagcgcgcaggacggcttcacgcaaggtaccgccttgttccagctcccagtgcaccagatgggcaataacttcggtatcggtctcggtgacgaagacatagccgcgagactgcagcagggcgcgcagcggctcatggttttcgatgatcccgttatggaccaccacaatgtgttcagaaacatgcggatgcgcattgctctcagacggttcgccgtgcgtcgcccaacgagtatgggcgatcccggtaccaccgtgtaacggttgctcttctaccgcctgagccagcatctgaactttacccaggcgacgcacgcgggtcatatgaccttcgctgtcgaccactgccagaccggcagagtcatagccacggtattccagacgacgtaaaccttcgagaaggatttcagcaatatcacgctgcgcgactgcgccaacaattccacacatagttaaatttcctgataatggcgatatgccatgcgttgtcgctgacctgtatttgcccgttttccgggcgccccgagccttgtagagagtggggttattgttatggtacttcctgcggacggggatctatgttgaccctctcatcctggttcgccgggaaaatttccccggcgataatccaaattatttcttcttcaccggacgctgccagccctgtttgtggacctgcggtacgcggctcaacactagttcgttatcagcgatattgcgcgtgacggtggtgccggcggcgatcgtgacgccgttgcctaccgtgaccggggccaccagctgggtatccgagccgacaaagacatcatcgccaataatcgttttatgcttgttcgcaccatcgtagttgcaggtgatggtgcccgcgccgatattgacgttatcgccaatctccgcatcgcccagataggtcagatgacccgccttggagcctttcccgagacgcgcttttttcatttccacgaagttaccaacgtgggcgccttccagcagttcggcgcccgggcgcagacgggcaaatggaccgatggtgcaggccgcctgcagctgggcatcttccaccacgctgtaggggctaatttcgcagtcatcgccgatggtgctgtttttgatcacgcagccggcgccgattttcactcgatcgcccagcaccacgttgccttccagaataacgttagtatcgatctctacatcgcgcccgtgctgcagcgtaccgcgcagatcgaaacgcgccggatcgcgcagcatcacgcccgccagcagcagcttttcggcctgctccgcctggtagacgcgctccaggcgcgcaagctgcaggcggttgttgacgccttcgacttcgctcaggcgctgcggatgcactgcgacgatctggtgtccttcctggtgcgccatggcgatgatatcggtgatgtagtattcgccctgagcgttgttattggtgagtttcgccagccagcgctttagatccgctccgccggcgatcaggatcccggtgttgatttcctggatctggcgctgggcctcgctggcatctttgtgctcaacgatgcccgtcacctggccattttcacgggtaatgcggccatagccggttgggtcatccagcttcaccgttaacagaccaatcccaccctgtggtttcgcggcgcgcaggcgctgtagcgtctcaacggagatcagcggcacgtcgccatagagcatcaggatgtcttcatcatcattgaagaatggcgccgcctgctgcatagcgtgcccggttccgagctgctcggcctgcagcacccagttcaggttgtcttcatgcagagtctgacgcagcagatcgccgccgtggccatataccaggtgtaccgcacatgcgcctaaatcgttagcggcatcaatgacatgctgcaccattggcttcccggccagggtatgcagcaccttaggaagatcggaatacatgcgggtccctttgcctgcagcaaggataaccacgctcatcgcactatttgacatactcatcctgacggtagttagaacgaaaagtaaaagcctttcacgttgaaatttctacatatttttcatcataaaacgagacgtggagaaaacgtccaggctcactgttttaccccattttatgacgctatttttaaccactgcaaatcagtttaacgctgaaaaaggagggcggggtggagaatcattaactatctcactgcttttgctgttttttcgccacctgaataaagccgcagcggcaggcgtttatcagcacccacagcgggaagaaccaggataaatattcgccagtcgctggcgggggagggcggtaaagtgattgatgctatccataaaaaacgaaaggccacctatcaggtgaccttcttttcccggtttcacatcgccagtgttgtcgttttgatgggcgatacgtcgtgtcagcgggcgagatagcgcggagcttagaagctcagaacgctaaatttagcgatgattttatggaacagtttcatgatgatttcctgacgcaggtgcagtttataacgctcttttttgtgatatacatcacataaaaagagtttacgcctcatcatttaactaatcaataacaattaagggtgaatgctgttttcacttcatccgctcgtcagcagcgggcaataaaaaaagccagcctggaacccagactggctttttacgttcaagccggtgttacatcgcttttttggtcaactcgataacgcgcagtttagcgatcgctttggccagttccgcagacgcctgagcgtaatccacatcgccgtgagagctcttaatgtgctcttccgctttgcgtttcgcttccagcgctcgcgcttcgtcgaggtcctgaccgcgaattgcggtatccgccaggacggtcacgctgccaggctgcacttcaagaatgccgccggacagatagataaactcttcatgaccgtgctgtttaacgatgcgaatcataccaggcttaatggcggtgagcagcggcgcgtggcccgggtaaatacccagttcaccttcgctacccgttacctggattttttcgaccagaccagagaacatttgttgctctgcgctgacgacgtccaggtggtaagtcattgccatatcaccctccgattaaggcgttaaagttttttggctttttccacggcttcgtcgatggaaccgaccatgtagaacgcctgctctggcaggtgatcgtattcgccttccatgatgcctttaaagccacggatggtgtctttcagcgccacgtatttgcccggagaaccggtaaagacttctgccacgaagaacggctgggacaggaagcgctggatcttacgcgcgcgagctaccaccagtttgtcttcttcagacagttcgtccataccgaggatggcgataatgtctttcagttcctgataacgctgcaggatggactgaacgccacgcgcggtgtcgtagtgttcctgaccaacaaccagcggatccagctgacggctggtggaatccagcgggtcaacggccgggtagatacccagggatgcgatctgacggctcagtactacggttgcatctaagtgagcaaaggtagtggctggggatgggtcagttaagtcatccgccggtacgtataccgcctgtacggaggtgatagaaccggttttggtggaggtgatacgttcctgcagaacgcccatctcttccgccagggtcggctgataacctaccgctgaaggcatacgacccagcagcgcggatacttcagtaccggccagggtgtaacgatagatgttatcgacgaacagcagtacgtcacgaccttcgtcacggaatttctcagccatggtcaggccggtcagcgcaacgcgcagacggtttcccggcggctcgttcatctggccgtacaccagggatactttatcgataacgttggagtcggtcatttcgtggtagaagtcgttaccctcacgagtacgctcacctacgcccgcaaacacagagtaaccggagtgctcgatcgcgatgttacggatcagctccatcatgtttacagttttacctacacccgcaccgccgaacagaccaactttaccgcccttggcgaacggacacatcaggtcgataactttaataccggtttccagcagttcctgagagctggacagctcttcataggacggtgccgcgcggtggatagcccaacgctcttcttcgccgatgtcgcctttcatgtcaaccggttgacccagtacgttcatgatacgacccagcgttgctttacctaccgggacttcgatcgggtgctcgaggtcttttacatccagaccgcggcgcagaccatcagaagaacccatggcgatggtacgtacgataccgccgcccagctgctgctgaacttccagcaccagaacttcattaccattctgtacctcaagggcttcgtacacgcgtggtacggcatcctgagggaactcgacgtcgaccacggcgccgattacctggacaatctttccagtagccatcttaaatcctctacgaaataacctggttaaaccgcggcggcccccgagacgatctcggtgagttcctgagtaatgctggcctgacgagctttgttgtataccaactgcagctctttaatcaggctgccgccattatcggtcgcggctttcatcgccaccatacgggcggcctgctcgctggccaggttttcaaccacgccctgataaacctgagattcgacgtagcggcgcaggagggtatccagcagcgctttcggatcgggctcatacaggtaatcccaggatttacgtttcagatcagcatcttctgatgccggtaacggcagcagctgagtgatcgtcggaacctgagacatggtgttaataaatttgttgctgacaacgtacagcttgtccagacggccttcatcataggcctgcaacatcacttttaccgggccgatcagttcggacagggatgggttatcccccataccggtcacctgtgcaaccacgttgccgcccacggagttaaagaaagaaacgcccttagagccgatcattgcgaggtcgcactgaacgcctttatcggaccatgctttcatttccgccagcagtttcttgaacaggttaatgttcaagccgccgcacagaccacggtcggtcgacaccaccaggtagcccacgcgcttaacgtcgcgttcttccaggtaagggtgcttatattccagattaccgttcgcaaggtgaccaatcactttgcgcatagtatctgcgtaaggacggctggccgccatgcgctcctgcgatttacgcattttggaagcggcgaccatctccatcgctttagtgatcttttgcgtgttctggacgcttgcgatcttactacgtatctcttttgcgccggccatgagcttctcctcaatgccttgcggcctgccctaagacagaccgccagacgttaccaggactgggttgctttgaaggaatcgaggatgcctttcagcttgccttcgatttcgtcgttatagccaccggactggttaatctcttgcatcagcggagcgtgatcacggtcgacgtaagccagcagagcggcttcgaagctaccgattttcgccagttctacatcagccaggtaaccacgttctgctgcgaacagaaccagagactgctgcgcgacggacatcggcgcatactgtttctgtttcagcagctcggtcactttctgaccgtggtccagctgtttgcgggttgcatcgtcaaggtcggatgcaaactgggagaacgccgccagttcacgatactgcgccagcgcggtacggataccaccggacagtttcttcatgatcttggtctgcgctgcaccaccaacacgggatacggagatacccgggttaaccgcaggacgaataccggcgttaaacaggttggtttccaggaagatctgaccatcggtaatagagattacgttggtcggaacgaatgcggaaacgtcacccgcctgcgtttcgataatcggcagcgcggtcagagaacctgttttccctttcacttcacctttggtgaaggcttcaacgtattcggcgttaacacgcgcagcacgctccagcagacgagagtggaggtagaatacgtcgcccgggaacgcttcacgtccaggcggacgacggagcagcagggagatctggcgataagcaacagcctgtttagacagatcatcgtaaacgatcagcgcatcttcaccgcggtcgcggaagtattcgcccattgcgcaaccagcgtatggcgccaggtattgcagtgcagcagattcagatgcagtcgctaccactacgatggtgttagccagcgcgccgtgctcttccagtttacgcaccacgttagagatggtggacgctttctgaccgatagcgacatagacgcacttgatgccggaatcacgctggttgatgatggcatcgatagccagcgcagttttaccggtctgacggtcgccgatgatcagttcacgctgaccacgaccgattgggatcatggcgtcaacggatttgtaaccggtctgtaccggctgatcgacggactgacgttcgattacgcccggcgcgatcgcttcaacggcggagaaaccgtcgttttccagcggacctttaccatcaattggcgcgcccagggtgttaaccacgcggcccagcaggccacggcctaccggaacttccaggatacggccagtacatttcaccttcatgccttcggcgaggtcagcgtacggacccattaccaccgcacctacggagtcgcgctccaggttcagtgcgatagcgtaacggttacccggcagggagatcatctcgccctgcatacattcggcaaggccgtggatgcggataacaccgtcacttacagaaacaatagtaccttcgttatgagcttcgctcacaacattgaactgagcaatgcgctgcttgatcagttcgctgatttcggtggaattcagttgcatgctccagtccccttaagactgcaagacgtctgcaaggcgctcaagacggccgcgtacgctgccatcaatgaccatatcacccgcacggatgataatacctgccataacagacttatcgattttgcaattcagcttaactttgcgtgacagacgtttttccatcgcgctgacgatcctggcaagctgttcatcactcagttggttggcagatattacttctacctctgcgatggcctcactggccgcgcgcaggtgaatgaattgctcaagaacgtccgggagcaccttcagacgattattttccgccatcaccttaatcaggttctggccattttcgtcgagttgctcgccgcagatagcgataaacgcttctgagagcgtttccggcgccaaagcaccggagagaagccctgccatttggtcgtttttggtcacttcggcggcaaacgccagcatatcctgccagcgttcaacactgttgtgttcgacggcaaagtaaaaagctgctttggcgtaggggcgagctaccgttacaaattcagacatcagcccctccctccttacagttcagcgacaagtttatccacgatgtcgctgttagcagcttcatccacggaacgttcgatgatcttctcggcgccagcaacagccaggatagcgacctgcttacgcagctcctcgcgtgcacgtttacgctcagcatcaatttcagcctgcgcttgtgcaacgattttggtgcgttcctgttctgcttcagctttagcttcgtccagaatctgagagcggcgcttgttcgcctgctcaatgattacctgggcttccgctttcgcttttttcagctggtcggtcgcgttggcctgtgcaaggtccaaatctttcttagcgcgttctgcagaagctaaaccgtcagaaatctctttctggcgtttttcgatggcagccattaaaggcggccatacgtatttcatgcagaaccatacgaagataacaaacgcgatggcctggccgaggattgttgcgttcatgttcacagcacaatacctctttaattaactctgtggcttaggtttctaacaacttactacgcgacggcgaacatcacgtacagacccagacctacagcgatcatcgggatagcatccaccagacccataacgataaagaactgagtacgcagcagagggatcagatccggctgacgcgctgcgccttccaggaatttacctccgaggatgccgataccgatcgcagcaccgattgccgccagacccatcatcacagcggcagccatgtacagcagatccatattcaggttttccatgacagtctccagtttgtttcagttaaaacgtagtagtgttggtaaaaaatcaatgctcttcagatgccatcgacagatagacaatcgtcagaaccatgaagatgaaggcttgcagcgtaataatcaggatgtggaaaatggcccaaggcacattcagaacccactgtgaccaccacggcaacagaccagcaatcagaatgaaaatcagctcaccggcatacatgttgccgaacagtcgcagaccgagagagaccggtttggacagcaggcttaccccttcaaggattaagttgacaggaatgaacgcccagtgattgaacggctgcatggtcagttctttaacgaacccaccaacgcctttcattttgatgctgtagaaaataatcaggatgaacacgccaagcgccatcgacagggtgatgttcacgtcggcagacggaaccacgcgcagtgctggcaggccgaaaatgtgttcgccgatataaggaagcaggtcgattggcagcaggtccatcaggttcatcaggaagacccagacgaacacggtcagcgccagcggcgcgataaccttgctcttgccatggtacatgtctttgacgctgccatggacgaagccgatgatcatttcgatgaaggtttggaatttccctggtacgccgctggtcgctttcttagcaacgctacggaacatggcaaggaacagcagaccgagaaccaccgagaagaacatggagtcaatgttgagcgtccagaaggtggctgtgtggttgtgcggatccaccagcgagaatgtacgcaggtccaactgaaggttgttcagatggtgtcctatgtaatcctgcggcgtcatattttctgaagccatgatgcctttaccctttgttgttaattacagctggcgccagaacttgtaccaccagcaccaaaacccacgtcacgatcagtggcaaaaataccacttttaaaacggccagcgccaccgccagaagggcgaaggtcagcaacaccttgaaggcttcaccgaaggcgaaggtccaggccacacggccttttgctggtgtatgcgcctgatgacgccaggcaaaaattataaacatcagatttggcaagaccactgccaaaccgccgcatacagcggaaatgccccagaaggggtctttgaggctgaacagcagtccacttgccattactgccagtaactgaataaacagaagcttgcgagcaacgtttcgactcaagagcgacactgacatcacgtttttactcctgctccctttgaggtatgtcgcgtgtcgtataaaacgtcctttaagacgaagagtcaagcatcaaaaagcggacaaattatacggtgacgccccgtgatttcaaacaataagtagcaaaatagtgaataaatgtttaattattttccaacggacaactttccgtgcatttcagcgttctgtgagcggtcatacaaaactgcaaataacgaggaaacacggcaattaaagcgtgcatcagatcacataataaacatttcaagcgccctttaatgaatcaaggacataaaacactatttttcatgcttttgatattcaagataaaaagtgaggacattatctaaaacaaccccacatacaataaaaaccttttattgacatttataataaaaatttaacatcactatgctgttcatcattgtcgatttttagcaccctgatattttcaaagttgactattttgtcagtgaatcacttacgctaagttaactgcaagaaaagccttagtaaaaacaaggttaaatgcggcccgttaatatcgggggacgtcctttatttttgtaacatgcgcgggccacattttttccacattttttgataaaaattaactcgattttggcttaatcaccaccaggtgccgctccccttccaaccgaggaacatgcagctcaatcacctcgacaatgtcatacccttccggcagactttccatttcttctttttgcgctaaccctttgagcgcatagaagtgaccattcgctgccggcagatgatggcaccagctcaccatatcattaagcgatgcgaaagcgcggcttatcacgccatcaaacggcggctcggccgggaaggcttccacgcgactctgcaccggggtgacgttatccagcttcagctcgtgctgcacctgacgcaggaagcgcacgcgcttgccaaggctgtccagcagggtgaaatgtgactccggacatacgatggccaacgggatccccggcaaccccgggcccgtaccaacatcgataaagcgcgagccctgcagataaggcgccacgatgatgctgtcgagaatatgacgcaccagcatctcattcggatcgcgaacggaggtcaggttataggctttgttccacttatcgagcagtccgacgtaagccaccagctgatttttctggtgatcggtgagcgaaatacccgcttcatccagcagacgagaaagtttgttgagcacggtaagtaccttcaaaaaataatgagcccggaggcgctaacgcttaccgggctatgaatgataaaggcgaacgctgattatgcaactgggaaatcagcgcggcaggcagccgcaatcaggcgctgcggcgcagcatcccctgctttttcagccaaaccagcaaaatagagatcgccgccggggtgatcccagagatacgtgacgcctgccctatcgacgacggtttatggtcgttcagtttggcaatcacctcgttagacagcccagtgacctggcggtagtcgagggtcgctggcagcaaggtattctcattgcgctgttgtttctcaatctcatcctgctggcgcgcgatatagccctcatacttcacctggatctctacctgttcagccgcctgacgatcttccagtcccggggtgaatggcgagagttgaaccagctgttcgtaggtcatttccggacgacgcagcagatcttcgccgctagcttcacgcgacaacggcgcggtcaggtgagcgttcacttcgttggcgctctctgcctgcggattcacccaggtggatttcagacgctggcgttcacgttcgatgctttccagcttctcgttgtagcgcgcccagcgttcgtcatccaccagacccagctcgcgcccctgttcggtcaaacgcaaatcggcgttgtcttcgcgcagcatcagacgatattcagcgcgggaagtaaacatgcggtacggctctttggtacccagggtgcagaggtcatctaccagcacgccgaggtaagcctgatcgcgacgcggcgcccagccctctttttccgcagagaagcgggcggcgttaagtccggccagcagcccctgagccgccgcctcttcataaccggtggtaccgttgatttggccggcgaagaacagaccctgaataaatttgctctcaagcgttggcttcagatcgcgcgggtcgaagaaatcgtactcaatagcgtagcctggacggacgatccgcgcattctccatcccctgcatcgagcggacgatttgcatttgcacatcaaacggtaggctggtggatataccgttcggataaatttcgtttgaggtcagtccttccggctcgaggaagatctgatgctggttgcgatcggcaaagcgcatgactttgtcttcgatcgacgggcaatagcgaggtccgatcccttcgatcactccggcgtacataggactgcgatcgaggttattgcggatcacatcgtgggttttctcgttagtgtgggtgatatagcacggtacctggcgcggatgctgatccgcggatcccatgaacgagaagaccggcatcgggttatcgccatgctgctgcgccagcacgctgaaatcgatggtgcgcgcgtcaatacgcggcggagtaccggttttcagacgacttacgcgcagaggcaattcacgcagacgacgagacagcgggatagacggcggatcgccggcgcggccgccgctgtagttgtccagaccaatatggattttgccgtcaaggaaggtcccgacggtcagcactaccgctttagcgcggaatttgaggcccatctgggtgacggcgcccacgacgcgatcgttttcgacaatcagatcttcaaccgcctgctggaagatcatcaggttcggctggttctccagcgcggtacgtactgcctgacgataaagcacgcggtcagcctgggcgcgggtggcgcgcactgccggtcctttgctggcgtttagtatcctaaactgaatacccgcctgatcgatcgctttggccatcaaaccgccgagcgcatccacttcttttaccaggtgtcctttcccaatgccgccaatcgccgggttgcaactcatttgccccagcgtgtcgatattgtgtgtcaaaagcagggtttgttgacccatacgcgctgcggccattgcggcctcagtgcctgcatgacccccgccaatgataatgacgtcaaaaggatcctgataaaacatggtggtctgcctcgcataaagcggtatgaaaatggattgaagcccgggccgtggattctactcaactttcgtctttcgagaaagactccgggatcctgagtattaaaaagaagatctttatatagagatctgttctattgtgatctcttattaggatcgactctctttgtggataagtcggatccgcgaagtaagatcaaaagcttaagaaggatcactatctgtgaatgatcggtgatcctggtccgtataagctgggatcagaatgaagggttatgcacagctcaaaaaccatactacggttattctttggataactaccggttgatccaagcttttaagcatggttatccacagaagatcgggcgatctttacaattctcagagcaaatttttccaggatcccagccagatttccgctggatcctccggaatttcgtgttcaaggacgttgatcttcagcgtctcaccgatctgttttgccccgcaggccttcagcgccgcttctaatttatcgatcgcgccgcaaaaggtgtcgtattcgcggctgccgatccctatagcgccaaagcgcacggcggaaagatcggcctgcttctcctgcagcgcgtcatagaagggaaccaggttgtcgggaatgtcgccggcgccatgggtggaagagataattaaccagatcccttgcgcctgcagatcgtccaccagcggaccgtgctggatttcagtgctatagccggcttcttccagcttttccgccagatgctctgctacatattccgcactgcccagggtgctgccgctgataagtgtaatgtctgccatagatcgccgatcgcccgctcaactgttcagagtggcgtattgtacgctgtgagcgagctgggatctacctgtggaaaaatgtgggattaaaaaaagcgatcagggcttgatggtgcgcatgatcgggttctgcagcacgatcagagtttcagtggactgaatttcatcgattgtttggatcttgttgataagtacctgctgcagagcatcgatggatttacacatcaccttaataaagatgctgtagtggccggtggtgtagtaagcctcggtgacctcctccagactttccaggcgggcgagggcggagggatagtctttggcgctttttaaaataatgccgatgaagcaaccgacgtcgtagcccagctgcttggggctgacgtcaatgcgcgcgccggtaatgatacccgcctgcttcatcttttcgacgcgcacgtgaatggtgcccgggctgacgctgaactgtttggccagttcggcataggcggtacgggcgttggccatcagcgcatcaagaatgccgcggtcaagattgtcgatctgataattttccatatctttttcttatgaagtttgagggttcttactattttagcgccatattttaatgaattaaaagttgatgcgcctttttattgattgattgttgtattgccgccctgttttgttgcttaatcaatggcaacaggacgcaggagtcataaaaatgaaaaccgcatatatcgcaaaacaacgccagatcagtttcgttaaatcccacttttcccgtcagctggaagagaagcttggcctgattgaagtccaggcgccaatcttaagccgcgtgggcgatgggacgcaggataacttgtccggctgcgagaaagcggttcaggtaaaagtgaaaacactgcccgacgcccagttcgaagtggttcattcgctggcgaagtggaagcgtcaaaccctgggacaacacgacttcagcgcgggcgaagggctgtacacgcacatgaaagcccttcgccccgatgaagaccgtctgacgcctatccattccgtctatgttgaccagtgggactgggagcgcgtgatgggggatgaagagcgtcacgtcggcaccctgaaggcaaccgtcgaggcgatctacgccgggatcaaagccaccgagctggcggtcagcctggagtttggcctgacgccgttcctgccggaacagatccattttgttcacagccaggagctgctgagccgctatccggagcttgatgccaaaggtcgtgagcgggctattgccaaagagctgggcgccgtcttcttaattggtatcggcggcaaactagctgatggcaagcgccacgacgtgcgtgcgccggattatgatgactggagtactgaggtttctgaaggttttgccggcctgaatggcgatatcctggtgtggaacccggtgctggaggatgcgttcgagatctcctcgatggggatccgcgttgacgccgaggcgctaaagcgccagctggcgctgaccggcgatgaagatcgcctgaaactggagtggcaccaggcgctgctgcgcggcgagatgccgcagactatcggcggcggcattggccagtctcgtttgacgatgctgttgctgcagcttgaccatatcggtcaggtgcagtgcggcgtatggccggcgcaggttcgcgaaagcgtttccgcgctgctgtaacgattagcgcagccagcgtcgcagcaggcggctacgcagcccggtgtcaaagcgccagatatgatcgaagatgcgcatgatgccgggtttgccgtgaaccgacatcgccaccgcgtgaaaacggtgctgatgcttacgctgtaactcccccacctgagcaatcacctcatccggcaaccgttgggcaataaagtcggagatcaccacggcatccgcatccacccactgcgggttttgcaaacgttcaataatggcgcgaaaacagctggccagatcggtgccgccgcgaaaacgctggctcaggaaacggatcgcctgctccagtccgctctcgctggtcaactcgtaatgcaccacttcgctggaaaacagcataatgaagcagcgacggttatcggccagcgcgatgcgcatcagggccagacaaaaggccttagcgcactgttcgttaaaaccgcccatcgatcctgacgtatcgacgcagacaatgaacggcccgcgcggttgctcatcaaaatcctgccgcgttaccgggcgttcggtaattttctcgcgccaggcatcgccgtgtagccggtaggtgagcagctgtttctccaccagcttgcgataaaattcaaactccagctccgtgatgccaagcgtcgccagctccggcggcagcaggcgtagaatgtcgtcactctgctggaggccgtcgacctgttcaggcaccgttgctggctcgcgtaccaggctgcggaaggtttccatcggcgcatctttcttcggcacggatttcgcttcccttgaacgccccagctgttccgccagctgcagcagctccggttgctggttaagaaaatcgccatagcgcacgatcagctggtagtcgcctcgtttgagttcgccggcgctcatatcccacaggcgtccggcggcggtatcattttccgccagcaccggatcgagctgaccgctgagcgtcattcgttcctggacctcactgagcaactggtcgcgctcatcgtccagcagctgctggttaaggctggtggcttgcaccaccaggctcaggcgccagcgctgtaaaaacagcgtatgcagcgccggggtaaaggtggcattgtcatccaccagcttctgcgcctgggcggcaaaaggggactggagctggtgcagtttgccgagaatttgcgggagctggacgataaactgcgaggtagagagcagctgagcctgctgataggtttgcacttcggcgtccagatccggcgggatgttaacttcttttaagcgggcgcgaacggcttcccgccagcgcggaatatccgccgcgatgatgtttttcaggcggggaaatttttcaaagaacaccgccagctgaggagaggccaacagcgccagcagcatctcctcgatcattccctcttcgctgactgccagcatgacattcagcatatcgagcgtcatggctgcttcgcctgtttaatctgcgcgccgacgtcctgcaggctggcttcgattcttcccagccattcgaccgggataaacaggcacttttgctgctcgctgaagcggttgtgttgctggtgccactcatcatccagcgcttccagctgctggcgaatttccgccggcatattctcctgcgctgcgctgccgggcagcgcgaggcgtgagccctgcaggctcacatcgcggacgaccagatgctggctggtgtcgacatccatattgagtagttgggcaaagccgatcccgttgagcttaccgcggatctcgccgcccttttccagccagttggctaacgcctcgcgttcaaaagtaatgtggatcacttccatatcgtgaagtttgagcggctgctgcagcagcagcgtcagggtggtcccctggatctccgccggcagttcatagtgcggtttgcggctaaacatcccgccaaggcgggtgaccttcagcgccgttttgtcgctttgctgttgttggatctgaatgcgtcgctgcacaatcgcccccaaccgcgtcagcatcgcctgctgttgccaggcgtgacaggtcatgagcgtttccagctgctgcgacatcaagttcatactttcgacgttgtgccacagacaatctttcagcaggataaggtcgattggcgcgatgctgtcgcggccgctgaagaaggcgctggcctgcagcaggcgaatagcctttttccagcggcgatccgagacgtagggggcatttggctgggcgtccagctgctggcggagctggaatatcagctcaaacaccgcgtccggcagtttaatattgccgatctgctgctgccattgggtaaattcctcgtcgctcacctgcagcgcgctgggcactggattgctgttttcatcctgctggctgaccagcatcgaacggaaattacctttatcctgcactttatcaagccatagacggatcagcattcggtcatacagcgcttccaggctgctgtcggcttccgggagttcgttcgacgcggccaccagcaggcgcattgggattttctcttcatgcgcgccattgcggaagtgacgttcgttaatcgccgtcagtagggtgttgaggatagccggacctgctttccatatttcatcgagaaacacgatttccgcttccggcaggtagccggcggttaaacgttcgtaacggccttcatctttcagcgcctgaatggacagtggcccaaatacctcttccggggtggagaagcgggtcatcaggtattcaaaagcgcgcgcctgctggaaggcgaatttgaggcggcgggcaatcaggcttttggcgatccccggtggaccaagcaaaaaaacgctctcgccgctgagcgccgccagcaggcagaggcgtatcgcgtggctgcgttcaaagagtcctttttcgagtgccgcgctgagccgggaaattctttcagccagtaaatgtgtttgagccataattgagttgcgtgctttgtcatgtatcgttattgggacgagtatagatgttagagccggggcggtaatagcctgaagaatcgatttattttttttgagccaggttaatatggtgtctgttaggggtacgatttcacaaataatcgtgcatactgtgcgctttttgtgggccaagggactaggcacacatttgttttataaacgaaaagactagtctatgagcactgataataaacaatcgttgccggcgttaacgctggcggccatcggcgtggtgtacggcgatatcggtaccagtccactgtataccctgcgcgaatgcctgtcaggtcagtttggctttggcgtagagcgcgatgccgtttttggctttttgtcgctgattttctggctgttaatctttaccgtatcgattaaatacatcaccttcgtgatgcgggcggataacgccggggaaggcgggatcttaacgctgatgtcgctggccggacgtaatacttcggccagaatgacctccgtgctggtgatcctcggccttatcggcggcagtttcttctatggcgaagtggtgattaccccggcgatttcggtaatgtcggcgatagaggggttagaaattatcgccccgcagctcgatacctggattgtccctatctccattatcgtgctcaccctgctgtttgtgatccagaagcacgggactggcatggtcggcaagctgtttgcgccgattatgctgatctggttcctgttgctggcggtgctgggcgcgcgaagcatttacgctaatccggaagttctgcaggcgctgaacccctactgggctgtgcacttcttcctgcaatacaagaccgtttcctttattgcgcttggcgcggtggtgctgtcgattaccggggtggaagcgctgtacgccgatatgggccacttcggcaaactgccgatccgcgtcgcctggttctccgtcgtgctgccctcgttggtgctgaactattttggccagggcgcgctgctgctgaagcacccggaagcgattaaaaacccgttcttcctgctggcgcctgagtgggcgctgatcccgatgctgattatcgccacgctggcgacggttatcgcctcccaggcagtgatttccggggtcttctccctgacccgtcaggcagtgcgtctgggctatctgtcgccgatgcgcattatccatacctcggaaatggagtccgggcagatttacattccgttcattaactggctgctgtacgtttctgtggtcatcgttatcgtcagctttgagcattcgtctaacctggcggcggcgtatggtatcgccgtaacgggcaccatggtgctgacctccattctgtcggcgaccgtggcgcgcaaaaactggcactggaacaagctgtttgtcggtctgatgctggtggccttcctgtgcattgatattccgctgttctcggcgaacctcgataagattgtctccggcggctggctaccgttgtccctggggatggtgatgtttacggtgatgacgacctggaagagcgagcgtttccgcctgctgcgccggatgcacgagcatggcaactcgctggaagcgatgatctcttcgctggagaagtcaccgccagtgcgtgtgccgggtactgcggtgtatatgtcccgcgccctgaacgtgatcccgtttgccctgctgcataacctgaagcacaacaaggtgctgcatgagcgagtgatcctcctgaccctgcgtaccgaagatgcgccttacgtgcataacgttcgccgggtgcagattgagcagctgtcaccgtccttctggcgggtggtggccagctacggctggcgggaaacgcctaacgttgaagaggtgttccaccgctgtggcctggaaggactcagctgccggatgatggagacctcgttctttatgtcgcatgagtcgctgattatcggtaaacggccatggtatctgcgcctgcgcggcaagctttatctgctgctgcagcgtaacgccctgcgggcgccggatcagtttgagatcccgccaaaccgggttatcgagctcggtacccaggtcgaaatctgatgtcaaaaaagcccttccattgcgaagggctttttgtttctcactccggttgttatgtcctgtcgctgcctcgcgaaacgtttcgatggcgatcacatttctctcttctggtgatggttttctgctcacacattgataataattattttagcgaaacgtttcgctagtggagcaaaagagaaaaaatgaaaaaaggcaccgtacttaacgctgatatttccgcggtcatttcccgcctgggccacaccgatacgctggtggtctgcgatgccggattaccggttccccgcagcagcacgcgcattgatatggcgctgactcagggcgtaccttcatttatgcaggtgctggaagtggtgacgacggaaatgcaggttgaagcggctgtcatcgcggaagagattaaaacccataatccgcagctccacgcgacgttgctcactcacctcgagcagctgcagcagcaccagggaaataccattgaaattcgttacaccagccatgagcagttcaaaaaacaaaccgcagacagtcaggcggtaattcgcagcggggagtgttccccgtttgcgaatatcattctctgtgccggcgtcacgttctgaggtcgccgtcatggaagccttattgcaactgaaagggatcgacaaagcgttccctggcgtcaaggcgctctccggcgcggcgctgaatgtctatgctggccgggtgatggcgctggtaggggaaaatggcgccggcaagtccactatgatgaaggtgttgaccgggatctacacccgtgatgccggctctttgctgtggttaggcaaagagacgacctttaacggcccaaaatcctcccaggaagctgggatcggcattatccatcaggaactgaacctgatccctcagttgacgatcgccgagaacatcttccttggccgcgagttcgttaaccgttttggcaaaatcgactggaagcagatgtatgccgaagccgacaagctgttggcaaagctgaatctccgctttaccagccagaaactggtgggcgatctatcgattggcgatcagcaaatggtggagatcgccaaagtgctgagcttcgaatcgaaagtcatcattatggatgaaccgaccgatgcgctgaccgataccgaaaccgaatcgctgttccgcgtcatccgcgaactgaagtcgcaggggcgcggtatcgtctatatctcccaccgtatgaaagagatcttcgagatttgcgacgacgtgacggtctttcgtgacgggcagtttatcgccgagcgcgaggtctcgtcgctggatgaggaccgacttatcgagatgatggtcggccgtaagctggaagaccaatatccacacctcgataaggcgcccggcgcggtgcgcctgaaggtcgacaacctctgcggcccgggggtggataacgtgacctttaccctgcgccagggggagatcctcggcgttgccgggctgatgggcgccgggcggaccgaactgatgaaagtgctgtacggcgcgctgccgcgcagcagcggttccgtgacgctcgatggccgcgaagtggtgacccgttcgccgcaggatggtctggcgaacggcattgtctatatctccgaagaccgtaagcgcgatggtctggttctcgggatgtcggtaaaagaaaacatgtccctgacggcgttgcgctatttcagccgggcgggcggtagtcttaagcataaagatgaacagcaggcggtgagtgatttcatccgcctgtttaacgtgaagacgccttcaatggagcaggcgatcggcctgctctccggcggcaaccagcaaaaggtcgccatcgcccgcgggctgatgacccggccgaaggtgctgatcctcgatgaaccgacccgcggcgtcgacgtcggggcgaagaaagagatctaccagctcatcaaccagttcaaagccgacggcctgagcatcattctggtctcctccgagatgccggaagtgttgggcatgagcgatcgcatcatagtgatgcatgaagggcatctcggcggtgaattcacacgcgagcaggccacccaggaagtattgatggctgccgctgtgggcaagcttaaccgtgtgaatcaggagtaagaaagatgacaacccaggctgtttctggtcgccgctatttcacaaaagcgtggctgatggagcaaaaatcgctgattgccctgctggtgctgatcgcggtggtatcgaccatgagccccaacttttttaccgtcaataacctgttcaatattctgcagcaaacctccgttaacgccattatggcggtagggatgacgctggtcatactgacctcggggatcgatctgtccgtcggctccctgctggcgctcaccggtgcggtggcagcgtcgatcgttggcattgaggttaatgcgctggtggcggtcgcggctgccctcgcattaggtgcggcgatcggcgcagtcaccggggtgattgtagcgagaggccgcgtgcaggccttcatcgccaccctggtgatgatgctgctgctgcgcggcgtaaccatggtgtacaccaacggcagcccgatcaataccggctttagcgataatgccgatctgtttggctggtttggcatcgggcgtccgctggggatcccgacgccggtatggatcatggcgattgtcttcctggcggcctggtacatgctgcaccatactcgcctgggccgttatatttatgccctgggcggtaatgaagcggcgacgcgtctgtccgggattagcgtcaataaagttaaaattatcgtttacgccttgtgcggaatgctggcttcgctggccgggatcatcgaagtggcgcgtctctcctccgcgcagccgacagcggggacgggctatgagctggacgccattgcggcggtggtgctcggcggcaccagcctcgctggtggcaaaggacgcattgtcggcacgctgattggtgcgctgatccttggcttcctgaataatggtcttaatcttttaggcgtttcttcctattaccagatgatcgttaaagcggtggtgattttgctggcggtactggtagataacaaaaagcagtaactgagaactctacaggacatcttaactatgaatatgaaaaaactggcgaccctggtctctgctgttgcgctaagtgcgaccgttagcgcgaacgcgatggccaaagacaccatcgctctggttatctctaccctcaacaacccgttcttcgtgtcgctgaaagacggcgcgcaaaaagaagctgacaagctgggctacaacctggtggtgctggattcccagaacaacccggcgacagagctggcgaacgtccaggatttaacggtgcgcggcaccaagctgctgctgatcaaccccaccgactctgatgccgtcggcaacgccgtgaagatggcgaaccaggcgaaaatcccggtcatcactctcgaccgtcaggcgacaaaaggcgatgttgtgagccatatcgcctctgacaacgtgcagggtgggaaaatggctggcgattacatcgcgaaaaaagtgggtgaaagtgcaaaagtcattgagctgcagggcattgccggaacttctgcggctcgcgagcgtggcgaaggctttaaacaggccgtggcggcgcacaaattcaacgtcctggccagccagccggccgatttcgaccgcaccaaaggcctgaacgtgatgcagaacctgctgaccgcacatcctgacgtccaggcagtgttcgcgcaaaatgatgaaatggcgctgggcgccctgcgcgcgctgcagaccgcaggcaagtccgatgtgatggtggttggatttgacggcactccggatggcgaaaaagcagtaaacagtggcaaactggcggcgaccgtcgcacagttgccggagcagatcggcgcgaaaggcgttgagactgctgataaggtactgaagggcgaaaaagtggaagctaactacccggttgagctgaagctggtcgttaagcagtaatatgcgattcggactggcaacggtccgagggacaatataaaaaaagaaaagcagggcatgcgccaccggatcccggtggcgcgctttcccgggaacagaaatgatgaaaactgcaggcaaacttgtcgtccttggcagtatcaatgccgatcacattcttaaccttgacgctttcccgacgccgggcgaaaccgtcaccggccaccattatcaggtggcgttcggtggaaaaggggccaaccaggcggtggccgccgggcgcagcggagcggatatcgcgtttatcgcctgcaccggcgatgacgatatcggtgaacgcatccgtcgtcagctggcgagcgataaaatcgacgtggcgcccgtgcgcgcggttgccggggaagcgaccggggtggcgttaattttcgttaacgccgaaggtgagaatgtcatcggtattcatgccggcgccaatgcggcgctttccgtctcccaggttgaggcggaaaaagagcgtatcgccagcgcacaggcgttgttgatgcagctggagtcgccgctggagagcgtcatagcggcggcgaaaatcgcccatcaccatcacaccaccgtggtgctgaaccccgcgccagcgcgtgaactaccggatgaactgctggcgctggtggatattattacccctaacgaaaccgaagcggaaaagctgaccggtattcgcgttgagagtgacgaagatgcggcaaaagccgccgacgtgctgcatgccaaaggcattggtacggtgatgatcaccctcggcagccgcggcgtctggctcagtgccgaaggcgaaagccgccggatcccagggtttcgcgtacaggccattgatactatcgcggccggtgatacctttaacggcgcgctggtgaccgcgctgctggaagggaccgccctgccggaggcgattcgctttgcgcatgccgcagcggcgatcgccgtaacccgcaaaggcgctcagccgtccgtgccttggcgcacagagatcgatgaatttttagcgcaacaggggtaatgcttggctacgatgaaagatgtggcccgcatcgcgggcgtttccacatcgacggtgtcacacgtcatcaataaggaccgctttgtcagcgaggcgattaccgccaaagttgacgctgcgatcaaaagcctcaactacgccccctctgcgctggcgcgtagcctcaagctcaatcaaacccgtaccatcggcatgctgatcaccgccagtaccaatccgttttattcggagctggtgcggggcgtggagcgtagctgctttgagcggggttatagcctcgtgctctgcaataccgaaggtgatgagcagcgaatgaatcgtaatctggagacgctaatgcaaaaacgcgtcgatggattactcctgctgtgcacggagacccatcagccctccccggaaatcatgcagcgctatccgtcggtaccgacggttatgatggactgggccccctttgatggcgatagcgatctgattcaggataactcgctgctcggcggcgatatggcgacccagtatctgattgaccaggggcattcacgcattgcctgtattgccggcccgctggataaaaccccggcgcgcctgcgtcttgaaggctatcatgccgcgatggcgcgctgcggcctgccggttgccgaaggatacgtggtgaccagtgattttgagtttggcggcgggtttagcgcgatgcagcagctgctggcgttgccgcagcgtccgcaggcggtgtttgtcggtaacgatgcgatggcggttggcgcttatcaggcgttataccaggccgggctgcagattccgcaggatatggcgctggtgggctacgatgatattgagctggcacgttatatgacgccgccattgaccaccattcaccagccaaaggatgagctgggggaactggccatcgacgtactgatccatcgcatggccgatccgcagcaaaaacagcagcgcgttcagttaacgccggagctggtggttcgcggttccgcttagcgtttatgccgctcgctaatcaggttgcggccatccttcgctcttaacagcataaacatcagcgccgatataatggttatcacgcccatggttataaaggtgtagtgaaactgctgtaccgtgcttgcattatcaaaaccttcatagaagcgtagcaccgcagcgctgatggccaccccgagactaattgaaagctgctgggtgacggccagcaggctgttgccgctgctggcattatcatcggtcagatcggccagggtaatggtattcatggcggtaaactgcgtggacatcgccatccccagcacgaacagcggcagaagaagcatccacagcggcatctctggcgactgcagcgagaactgggcgatcataaggccaataaacacggtgatccccaccagggtcttacgatagccaaaccagcgcagcacctgggtaacggtggatttcgcaataatcgagccgatagcggtgggggcgatcatacagccggcgataatggccggatagccgaaaccaacctgtagcatcagcggcatcagaaacggtacgcagccggtacccaaccgcgtggcgaggttgccggcaatgccgaccgagaacgtatgggtcttaaataaagagagcgagataagcggcgtcggatggcgacgcgcgtgacgcacataggccacgagcagtaacagactgacggcaatcacggccagcgcctgccatgtcgccacgattttttccccaaacagttcaataccgctggaaaataacaccagacttaagccaaataacagaaaaccgcctatatcgaagcgtcggcgcggcgttgtgaaatttggcatgtatttacgggcgtacagaatgccaattacgccgatcggaatgtttatcaggaaaatccaatgccagctggcccaggtcacaaataccccgccgagtaccgggcccagaatcggccccaccaatcccggcatggtgacaaagttcaggaccggcaacagttcgctgcgggggtaggcacgcagcagggccagcctcgccaccggcatcatcatcgccccaccgatcccctgaattacgcgaaaaatgaccagttccgttaaggaactggagagggcgcaggcgagggaaccgagggtgaacaggctaacggcgatgataaagacccggcgcgtgccgaagcgatcggccagccagccgctgaccgggatcagcatcgccaccgtcagcgtatagctgataatggccgactgcatcgctaagggagaacgattaagactgtgggcgatagccgggagggcggtgttaagaatggtggcatccagcgcctgcataaagaaggccatcgccgcgatccacggcaggccagccatgctgcgccctttttttccgctcatgccaaatccttgttattgatttacgtggtgtggggcgttcaacaatgcctggcaggcgagcaacgcccccggcgcatcactgttaagaatggcatcgacaatcgcctggtggagatcgagcttcaccacttcattttgcgtaatcgacgtgaagtaggtgtggtagaccgaatgaaacagcgaggcgaaagagctgaggaaaggattaccgctcatttcatagatatgctcatgccaggccatatcgacttctatccagcgttcgcgctgaaaatggcgtttcagagcaatcatctcttccattaatgtattgagctgcgctttttgcccggcggtgccgttggcggcggcgagaaagcaggcctgtggctccaggctgctgcgcatgacgagaaagtggcttaccacctcttcgaagttatcttctgttagccaccaggagagcagttccttatcaaggaaattccagctgctgcgcggcatcacccgggtgccaatgcgagggcggggcagcagcatgccttttgcagtaagcgtcttcaccgcttcgcggacggcggtacggcttacgccgaactgctcccccaactccatttcgccgggaagaatgctttccggctgatattcgccagtcagtattttttgggcgagcttttcggccagtacccaggaaatgttcttttgtgccgccagttgctgtgcgcttaaagacataaatgccgttcctttctttcctctactctaacagtatgccaccaggcgccccgtttcgtcggttaaaacggcaaaacggcggttttttgcgacattcctcgccgcattgttgaaaaaagagacggttgaaaactttttttgcatttccccttgtcacctcagaattactccctataatgcgcctccactgacacggaacaacggcaaacaagccgccgggtcagcggggttccggtgagaacctcgcagagaaaagcaaaaataaatgcttgactctgcagcgggaaagcgtaatatgcacaccccgcgccgcagcgaaaacgaagcggcactgctctttaacaatttatcagacaatctgtgtgggcactcaaagtgacatggattcttaacgtcctcggacgaaaaatgaataccaagtctcaagagtgaacacgtaattcattacgaagtttaattctttgagcatcaaacttaaattgaagagtttgatcatggctcagattgaacgctggcggcaggccta

SEQ ID NO: 138 - DNA, 100102 bp, Unknown
  source: /note="Description of Unknown: MKP2_2161_1 Mutant Bacteria sequence"
gggttgtcatgccaatggcactgcccggtagctaaatgcggaagagataagtgctgaaagcatctaagcacgaaacttgccccgagatgagttctccctgagactttaagtctcctgaaggaacgttgaagacgacgacgttgataggccgggtgtgtaagcgcagcgatgcgttgagctaaccggtactaatgaaccgtgaggcttaaccttacaacgccgaagatgttttggcggatttgagagaattttcagcttagattcagagttgagtacgcaatataaagaattgcgtactgagcacaaagaatttgcctggcggcactagcgcggtggtcccacctgaccccatgccgaactcagaagtgaaacgccgtagcgccgatggtagtgtggggtctccccatgtgagagtagggaactgccaggcatcaaataaagcagaaagcccggtcgaaagaccgggctttttgttttatctgttgtttgtcggtgagcgctctccagagtaggacaaatccgccgggagcggatttgaacgttgcgcagcaacggcccggagggtggcgggcaggacgcccgccataaactgccaggcatcaaacaagtgaagagcccatcctgccggatgggctttttgcgtttctggtgtccggccagcgtgccggcatgcctccccggtggcgctgcgcttaccggggctacggatccgacacggggctacgtccctgtggccggacaaggtgcgcagcaccgcctccgggaaaatccctcctatatcaccgtcgataaatgactattgcctctctaaccaactcacaataaatgtcgcgatctgtggtacattatttaaatccagcagcggaagtgaggtcgcgatcgatacatcgctggccacggcgatggtatgctcatcaattaccagctcttctacacgatggccgctgttttgccgaaaaagcaggatcttcggcacgggttcatgtttgaacccctccactaaaaccaggtccagtttgctggcatccattcgactgaccagccacgtgagatctaattccggcttctctggcgtctcggtcatcaatgcccaccgctgttcgctggcgacaatagtttgcgcagcgcccgccttacgcagttcatagctatctttgcccggcttatccacgtccatatcatgatgggtgtgctttatcagtcccgggcgtaatcctagagcgcaaagctcagggataagacgctttaataatgttgtttttccggtaccgctccatgcggcgatcgccagtaatgggatcatgatggctcctgcatctgctgcaaatcttcgagcgtatttacattaatgaaagcagttttcacatcgctgaaattcaccgggcgcccacccatttgtcgcataaaaaccatcaccctgcgctctccatgtgccagataagcctccagttccggaatgatttgacgatgaactaatgcaacggcaggatgatcccgttcgccgtcatgggcccaaacgaccggtgcgtcccctctctgctggataaagcgctccaccaaaaaggacggaatgaacggcgtgtcgcaggggcaaaaaacaaaccatgggctcgcgacctgctgcatcacagcaagcattccggccagcggcccctgataaccctcctgtatgtctcgaaagaccggatatccgctggcacgccactgttcaagatgacgattggcgctaatgactaactcatctacctgcggggctaatgcttccgcgacgtgtcgccagagagggcgaccatttagcgcctgtaatcctttatcaatgccgcccatccgcgtggccctgccgcccgccagcacgacgccggttatcgcctcgctttgcatatgaatatcgcctctttcattgtgggattgaccctgttaacttgtccctatcaagagtaaggagcatgaccatgaaatgtaaacgtctgaatgaagtaattgaactcctccagccagcctggcaaaaagagcctgaactgaacctgatgcaatttttgcagaagctggcgaaagaggccggctatgatggcgaactgagcgatctttccgacgatattctgatctatcacctgaagatgcgcgactcttccaaagatgctgtcatcccgggtattcagaaggattatgaagaggactttaaaaccgcgctgctgcgcgcccgcggggtaataaaagagtaaaaggttgtaagcgctaccgcgtaaagtgcaatgagatgatatcctgaactattcgtacgattatcggatgtcaggatgcacgataaggcttttacttttcagacgcttcgcccggataccattatcgatgggttattcgatctgggtatgcgggtggactccggtctcaccccgctaaacagctatgagaaccgcgtttatcagttccaggacgaagagcgccatcgctatgtggtaaagttctatcgtcctgagcgctggtccgcagaacagatccttgaagaacaccagtttgcgcttcagcttgtagaagatgaagtgcccgttgctgcgccgctcttatttaatgacagcacgcttcatcagcatcagggattctactttgccgttttcccaagccttggcggtcgtcagttcgaagcggataaccttgatcagatggaatgggttggccgctacctggggcgcctgcaccagactggccgcaaacagcgctttactgcccgcccggaaattggcgtgcaggagtacctgctggaaccgcgtcaggtgtttgagcaggcgacgctgatcccctctggcctgaaggccgatttcctgaaggcgaccgataaactcattgctgccgtcatggagcaatggcacggccgcgggaacacgttgcgcctgcacggtgactgccatgccggtaatatcctctggcgcgacggaccactgtttgtcgacttagacgatgcgcgtaccggcccggcgattcaggatctgtggatgctgctcaacggcgataaggctgaacagcgtatgcagctggagactattgtcgaggcctatgaggaattcagcccctttaacagcgatgaaatcgcgctgattgaacctttacgcgctatgcgactggtttattatctggcgtggttgctcagacgctgggacgatcccgctttcccggtcaatttcccctggttaaccggggaggattactggtgggggcagacgtcgacttttcttgagcaggtgaaggttctacaggaacccccgcttcagttaacgccaatgtattaatgtgatatatccaggagagagtaaatcatgaaaaaagtttggctggcgctggctggtatgattctggcttttagtgcatccgctgcccagatcaccgacggcaagcagtacatcacccttgataagccgattgctggcgagccgcaggtgctcgagttcttttcgttctactgcccgcactgctaccagtttgaagaagtgctgcatgtctctgacaatgtgcgccagaaactgccggaaggcactaaaatgaccaaataccacgttgagttcctgggtccgctgggcaaggatctgacgcaggcatgggcggtggccatcgcgctgggcgttgaagacaaaattactgcgccgatgttcgaagccgtgcagaaaaaccagactgtgcagagtgtggctgacattcgtaaagtgtttgtcgacgctggcgtgaaaggggaagactacgatgccgcatggaatagcttcgtggtgaaatctctggtcgctcagcaagagaaagcggcagccgatctgcagctgcagggcgtaccggctatgtatgttaatggtaaataccagctgaatccgcaggggatggacaccagcaatatggatgtcttcgtcgctcagtatgcggataccgtgaagcaactggtagagaagaaataaaaaaaacgccggtcactgaccggcgttactttatctgttttgcaatagctaccgttctttgtccctcatgatgtcagtcaactgacggtctttctcttcccataggccattcagccagcgctggaagccgcgcttaaagttcttatcgttaacgtaatcgccgtgcagctcttcgccaatagggaccagattgatacggaccacaatgcgcgtcaggcggccgcttaacatatcgtaaaatggtcttgtatgattatccgggtagcacagcgtgacgttcagcagtttatcgaactgcgaaccgagtacgttgagcgccatggcgataccagcggctttcggcggtaacaggttgtggtaaggagagcgcgtttcgcgctttttttcttcggtaaaacgtgagccttccacaaaattgacgatagtcgtcggatgcgcgcgaaatttttcacacgaacggcgggtggtttcgacatctttaccgcggcgctccgggtgacgaataagatagctgcgcgagtagcggcgcataaaaggcatatccagcgcccagcaggcgaggccaatgaagggtacccacgccagctgttgtttaaggaagtacttattcatcggaatatgcttgcggaacagcacgcacagcaccacgatgtctgcccagctgtggtggttgctgatcagcagataccagttctttttgttcaggccttccagaccctggacgtcccattttagccagggattgagatgcaacagcagcgccagcccttcgcaccagcagtacatcataaaattgcaaaaaacggatatagagcgccataccgctggaatggggaccagcagtttaatcagcccggcgacgatgatcggtacagagcagataatggtgactaagatggttaaggcgatactcagcggaagtgttatcgcagcgagtaatctcgacatagttagtttattcagaaagttaggctgacaaagagcgcctttaagctgcgcaagaggctgattttaccagaaaacgcggcaaatgacgggtcttaccagaacagaaaaaaacaaggatcttctatccacatggaagattaggtcatcaaattaatgccaggatcgttgatctgtttttaagtggttgataaatagtaaataatactatttattcatttattttcaggggcggataagctgacgttgtaaaactatgcacaaagttatccacaagctaagttgtcgcgcgatcgcgacgatcgttgaatcttttccgcgaattgcgggaaaaattcaggatttcatgcccgtctgtggcatcctttatccataatctgataaacaggcacggaaattatggttcagatcccagaaaaccctctcatcctcgttgacggctcctcctatctttatcgggcgtatcatgcgtttccgccgctgactaacagcgcaggggagcccaccggggctatgtacggcgtactgaatatgctgcgcagtttgatactgcagtatcaaccgactcatgccgtcgtggtctttgatgcgaaagggaaaaccttccgtgatgaattgttcgagcattacaaatctcaccgcccgccgatgccggacgatctgcgcgcgcagattgagccgttgcataagatggtgaaagcgatggggctgccgctgatggctgtcccgggcgtcgaagctgacgatgtgattggcaccctggcgcgggaagcggaaagggcaggtcgcccagtcctgatcagcaccggcgataaagacatggcccagctggtgacgccgggcatcaccctgatcaataccatgaccaacactatcctcggaccggatgaggtggttactaagtacggcgtcccgccggagctgattattgatttcctggcgctgatgggcgactcctcggataacattcccggcgtgccgggcgtgggcgaaaagaccgcccaggcgctgctgcaaggcctcggcggccttgatacgctgtatgcggaaccggagaagatcgctgaactgagcttccgcggcgcgaaaacgatggcggcgaagctcgagcagaacaaggacgtggcttatctctcttatcagctggcgaccatcaaaaccgacgtcgagctggagctcacctgcgaagagctggaggtgcagccgccggcggcagacgatctgctggcgctgttcagacagtatgaatttaagcgctggaccaccgacgttgaggccggaaaatggctgcaggctaaggggggcaaaccggctgcgaaacctgcagtgcctgcagcagcggcagaagcggaagaagaggttgaagccgctactgcactttcagcagagcattatgtcactatccttgatgaggctacgctgctcacctggatcgataagctgaagcaggcgccgctctttgcctttgatacggaaaccgacagcctggataacatctccgccaacatggttggtctttcattcgctgttgagccgggcgtggccgcctatgtcccggtagcgcatgattaccttgatgcgccggatcagatcccgcgcgagcgcgtgctgacgctgcttaaaccgctgctggaggatgagaaggtgctcaaggtcgggcaaaatctcaaatacgatcgcggcattttggctaattacgacattgagctgcgcgggattgcgttcgataccatgctcgagtcttacattctcgacagcgtggcgggccgccacgatatggacagtctttccgaccgctggctgaaacataaaaccattaccttcgaagagatcgctggcaagggtaagaatcagctcacctttaaccagattgcgctggaagaggctggtcgctacgcggcggaagatgccgacgttacgctccagctgcatctgaagatgtggccgaagctacagcagcatgaaggcccgctgaatatcttccagcacattgaaatgccgctggtgccggtgctgtctcgcgttgagcgcaacggcgttaaaatcgaccccgccgtgctgcatgcgcactcgcaggaaattgcccagcgtctggttgagctggagcagcgggcacatgagatcgccggggaagcgtttaatctctcctccaccaaacagctgcaaacgatcctgtttgaaaaacagggtatcaagccgctgaagaagacgccgggcggtgcgccgtccacctctgaagaggtgctggaagagctggcgctcgattatccgttgccgaaagtgattctggagtatcgtgggctggcgaagctgaagtcgacctataccgataagctgccgctgatgattaaccccaaaacgggccgcgtgcatacctcctatcatcaggcggtcaccgccaccggccgtttgtcgtctaccgatccaaacctgcaaaacattccggtgcgtaacgaagaagggcgccgtattcgccaggcgtttatcgcgccggaagattacgtcattgtctcggcggactactcgcaaatcgagctgcgcattatggcgcacctgtcgcgggataaaggcctgctgaccgccttcgcggaagggaaggatattcaccgggcgacggcggctgaagtatttggcttaccgctggacagcgtcagcagcgaacagcggcgcagtgcgaaagccatcaacttcggtctgatctacggcatgagcgcctttggcctggcccgccagctgaacatcccgcgtaaagaagcgcagaagtacatggatctttatttcgaacgttatccgggcgtcctggagtatatggagcgcacccgcgcacaggcgaaggagcaagggtatgttgaaacgctggatggccgtcgactctatttgccggatatcaagtccagcaatggcgctcgtcgtgccggcgcggagcgtgcggcgattaacgccccgatgcaggggacggctgcggatattatcaagcgggcgatgattgccgttgatgaatggctgcggagcgagaaacctcgcgtgcggatgatcatgcaggttcacgatgaactggtctttgaagtgcataaggatgagctcgatgccgtatcgaaaaagatccacgaactgatggagaacagcactacgctggcggtaccgttgctggtggaagtgggcagcggcgaaaactgggatcaagcgcactaagtatacaaagcgcaacgcgattttctgtaagtaagcaacataacttatagagttttgtgaggatcatttgaatttgctatgtaaatagtgaaaaaaaactacaaaaaatgctttatccgtgagcgaaagaagagtaaagttattcgcgtagggtacagaggtaagatgttctatctttcagaccttttacttcacgtaatcggatttggctgaatattttagccgccccggtcatttatgaccggggcgttttttattgcgcgaaagaaaagttttacgctgtgaaaacaacgtagtatgaacgtccggatagggcgctacgcgccgttatccggaaaaagcgggggttactcggcgtcttcgacggcttcttgcggcgggatttcgttaaaccagctatccagcttctgtcgcagcttatcgacgccagattttttcagcgaagagaagggttcaacctggacatcgccattgaaggccagtaccgcttcacgcaccatattcacttgcgctttacgcgcgccgctggcgagcttatcggctttggtgagcagtaccagcacctgaatatcgctctctaccgcccattcgatcatctgttgatcgagatctttaagcggatgacgtatgtccatcagcaccacgagacccttcaggcacagacgtttttccaggtattcccccagcgcgcgctgccacttgatcttcatctcttcgggtacttgcgcataaccatagccgggcaggtcgacaaggcgcttgccctcagcgacttcgaacaggttaatcagctgcgtacgccccggggttttggaggtacgcgccaggttcttctgattagtcagcgtattcagcgcgctggattttcccgcgttggagcggccggcgaacgccacttcaataccggtatcggcaggaagatggcggatatctggcgcgctagtgacaaagtgcgtcagttgataattccagttggtcaagacggtcgtctccgttaaaacaggctatggcagggattatacctgaacagcagaaaaaggctgtttttaccgcacgccgttcctgtaagtaaaaaccatatggtttgtgagacattgactattctttgtataggacatacctgaggaaaataagacaaaacatatttaaaatattgaaaattaatcaattatagaaatagagaattctgaaaatagatttttaactgccagactggttgtcgatttttgtcaacaaggtaaagtaatacacaacggcggggatgctgaaaggattaggactcaggacgaggagtcaggaagcgccaggaggcgaagaccacaggatagtcaggatgacgcgcgtcttggagacgttttacagggaaaaggaagaaacagggaccgttggacgctaagggaaagacagggtgagtcgttagcgaacagggaaagaagagcccgttaagggtggtcagtgaggaaaaaggcgacagagtaatctgtcgccttttttctttgcttgctttctgctagattccgcctcaattctatactgaatactactgtctgaagattacacatcatgaaaaaaccgacatccgccacccgtggcaaatccggccgcaagtcgcgtgaagagttaaatcaggaagctcgcgatcgcaaacggcagaagaaacatcgtggccacgcggcaggcagtcgcgcgaacggcggcgatgcggcttcagcgggtaaaaaacagcgtcaggcgcaagatccgcgcgtgggtagcaaaaaaccgatcccgctgggcgtgagcgaaagccgcgctccagcccccaagcagcataaaccaaagagcgagaaacctatgctttcaccgcaggctgagctggagttgctggagaatgatgagcgcctggacgcgctgctggaacgtctggaagagggcggcacccttaatgcggaagagcagagctgggtggacgccaaactggatcgcattgatgagctgatgcagcagctcggcctctcttacgatgatgaagatgaagaagaggaagagcgtcaggaagatatgatgcgtctgctgaagggtggaaactaacatttgcatcccatcggattcccggtactccttataacccttctggttatatgttatctgctgtggttattcgttaaactacgacggttgtcgcggcgtcagaaatggctgcgcaaccggctcatgacccgcggtgcggtggggccgggacggcgtacccgtcggcggcaccatcggaaggagtgagcatgtctgagcagataatcgactgggatctggccctgatccagaaatataactattccgggccgcgctatacctcgtatcccaccgcgctggagttttcaccgcaatttggcgcggcggaattcgatgccgctgtggcccgttacccacagcggcccctgtcgctgtacgtgcatatcccgttttgccataagctgtgttatttctgcggctgcaataagatagtcacccgccagcagcataaggccgatcaatatctcgatgtccttgaacaggagatcatccaccgcgcgccgctgtttgccactcgccaggtgaagcaactgcactgggggggcggcacgccaacttatctcaataaggcgcaaatcagtcgcctgatggatctattgcgcagccatttccatttcagcgcggaagccgagatctccatagaggtcgatccgcgtgagatcgaactggatgtcctcgatcatttacgcgctgagggtttcaaccgcctgagtatgggcgtacaggacttcaataaagaggttcagcgtctggttaaccgtgagcaggacgaagcgttcatctttgatttgctcaaccatgcgcgggagattggttttacctcgaccaatatcgacctcatttatggcctgccgaagcaaacgccggagagcttcgcctttaccctgcaaaaggtcgccgagctcaatcctgaccgcctgagcgtgtttaactatgcgcatctgcccacgctctttgccgctcagcggaagattaaagatgccgatctgccctccgctgagcagaagctggagatcctgcaggaaaccatcggctcgctgacgacggcaggctatcagtttatcggcatggaccatttcgcccgtcccgatgatgaattagcggtcgcgcaacgtcacggcgtactgcatcgtaatttccagggctacaccactcagggcgataccgatctgctggggatgggcgtttcggcgatcagcatgattggcgacagctacgcccagaaccaaaaagagctcaagcagtactaccagcaggtagcagagcaagggaacgccctgtggcgcgggatcgcgttaactcgcgatgactgtctgcgtcgcgacgtgattaaagcgttgatctgtaacttccagctggatatcgcggcggtcgaggcgcagtgggacgtggattttgcgtcttatttcgccgaggatctgaagctgctggcgccgctggcgcatgacgggctggtggctgtggatgataaggtcattcaggtgacggcgaaaggccgcctgctgatccgcaacatctgtatgtgctttgatgcctacctacggcaaaaggcccgaatgcagcagttctcacgggttatttaatgttttccccctctcccgcaggagagggggaacaattagctgaacagcccgaccagcgcagcgcacagcaaggcagcgactgccgtttgtggcgtgtgactcgcagcggcgccgctcgatatcatactcaccagtgattcaaacatgatgctctcccctaatgccggggacgatcatactcaactcatcggaacagtaaagtacaaaatagcagcactttgcgccgatcggctatttttcatcatgctgttgtaccctactccatacccaattcttttagcttacgcgtcagggtattacgtccccatcccagcaggcgcgcagcctcctgcttgtgcccctgagtatggcgcagggcggtcgttagaagcgtgcgctccatttcgggttgcgcttctgagagcaggttttgatgaccggatcgcaacgcccgatcggcccactgacccagcagcgtagcccagctgtcaggctgcatctgcgttgggctatcaggaatcgtggtctcaaacagttcgctcggcagatcctgcgtcagcacctcctggccggcggccatgacggtgagccagcgacaggtgttttccagctgacggacgttgcctggccacgccaggcgggtcagcgctgtctccgtttccggatgcagctgtttggcttcaacgccgagctcgcgggcggctatctgcaggaaatggcgggccaggcgtggaatatcttcccggcgctcgcgcagcggcggtaaatgcacccggatgacgttcaggcggtggaacaaatcttcacgaaatttcccctcctgcacgcgctgttccaggttctggtgggtagcggcgatgatccgcacatcgaccttgaccggcgcgtaaccgcccacgcgataaaactgaccatccgccagcacgcgcagcagacgagtctggacatcaagcggcatatcgccaatttcatccaggaacagcgtaccgccgtcagcctgttcaaagcgaccctgacggacggtattggcgccggtaaaggctcctttttcatggccgaacagctcggactcaatcaggtccttggggatcgccgccatattcagcgcgataaacggcgcttttgagcgtggactatggcgatgcagggcatgtgcgacaagttctttaccggtaccggattcgccattgatcagcacgctgatggatgagcgcgacaggcggccaataatgcgaaagacatcctgcatagctggcgcttcgccgatgatgtcggcggttgggctacttatcggcgcatttcgcggctgctgctgctcttgatagtggcttatcgcccggtcgacgagggcgacggcttcatcgatatcaaaaggtttgggcaaataatcaaacgcgccctgctgataagcgctgaccgcggcgtccagatcggaatgcgcggtcattatgatgaccggaagcattggatggcgctgcttaatctgtttgagcagcgccagaccatccattcccggcatacggatatctgacagcagtacatccggggttttggtggtgagggcatctagcacctcattgccgctttcgaacgttgtgcagctcaagccggctccggtgagcgcgcgttcaagcacccagcggatggagctatcgtcatcaacgatccaggctatccctcgttgcataaacacctctacttccgaataggcaggtataccgaaaattcggtatgacccggccagctggtgaattcaattttgccggagtgctgatcgataaggctacgggcgatagataagcccaggccggtaccgccttcgcggccgctgaccatcggatagaacagcgtatcctggagatggggcggaatacccgggccattatcttcaacgtcgatgcgggcggcgaggcgataacgcaccccgtgcagcgtcagctggaaagcggtgcgggtgcgaagaataatttcgcccccttccggccccagcgcctgcagcgcattacggacgatgttcagcaacacctgttcaatttgatccgggtcgtggggtagctctggtaggctggggtcgtaatcgcggatcaacttcacgttgtccggcaactccatggaaaccagtttaactacccgttcggcgactttgtggatgctttcggtaacgtgcatgcccggatgctgtggtccgagcaggcggtcgaccagatttcttagccggtcggcctgctcaatgatcactttggtatattccgttagcgccggatcgggcagcgctttgctgagcagctgggccgcgccgcgcaggccgcctaacgggttttttatctcatgcgccaggccgcggacgaggtcgcgagcggcgacctgctgcgcatgctgcagctgctcctggctcaggcggcgctgattatccatcggcgccatttccagcagaataaagccttccggcagccgctgggcggtcaacgacaggatgtgcgaacggccatcgataaccaacgtcacttcgttatcggtaaacccctggcccgcctgcagactctcctgcatcagcccgatattcaacgaaaaatagctcaacagttcaggtaatggggtgccaaacagtttgcgcgagctctgcgccagcagctgctgcgccgcagggttggcaaagtgcaccgccaggtcatcatcgaccagtaaaatactgttgataagggagttaaggatctgcccagcatcgggcagtgtgcctgttgccattcgacagtctcctgaaaatgagtgcaccaatttagtgcagtatagctttttatcggtaaaaagctcgcgagatcagcgtgttggtggagaaaaaagcccatcctgagatgggctgaaagtttccacggcaacaaaatatcccgggcatctcgcgccacaacacgacataccctggatttacagcaaaattagacgctgtagtacagttcgaactcaaccggatgcggagtcatgcgtacgcggtcgttctcttccatacgcagggcgatgtaggcatcgatagcgtcattggtgaacacgccgccagcggtcaggaactcgcgatcagcatccagggcctgcagggcttcttccagagaaccggcaacctgcgggatctctttcgcttcttccggcggcaggtcatacaggtttttatccattgcttcgcccggatggattttgttcttgataccatcaaggccagccatcagcagcgccgcaaagcacaggtacgggttggcagccgggtccgggaagcgcacttcgatacgacgcgctttcggagaggtcaccaccggaatacggatagaggcagagcggttacgggcagagtaagccagcataaccggcgcttcgtaacccgggaccagacgcttgtaggagttggtggtcgggttcgccagggcgttgatggctttagcgtgtttgattacgccgccgatgtagaacagcgcctgctcagacagacctgcgtatttgtcgccggagaacaggttggtaccgtttttcgccagagacatatggcagtgcatgccggagccgttgtcgccgaacatcggtttcggcataaaggtcgcggttttaccaaagcggtgagcgacgttgtgaacaacgtatttgtaaatctgaatttcatccgcttttttggtcatggtattgaagcgggttgccacttcgttctgacctgcggttgctacttcatggtgatgggcttcaacaaccagacccatctcttccatgatcatacacatggtggaacggatgtcctgagaagagtctactggcggaaccgggaagtaaccccctttcacgcccggacggtgacctttgttaccgccttcgtatttggtagaggagttccacgcaccttcaatgtcatcgatcgcgacatgggagccggagatagaggcgccaaagcggatgtcgtcgaacaggaagaattctggttctggcccgaacaggacggtatcagcgatgccggtggcgcgcaggtactcttcagcgcgtttcgcgatggagcgcgggtcacggtcatagccctgcagggtgcctggctcgaggatatcgcagcggatgatcagggtcggttcttcgtagaacgggtcaatgaccgcggtggacgcgtccggcatcaggaccatgtcagattcgttgatacctttccagccaccaatcgaggagccatcaaacattttgccttcttcgaagaattcggcatttacctgatgagacggaatcgtgacgtgctgttctttacctttggtatcggtgaagcgcagatcgacaaacttcacttcgtgctcgttcagcatcgtcaaaacgtgttcagcggacatacttaaactctcccggattggtcattgtcgtcgtggtaacgaaaacttcatactgcttaaaagtggcgttgttgccttaaaaaatataaagcgaaatctgtgccaacttttaaatgccccataaaacgctgtatcatgcgcaccatagtgcaaaaggactgcaccatgatggagataatgcaccaaaatagtgcttcagtgtgaacattgagcaccattttggtgcaatttttgttacggtgcccttttatcgctccgtgaaagcggtcacaaagaaactctgcaatacttgtttgcggaggatgtttgtgatcctgttcagtccttcgcttaatacgtgtacaataacgcgctatttctaatgcctgaggcaaagttgtgatcgaaaatctgcgtaatatcgccatcatcgcgcacgttgaccatggtaaaactaccctggttgacaagctgctacagcaatccggtacgttcgacgcacgtactgaagcacaagaacgtgtgatggactccaacgatttggagaaagagcgtgggattaccatcctcgcgaaaaacaccgcaatcaaatggaatgattaccgtatcaacatcgttgataccccagggcacgccgacttcggaggtgaagttgagcgtgttatgtccatggttgactctgtgctgctggtggtagatgcctttgatggcccgatgccgcaaacgcgcttcgtgaccaaaaaagcttttgcccacggtctgaagccgatcgtggtcatcaacaaagttgaccgcccgggcgcgcgtccggactgggttgtcgatcaggtgttcgacctgttcgttaacctcgatgcgaccgacgaacagctggacttcccgatcgtttacgcgtccgcgctgaacggtatcgcgggtctggatcacgaagacatggctgacgacatgaccccgctgtaccaggcgattgtcgatcgcgtgccggcgccggacgttgatcttgacggtccgctgcagatgcagatctcccagctggactacaacaactacgttggtgttatcggcatcggccgcatcaagcgcggtaaagtgaagccgaaccagcaggtcactatcatcgatagcgaaggcaaaacccgtaacggtaaagtcggtaaggtactgactcacttgggtctggagcgaattgagagcgacgtagctgaagctggcgacatcatcgcgatcaccggtctgggcgagctgaacatctccgacaccatctgcgacccgcagaatgtcgaagcgctgccggccctgtccgttgatgagccgaccgtttccatgttcttcaacgtcaacacctctccgttctgcggtaaagaaggtaagttcgttacctctcgccagatcctggaccgtctgaataaagagctggtgcacaacgtggcgctgcgcgttgaagaaaccgaagacgctgatgcgttccgcgtttccggccgtggtgaactgcacctgtccgttctgattgaaaacatgcgtcgtgaaggtttcgagatggcggtttcccgtccgaaagttatcttccgcgaaatcgacggccgtaaacaagagccgttcgagaacgtgacgctggacgtcgaagagcagcatcagggttctgtcatgcaggcgctgggcgagcgtaaaggcgacctgaaaaacatgaatccggacggtaaaggccgcgtacgtctcgactacgtaatcccaagccgcggtctgatcggcttccgttcagagttcatgaccatgacctccggtaccggtctgctgtactccaccttcagccactacgacgacgttcgtccgggcgaagtgggccagcgtaacaacggtgtactgatctccaacggtcagggtaaagcggtagcgttcgcgctgttcggtctgcaggatcgcggtaagctgttcctcggccacggcgctgaagtttacgaaggccagatcatcggtattcacagccgttccaacgacctgacggtaaactgcctgaccggtaagaaactgaccaacatgcgtgcgtctggtactgacgaagccacggttctggttccgccggttaagatgaccctggagcaggctctggagttcatcgatgacgacgaactggtagaagttactccgacctctatccgtatccgtaaacgtcacctgaccgagaacgaccgtaaacgcgcgatgcgcggtgcaaaagaagagtaattttttcttcttgttgttcgctaaaccccgcctctccggcggggtttctttttttcattcctgcatcacacgccaatagtcaaatccagcctttcccgctaaagttaattttccacggcgcggaaggagacaaaaatgctctatatctttgatttaggtaatgtgattgtcgacattgacttcaaccgggtattgggagcctggagcgatttaacccgcatcccgctggcgacgctgaagcagcatttcaccattggtgaggctttccatcagcatgagcgcggcgagctcagcgatgaagactttgccgccgccatgtgccatgaaatgaatatgcccctcagctatgaacagtttgctcacggctggcaggcggtgtttgtcgcgctgcgcccggaggtgattaccatcatgcataaacttcgtgcccaggggcatcgggtggtggtgctctccaataccaatcgtctgcacaccacgttctggcccgatgaatacccggaagtgcgcgcggccgccgatcgcatttatctgtcgcaggagatgggattgcgtaagcctgaagcgcaaatttatctgcgagtactggaagaagaggggttttccgccgcagatacggtcttttttgatgataacgtcgataatatagcaggggccaaccggttggggatcaccagtatcctggtgactggtaaggagaccatccctgactatttcgcgaaacagctatgctaaaaaccgttcatcaaaaattactccaccatacccggccgctgctggcgtggctaaagctgctgtggcggcgcattgatgaagaccatatgaccaccctggcggggaacctcgcctatgtgtcattactgtccctggtgccgctgattgccgtcgtgttcgcgctgtttgcggcctttcctatgttctccgaagtcagcgtgcagatccgtcattttatcttcgccaattttattccggcgaccggggatgtaatccagggatatatcgagcagttcgtggccaactccagccgcatgaccgccgtaggcgcctttggcctgatcgtcacctcgctgctgctgatgtactcgatcgacagcgcgctaaacaccatctggcgcagcacgcgcagccgccccaaagtttattcctttgccgtttactggatgatcctgaccctcggcccgctgctggcgggcgccagcctggcgatcagttcctatctgctgtcgctgcgctgggcaagcgacctggacggcgtaattgataatctgctccgcctatttccgctgatcctctcctgggcagcgttctggctgctctatagtattgtaccgactacccaggtacgtaaccgcgacgcggtgatcggggcgctggtggcggcgctgctgtttgaggcaggtaaaaaggcgtttgccctctatatcaccacctttccgtcctatcagctaatttatggcgtgatttcggtggtgccgattttgttcgtctgggtgtactggacctggtgtatcgtcttgcttggcgctgaaattactgtcactctcggtgaataccgcaaacttaaaacagaagaaacagaacaaccatgattgcattaattcaacgcgtatcccgtgcaagcgttaccgtggcggacgaggtgacgggcgaaattggcccggggcttctggtgctgctgggcgtcgagaaagacgatgatgaacaaaaggcgaatcgcctttgtgaacgcgtgctgggctaccgcatcttcagcgatgcggaagggaaaatgaacctgaatgtccagcaggcgggcggcagcgtgctggtggtttcgcaatttacgctggcggccgataccgagcgggggatgcgaccgagcttctcgaaaggcgctgcccctgaccgcgctgaggcgctgtatgagtatttcgtcgcccgctgtcgccagcaggaaatgcacacccagaccggaagattcgctgcggatatgcaggtttctttggtcaatgatggtcccgtgaccttttggttgcaggtatgacccagcttccgggcaggctgcgggtaacaaaagagagtacgactatgtatcaccttcgtgtaccgcaaacagcagaagagttagagagctactaccagttccgctgggagatgctgcgtaagccgctgcatcagcctaagggatcggaacgtgacgcctgggatgcgatggcgcatcatcagatggtagtggatgaagagggcaacctggttgccgtcggccggctatatatcaatgcggagaatgaagcctccatccgctttatggctgtgcatccctcggtgcaggataaagggctgggtacgctgatggcgatgaccctggagtccgtcgcgcgtcaggaaggggttaagcgggttacctgcagcgcgcgcgaagatgcggtggaatttttcgccaagctcggatttgtcaatcagggtgagatcaccaccccgaccaccacgccgatccgtcattttctgatgatcaaaccggtcgcgtcgctggacgatattttgcaccgcggcgactggtgcgcacagctccagcaggcgtggtatcagcatattccgctgagtgaaaaaatgggcgtacgtattcagcagtacaccgggcagaaatttattaccaccatgccggaggcggggaaccagaatccgcaccatacgctgttcgccggcagcctgttttcgctcgctaccttaaccggatgggggcttatctggctgatgctgcgcgagcggcacctgggaggcaccattattctggcggatgcgcatatccgctacagccagcctattagcggccgccccagcgccatcgccgacctcggttctctgagcggcgatctcgaccgactggcgcgcgggcgtaaagcccgcgtgcaaatgcaggtggagctttttggcgacgataaacagggcgccgttttcgaggggatctacatcgtgctgccggcgaagccctttggctcgtacgaagagggcggcaacgaggaagagtaagcgcctgcggcagttatcgtcctggcgatgccacacgccaggcgatatcccgcatggcatcacgcgcggcgttgctgacgcctcccagctgaaagaagccgtggatcacccccagatagcgctgacaggaactctccaccccttgctccgtcagccttcggtacagcacttcgccctcatcacgtaaaggatcgaactccgccgtcaggatgtggaccggtggcagaccgtgaaaatcttcgcgccacagcggactggcatccggatgggtagcgggtgtggccgctaaatacatttcgtagccgctaagcagcgtgtcccgggtaatgatgtaatcctcgccgttgctggcgtagcttgccatgctggcggtagcgtcgagcatcgggtaaatcaggataagctgtgcaggctgccatgttcccgccgctttcaggcgcagagccgtgaccagggcgagatgcccgccggcgctgtcgccggccagggtgatgcgcgaagcatccacgccaagctgttttgcgtgctggtgaataatcgtggcacctcgttctgcatcatcgtgcgccgccggaaaagggtactccggggccagacgatactgcacggcgatcacccggcacccactgaaccaggcaagctggcgcaattgattgtcatgggtggcaaagccgccgctgacaaaacagccgccgtggtagtagataagcgtgggtagcaggccgtcggcagtgggcggtgaaacgacgcggaagtgcataccctccagggtgatatcctccacccgcactcgcgtttccgtctccccggcgagtaccgcactggcgatatagccggccctccgatcatcaatatgctgatcgcgtgatgaaggacgacctgccgcaataaatgcctcaaccagcgaagcaatccctttttccagcgccatatgaagttccttatactgttttaatatccagtgttatagcctggattatggcgaaaagacaggcctgttgaggtcgcctgtgcattatggaaagcggctcgcaaaaaagagtttacctgacaaaatcctgtttgtttccgattccaaaagctctagattgctcataacttcatcactggtgatatacttgaggtatatatgagcatgatggctgaaagggatatgggcagaattcttctcgatttatcagacgatgtcattcaacgtctcgatgacctcaaagtgcagcgtaacattccgcgagcggaactgttacgtgaagcggttgaacaatatctggagaaacaagatcgagctaaagataccatctccagtgcgctgggtctgtggcaagactgcgaagaagacggcatggaatatcaacgtcagctacgcaaggagtggtaatgacctccggatctgcgctttttgataccaatattcttattgatttatttagcgggcgtcgcgaagccaaacaggcgctggaggcctggccaccgcagaatgcgatcagtctgattacctggatggaggtgatggttggcgctaaaaaatatcaccaggagcagcgcacgcgaatggcgctgagcacctttaatatcattaacatctcacaggatattgcagagcgaagcgttgcgctgcggcaggagtataagcttaagctgccggatgccatcattctggcgacggcgcaactccatcgtctggaactaattacgcggaatacgaaggattttgccggtattcctggcgtagccacgccgtacgaaatccaccctgaataattcgagtggcaggaggacgacaagtgagcgataaactcgtctgaaacgaatatctccagccaaaggttggcctctgataacggtcagtgacgcgtgtgaataatccctgcgcacgttcgtgtcacaagaaggaaaacgggcgacaagagccgcccgaaatcatactgcagaacttactccccttcgccggggaacatgaacgggttaattgagcttctggcgaagccctcctgttccatgcgggcgtcgagcaccagggaggccaaatcgtcggcgacggcttcgactttcggatccttctcctgatacataatcttcaggtaggttccgcagtcgccgcagctttcggctttcaccgccgcctgctcgttgtccagcgaccagtagtgcaggtcgcggctctgctcgcagttgctgcacttgacgcgtactacgtgccactcagtttcgcacaggttgcagtgcagatagcgcagcccctgagtggtgccgatttgcacgatgctggagaccggcatcgagccgcacaccgggcagaactggcgctgttcgccgtattcggcgcgcgcttttcctgggatcagactggccatctgcgcccagtagagcgacagcgcagcccagatgaacggcgctttgtcgctactgacggaggcgaaatcggaaacaaacagcgcgctggccatctgctccagctcctgctcagaggctttttccagattctcaatgaccgccagcgccgggccgctcatttccggcttcagctcggcaatcagcgagtgcaacagcttgtgccagtgcttgtcgcgcggcaggacgtggatatccagcggcggcttgccctgttcgctggccgctttaatgcgggcggtgagatccatctgcagcggatggtcgtacagcactacttcctgggcatgggcaatcagcgcggcaaagcgcaggtaatcgcctagcgggttattagcggccagctcgcgcaagcgttcagcgcggcggttatacagatttttcagcctggggaacagtaacggcggaattgcttccgccgtgcgtttctcgctcgaacccagctcgtcttgcgggattatgcgaatactcattcagatgacttttcctgtttctggcggacctctcggtaccagcgcgggtgatgtttcttcgcccacgttttggtaacccagccttccaccatcgcggtaatggtgcctttcacccagagggcggcgtagatatgcaccatgataaccacaattaacgccactgcggcaaatgaatgcagcatcagcgcaaatcggatcaccgggattgagaaagccggcgcaaaatacggacgccagatgatcacaccgctcaccagcagcagtaccaggaagataatcgccgcccagaatacgcatttctggccgaagttatagcgcccggtatcgcccacctcctcgttgacgacgatcttacgaatattcttcgcccaaaagatatcatcccgattgattaggttgtgatgccagtaacggaaaaacatgatgataaacgacgcgaacatcaccaccccgacgaacgggtggagaattcgcgccagctgcggcgtgccgaggatatgcatcagccagttaaaggacgggaagaaaaagcctaacccgctcaccgccgccaggacgaagcagaaggcggtgacccagtggttgatgcgttccggcgccgtgtagcgcacgatggtgtcacgtcttttcatttgcgcacctcgtctttctcttcatgcagattgtcctcttcctcttccgcgcggttcggaccgacgccgacgtagtggaagatactggctgcgaaggtcgcggcgaagccgacggccgccagcggtttccagatgcctttccagaacttgacggtctggctgatctccgggttttccggcaggccgtggtacagattcggcttgtcggcatggtgcagcacgtacatgacgtgggtgccaccgacgccggccggatcgtacaggcccgcattgtcataaccgcgggttttcagctcagccacgcgttcgccggccagcgttttcatatcctctttggagccaaagtggattgcgccggtcggacaggttttcacgcaggcaggctcctggccgacggtcacgcggtctacgcacagggtacatttgtagacgcggttgtcttccgggttcagacgcggtacatcgaacggacagccggcgatacagtagccgcagccgatgcactgctcggactggaagtcgacaatgccgttggcgtactgaatgatcgcgccttctgacgggcaggccttcaggcagcccgggtccgcgcagtgcatgcagccatccttgcggatgagccattccagcttgtcgttttgttccacctccgagaagcgcatgaccgtccatgacttggcggtcaggtccgccgggttgtcatacaccccgacattgtgaccgacttcatcacgaatatcgttccattcggagcaggccacctgacaggctttacagccgatacaggtggtgacgtcgataagcttcgccacctcctgctggtggtcccgcgcctgaggcgcgggggtgaaaccgttagtcgcggaacgacgaataatatcttgcgattggtaagccataagtcgtctccgttacaccttttccacgttcacaaggaaagctttgaactccggcgtctgcgtattcgcatcaccgacgaacggcgtcagggtattggcaataaagccttttttcgccacgccctcatagccccagtgaataggaatgccgatggtatcgatatccttaccgtcaactttcagcgtgcgaatacgtttggtcaccaccgccttggctttgatatagccgcggttggaggaaactttcacggtatcgccgtggccgatgccgagcttattcgccagtttttccccgatctccacgaactgttccggctgggcgatggcgttaagtagcgcatgcttggtccagtagtggaagtgctcggtcagacggtaagtggtgccgacgtacgggaacttctcggccttacccatctgctcgagatcgcctttgaagacgcgagcggccgggttagagaccacgttcgggtgcagcgggttggttccgagcggcgtttcaaacggctcgtagtgttccgggaacggtccttccgccatcttgtcgatagcgaacagacggcccatcccttccggctgcatgataaacggaccgacgtcgctgccaggcgcggcggcgctgtagtccggaatatccacgccgccccatttggcgccgtcccatgtcagcaacggccgcttcggatcccacggtttaccctgcgggtccgcggaggcgcggttatacaggatgcggcggttgagcggccaggcccaggcccagcccagggtattgccgagaccggatggatcggcgttatcgcggcgcgccatctggttaccttccggcgtccagctcccggcgaagatccagcagccgctggaggtggtgccatcatctcgcagctgcgcaaaggagctcagctgttggcctttcttgacgatcaccgcgccggttgccgggtcggtgatatccgccagcgctttaccgttgctttccatcgccacttcttccgatgccggctcgtgtggcgtggagtagttccacgtcatgttgagcaccggctccggcgccgggccaccctcttcggcatacatcttacgcaggcgagtgaagataccggcgagaatttcaccatcggtgacggcgatcccgggggcgtccgcgcctttccagtgccactgcagccagcggccggagttgacgatagacccattctcttcggcgaagcaggtggagggcagacggaacacttcggtctggattttcgccggatcgacatcgttcgactcaccatggttttgccagaaggtggacgtttcggtattgagcgggtcgatagtcacgaggaacttcagcttcgacagggaagcgacgaccttgtttttgttcgggaacgaggcgaccgggttaaagccctggcaaatatagccattcactttgccctgattcatcatctcgaagtactgcagaacgtcgtagctcttatcccacttcggcagccagtcatagccccagctgttttccgcggtggctttgtcgccgaagaaggctttcatcatggagacgaagaacttcggatagttgccccagtagttgacctggtctttcagcagcggcttcggcgtgttagccgtcaggtaggtctgcaggtcggcctgtttttcgttcggcagcgacatgtagcctggcaggctggtggagagcaggccgaggtcggtcaggccctggatattggagtggccgcgcagggcgttgacgccgccgcccgccatccccatgttgccgagcagcagctggatcatcgccatggtgcggatattctgcgcaccgatggagtgctgggtccagccgagagcgtacaggaacgatgcggtcttatccggcgcgctggtttcagcaatgtattcacagactttgaggaagtcggccttcggcgtaccgcagatgttttcgaccacatccggggtataacgggaaacatgctgcttcagcaggttccagacgcagcgcggatgttgcagcgtagtatcgcgtttggcgaagccgttttcgtccagctcatagttccagctggttttgtcgtactgacgtttttctgcgttatagccgctgaacagcccgtcgtcgaagctatagtcctcacgcacgatcaggctggcgttggtgtaggcttcggtgtattcgcggttgaatttttcgttattcagcagatacaggatcacgcccgacaggaaggtaatgtcggtaccggaacgaatcggggtatagaaatcagccaccgacgccgtacgcgtaaagcgcggatcgataacgatgagcttggcgccgttatgaattttggcttccatcgcccagcggaaccccaccggatgcgcttctgcggcgttaccgcccatcactacgaccaggttggcgtttttaatatccacccagtggttggtcatagcaccgcgaccaaatgttggagcaagacttgctaccgttggtccgtgtcagacacgcgcctggttatccaccgccagcatcccgagggcgcgggtgaatttttgcgttaaatagccggtttcgttactggaggcggaggcgcacagcatcccggtagtcaaccagcggttgacggtggtgccggcgtcgttttgcgcgataaagttggcgtcgcggtcctctttcatcagcttggcgatgcgatcgaacgcttcgtcccaactgatttgctgccatttatcggagcctggcgcgcgatattccgggaatttcaggcggctttcagaatggataaagtccaccagaccagcccctttcggacagagcgcaccacggttgaccggatgatccggatcgccttcgatatggaaaatggatgctttggcgtttttcgcgccgtcgccgaggctatacatcaacagcccacagccgacagaacagtatgtgcaggtgttacgggtttcgcgcgtgcgcagcaatttgtactgccgtgtctccgcgagcgcagttgccggggcaaagcccagcgctgctgccgtggttcccgccataccgccagcgcagatcttaaagaactgccttctgctgacctgcatggttcgctccttgtttcgacattgtcacatgtagttatttgctttgcggtgaaggccgcaaaggttcagaattagggcaaatttccctcattcctgaagggataaaaacagaataccacattgtgtgtatgcctgttccaatacggttaaagcaaagtgaacaagaagcctctcgaacaaatcaaaaatgtgacgaatgtcacaggatatcgccaggtctccctctggaaacgcgaggatctgcaacaccctcagccagatgagttagcggaagaggtgcccgtcgcgctggtctacaacggtatctctcacgtggtgatgatggcctccccgaaagatctggagcaattcgccgtcggcttctccttatccgaagggattatcgagcaccggcgggagattttcggcatggacgtggtagcggtgtgcaacggccttgaggtgcagattgagctctccagccggcgttttatgggcctcaaagcccggcgtcgcgcgctggccgggcgcaccggctgcggcgtatgcggcgtcgagcagctcaatgatattggtaagccggtccagccgctgccgttcactcagtcgttcgatttagccaatctcgatcaggccctggcgcatcttaacgactttcaaccggttggccggctcaccggctgtactcacgcggccgcgtgggtccggttgacgggcgaactggcgggggggtttgaagacgttggccggcatgtcgccctggataaattgctgggccggcgggcggaagtcggcgaggggtggcagcatggcgccgcgctggtctccagccgcgccagttatgaaatggtgcagaaggcggcgatgtgcggcgtcgagatcctgttcgcggtctcggcggccaccaccttagcagtggaagttgccgagcgctgcaatctgacgctggtgggcttttgcaagccgggcagggcgacagtttacacccatccgcagcgtttaattgcgggttaaatattggtcaataaatttgaacaatgacagcaaatccttccgctttttgtttagcgatgtgcgggctactatttaacacatcaaggcacagcgccttatctaaacaactaaatgaaagggtttatatcatgaaaagcatcaaaacttttgtcgcagtaatcgctatggccgcctctttcgcttccttcgctgctgaaaccgtgaccgcaaccgcctccacaatggacggcgcggaagcgaaaatcgccgcacaggcgcaggctgccggcgcttcgtcttacaaaatcaccgaagcgtttaccggcaaccgcgtgcatatgactgccgaactgaacaaataagcgtatagcaactgtcgaaagagcgcctcagggcgctttttttgtttttgtttttcgcttcccgtctctgcgaaatttgccaatattttcctctgctacgaaaaaaatgtggcactaatcacgtttccgttcttttcttaaatcctcctttttatggcaaaggaaaggtcagcacgcctgaatatctcgattttttaacgccatgaaatttaaagaaataaaaaacagaaagcgatggagatcactctctttaaatgggatgcgtatcacaaaaataggtgtttcgccgtacctgtcaactattcactgcggtaatttaatacgcattatgtgatcttcattgcaaatagaaggcttgtactcagggaaaaatgttgtcaggcaaatgagcgaggatgcgtcatgaaaattggtatcgttattagcggcggggatgtttctggaatgaataattttatattccagatagccaggcaggctaatgctgatatcacgctgtttaatggcggtattccagggctactggagaaaagtcatcaggatatggcgtggcgcgatctggttgattattcaattaccgcggtgccgatcattacctcggggcgaaccagtcgcaaactgcagcgcagtgaatatgaaagcattgctaaaaaacttaaatctctgcgtattgatgtgctcattatggccgggggggatggcagcctgcagtttctgaatacccttagtgaatttgagattaattgctttggtgtgggaatgactatcgataatgatgtgtatggcagtgattatacgattggtttttccacggcctgtgagcaaattattaaagaagtctctcgtttaagaaataccggaagagcgctgcccggtcgggtttttatggttgagatattaggaggctattgtggagaactaacgttgcagtccgccattaaatgtaatgcggatattgccctgatcccggaggcacagatgccgttggccgtgctcgcggaacggattacccggaagctgagtacgcagaatagcgtcgttatcctctgctcagaaggctataccaaagagtactctcccggctttcagggggcgattgataccatgattaaacagctggaaccacaaataggtgtccgtatccgtaaaacgatcgtcggctatggtttacgcagcggtgatccaacctgcgaagagatttatcagggcactattatggccagtgaagtggttcgctgtattcagtcaggtatgaaaaataaagccataataattaattccagtaacaaacctattccgattgatttagtcagtatgaaaaaacgtctggtcgatactgaaggacatcattataaacttgccaagcaactcaatattatttgaggagaccctccatgctgaaaattttatgcgtatgtggctgcggcctcggttcaagctttgccattgaaatgacggcgaaggcagttttaaagaagctggaaattcccgctcatattgaacacaccaccgtttccgaagctggggcctttaaatcggatatgattctgacgcaaaaaacctttgccgacatcttaaccgccgatgccagtgaagaagaaattaaacgtgtcgtggtattgaataaacttactgataaagaggagattgaaactaagatcgtcgcattcttaaaagaacgtcatctgaaggtggctgattatgaatagcttcgtggcgtttatcgttaaggatttactcggccaggcatccattcttattgcttttattgccatgcttggcctgatcctgcaaaagaaatcgccaggcaaaaccgcggaagggacatttaaaacgctgctcggtttcttaattatgatggccgggataaacatcattgtcgccacgctgaccttcctgaatgatatcttcacccagggatttggcatgaaaggctatattaccgatgtggccgccatcgccgggttagcgaatcgggaattaggttcggaggtggcgctgacgctgctggtgatctttgccgtcaatattattatcgcccggctgacgccgctgaaatatatttttctgaccggccaggcgctgctgtggatggcgacgatcggcgccgtgattggctataagtccgggctcaccggcgtaccgctgattttaaccgggggcatcttcggcggcgtgatggcggtgttaatgccggccctggcgcagccggtggtcaggcgcattaccgggtctgacgatgtggccctggggcacttctgtactatcggctatctggtgcaggctgcggtcgctaaagttgtcggaaaaggctctcgctccacggaagatctcgaactgcctgataactttaagtttctgcaggatacctatctggccatggcggtggtgatggtgccgatgtatctcatcccggctatcgcggcggggcctcagtacatcgcgcagttctccggcggcattaattacctgatgtatgccttcatgcagtccattcagtttgtcgccggggtctttgtcctctatagcggcgtgcgtttattactcaatgagctggtgccggcttttcgcggtatcgcgatgcgtattgtcccggatgcaaagcccgctctcgattgcccggtgctatttccctatgcgccgaatgcggtgattgttggatttctggcaacgactatcggctcgattatcggcatgctggttttcccgatgttcggcctggcgatgattctccccgggctgttaaccaactttttcgccggcggtacggcaggggtatttggcaatgcgctgggcggacgtcgcggggcgatgatcggcggggtgattcacggcctgtttatcacatttctgccggccattctggtacccatgctggagagctacggctttacgggcgtcaccttcagcgattcagacgtcatcagctccggtctggtattaggccacgccttccagaataactggctctttgtcgccttgtttattgtgtttgtcgccgcactggcatggtttgtaaacggtaaatccgctaagccgaaaggggaaagtgttcatgagtctgtataattttaatgagattttaaaaatcgctcaggaaagagattttaaagcgattggctcgtttaacttgcactgtattgagatgttaccggcttttttcaaagccgcgcaaaacagccgcagcccattaatgatccaaatatcaaccggtaccgcagagtatctggggtatcggttactggtcgatgccgtgcgttcattagcagacagtgaaaatatcccgacctgcctgcatctcgatcactgctccgatattaaagccatcgagacggcaatgaatgcgggcttttcttcggtgatgtacgacgggtctcacttaagcctcgaggaaaatatcggtaacacgcggattgtggtggaaatggcccggccgtggaatattacggtagaaggtgagctgggggcgatcggcgggtcagaggatggaaaagcggtggctgccgaagatatctgtttcactaccgtcgaagacgcgacgcgttttgtgaaggagacacaggtcgatatgctggccgtctcggtgggcactgtgcatggcctgtacaccggtaaagcgcagatacagcatgcgcggctgaaggcgataagcgaagcgacgggcgtgccgctggtcctgcatggcggcacaggtgtcagcgatgaggatatgcggctggccgtcaccgaagggattaataaagtgaacgtcggaacggaaatgaacgtgcagtgggtcgatcgctgtaaatcaacgtttgagaaaggaaaagtaaatgacagcgtacggaaatttttaattcccgccaaccaggcagtgactgccgtattaatggaaaaaatggcgctatttaaatagcgtttttaccgacacatatcttttgttgccctgtcttccgccagggagggagcttgctatgtttgaatcattgaaaacgctgtggaaaaaagagcaaaacccgctgcaggattatgatcaacagtcccgtcagctggcggaagagatcgccagactggaaggcgaattacagcgccagcccgataatagcgacgtgcaaaaaacattgatgttgacttacaaccgggcattatcggtatatgccaaaagtaagagccaccggcaggatatcgatgcgctgtttctgcagattgataatttacgcaatattattcgccgcaatatctaggaacagagaatgaccataaaagaactgcttattgaggccgatgccattcaggttggcgttgtggagtccgactggcagcgggtaataaagctggctgcccgcccgctggaggcaaaaggctttatttcgacggaatatagccaggcggtgatcgacaatactttaaatcatggcgcttattacgtttttgatgaagggattgccatcccccatgcccgccccgaatgcggcgtcagacgcaactgctttagcctggtggtgctggaaaagcctattccctttgcggacagtgaaaaagcggacattgttattatgtttggcgcccgggacagcaatgcgcatatcgaggagggcatccgttccatcgtcgcgctgctggataataatgacaccatggccaaactgcggacggcccgcagccgggaggaggttgtcgcattactatgaacagacatctgaccccaggctgcaaaacggccattttaatcaacggcattccggcgtcggggaagagcaccattacccgtttgctggcggagacctttagcctgccggtattgacgatcgacggcatcaaagagccgtttatggcgcgcctggcccctgtcgaccggccgatgaatcgccagctgggctgcgcggcgtatgaggtgatctggtcgattgtcggcgcatcgcctgccagcatggtctggttgatcgacgcctggttcggctttcagccgcgggagaccttgcagagactgctacagcaggcgggcgtggagcaggtgattgaggtctggaaccatatctctccggagctggccgtcgcgcgctatgcctcgcggctggcgacgcggccgccgggccaccccggagaagagtatttgccggagctggcccagctggccgggcgggcgcagcccatgtcgttaggacctgtactgacgatagaccagcggcacccgctgcaaatcgaaccggttattcagtggcttgtaggcacgatcgccggacagcacagcggttttacagattacgcttactcgtcctagggcatacccgccaggcgcagcagcgcggtcaccacggcggcggcgataatcacgccgatcagcgggaccttgcgccaggcgaggaacacagcgaaagcaacgcccagaacgcgcgccataccggcgaaatgtgcgccctcatagaaagtggtggccagggcgacggaaaaaagcagcaccgtcgccgcatcggaaagcagcgcctgcgagcgctcggaaaatgccagccgattgccgagcttcgcgccgccgaggcgcatcagataggttcccagcgacaggatggcgataccggcgataaacagcgtcatattgcccattattttttcctcgacagtaaaccgaacagcgaaagcagcactggcagcccggtgggcacaaacggtacggcggcaagcgccagcgcggcgccgctggcggcgcggatcagcgtagtgcggtttttaaaggccgggatcaccagcgccagcaggatcgccgggaagaccgcatcaagcccgatggtttccggcgctggcagcagtttgccgacggccgcgccggttagcgtaccgaggggccagatcagcgcgacgccagcgccgcacagccagtaggccgctttgcgctgcgcgggggtgggctgcgacaagccaaagaccacgctctcgtcgttcataatgtggcacccgataaagcttaaggcgcgccgaccaaccagttcgcgtacggtcaccccgaacgggatatgacgcgcattgactaacaggccggcggcggcggcggccagcggactaccgccgctggcgacaatgccgataaacatgaattcagaagcgcctgccagcacggacaccgaaagcaagagcggcacccataaagggaagccgtaagccaccgccagcgacccataggacatgcccaccaccccgacggcaaggcagaccaaaacaatcgcttttatcgtgtctccgctgagactggagagagtttgtttcatatcacttagccatatcgaacgaatttccattataatgaacacataatgatcgtttttcaaggcgaacgaattgttcgatataaaaaacaaggggcgggtatgacacagccaatcagcgttatcgccaaaagtctggtgcgggagcgggcgcggaccgggctttcgctggcggaagtcgcgcgtcgggcgggtatcgcaaaatccacgctatcgcaactggagtccggcaacggcaacccgagtctggaaacgctgtggtcgctctgcgtagcgctggatattccatttgccaggctgcttgagccgcaggtgaacaaaacgcaggtgatccgccgcggcgaggggaccaaagtggtggcagagcaggcgaactatcaggccattttgctggccgcctgtccgcccggcgcgcgtcgggacatctatttgctgctcacccagcccggcgccgaccgcatttcgcatccgcatccgccaggctcggtggaacatattatcgtcacccaggggcgggcgcgggtagggctgacgtcggcgccggaagagctcggcgagggcgactatatctgctacccggcggatcaggagcatgtttttcaggcgctggagccggatacgcaggccctgctgatcgctgagcaaaactgacatcgcgtcggcgggggacgcgcgctcgctggacgtcatagccatattgcgggaaactagctttcctatgcgaaaacagggatttttatgtcgctgaaagccattgccaaacaacttgggatctccgtcacgaccgtcagccgggcgttgaacggctacgacgatgtgtcgcaggagacccgcgcccgggttgaggctgaagcgcagcgccggggctatcgccccaacactttcgcccgccgtctgaaaatgggcaccatcgatgccgttggtctcgtctttcctgtccgccccgcgccgctcaacaataacgtttttctcgagatggtcggggagatcagccatgagctggcgcgccatgacattgatttgttgctgatcgccgatgatgagcaggcggataaacatggctatatgcgcatggtgcagggccgtcgcgtcgatgcattaatcgtggcccatactctggatgacgatccgcggctggcgcagctgcaggcctccggctttccgtttctggcgctcggccgtagccgcctggcgcagccctacgcctggtttgatttcgataactatgccggcacctgccgcgccacccgccatctgattcaacagggccaccagcgtatcgctctgctgggcgagaacaacaatcaggcgtttattttgcaaaggcgtaacggctacctcgatgccctgcgcgaggcggggttatccgatgcatggctgcgtagcgtgccggcgacgcgccgcggcggctatcaggccacgctggagctgctgcgtctgcctgagccgcctaccgcgattatcaccgactgcaacacccatggcgatggcgccgcgatggcgctcgcccacctggggcgtttaaccggcgacaaccgcgtcgccctggtggtgtacgacgggctgccgcaggacagcatcattgagaccgatgtcgccgcggtgatccagtccacgcgccagggcgtgggaaggcagattgccgatatggtgcgtcgcttaatcgccggggaggatctcgccacgctgcaggtgctatgctatggcagccggaatttttcccgggtgaaaccgcctgatcttacccctttttaacccgtaattctgaagccgatcacggatccgaaacgttttggttggcatccgaaacgtttcggatcaacagtaagacattccttgtaatggagatgtctgatgtctgattcgctgattcacctgcaaagcgccggtgccgatgttgtgattaaaacccgccctttcgccgaaattgtctactggggaccgcatttaagccacttttcgccgcaggatgccgacagcctgacgcgcccggtcgccaacggcagactggatgtcgattcgccagtgaccttaatggcggagctgggccatggtctgtttggcgcgccgggcattgaaggccatcgtcaggggctggatgcctctccgctgttcaccaccagcgaagtgcggcacgagggccagacgctgaccctggtcagcgaagatccgcaggccggcctgcgcctgcagagcgagatcgcgttggatgccagcggcgtgctgagcgtgcgccatggcgtgaccaatctgcgcgccagcccatggcaggtggatcgcctggcggtcacgctgccggtcgccgaacgcgctcgcgaggtgatggctttccatggccgctggatccgcgagtttcagcctcatcgcctgacgctggagcacgacagctttgtgctggagaaccgccgcgggcgcacctctcacgaacatttcccggccctgatcaccggcagccgcgcctttagcgaggtgcagggtgaaggctggggcgtgcatctggcctggagcggtaaccatcgcctgcgggcggaggtgaaaaccgatggccgtcgctatctgcaggccgaggcgctctatctgccgggtgaaatggcgctggcggaaggggaaaccttgtggacgccgtacctgtatgccagctactcggcgaatgggctgaacggcatgagccagcagttccatcgttatctgcgcgaacggattattcgtttcccgggcaacaaaccgcgcccggtgcatctcaacacctgggaggggatctatttcgaccacgacccggactacatcatgcgtatggccgacgaagcggcggccctgggcgtcgagcgctttattatcgatgacggctggtttaaagggcgcaacgacgactgggcggcgcttggcgactggtatctcgatgagaaaaaatacccctacggcctgacgccggttatcgatcacgtgaagtctctgggtatggaattcggtatctgggtggagccggaaatgattaacccggattccgatctgtaccgggcgcacccggactgggtgctggcgctgccgggctataccccgctgaccggccgccatcagtttgtcctgaacctcaacattcccgaagcgtttgattatctgctggagcggatgagctggctgctgggcgagcatgcggtggactacgtgaagtgggatatgaaccgcgagttggtgcagcctgggcatcagggacgcgccgctgcagacgcgcaaacgcgccagttttaccgcctgctggatacgctggtggcccgtttcccgcacattgaatttgaatcctgctcctccggcggcggacggatcgattatgaagtcctcaaacgcagccatcgcttctgggcgtctgacaacaatgacgcccttgagcgcaacaccatccagcgcggcatgagctacttctttccacccgaggtaatgggcgcgcatattggcaatcgccactgtcatgccaccttccgccagcatagtatcgccttccgcggcctgacggcgctgttcggtcatatgggccttgagctggatccggtgagcgccgatgaagaagagcgcgccggataccgaaaatatgcggccctgcataaacagtggcgcgacgtgatccatcacggcgtgcagtggcgaatagatatgccggacgccaccacccttgcccatggcgtcgtcagcccggataaagcgcaggcgatcttcctcgttagccagctggcgatgccggactacaccctgatggcgcccctgcgcctggcgggcctggaggcgagcgcccgctatcaggtgacgctcctcgatcatccgaacattcagatcaccggtgagggcggccacaccatgcggaagctgccggcatggatgacgacgccgcagacggtgagcggtgagtggctgcagcaggcggggctggcgctacccatcctcgacccggaaagcgccattctgattggtctgcaacgcgtgtgatggtatcgggctgcgctgcggcccttcttgaggaaaatataatgaacccgaccgtctgtacccacaaaaacaaccccaacttctggattttcgggctgttcttctttctctacttcttcatcatggccacctgctttccgtttctgccgatctggctgtcggacgtcatcggcctgaataaaaccgaaaccggcctcgttttctccagcctgtcgctgttcgccatctgtttccagccgatcctcggagtgatctctgacaagctggggctgaaaaaacacctgatgtggatcgtgaccgttctgctggtgctgattgctcccttcttcctttatgttttcgctccgctgctgacaaccaatatctggctcggggcgctgagcggcggcgcctatatcggcgttgcattctccgcaggcgccggcgcgatggaggcctatatcgaacgggtaagccgcaacagcgggtttgaatacggcaaggcgcgcacctttggctgcctgggatgggcgctgtgcgcgactaccgccggaatgctgttcagcattaatccagaatgggtgttctggatggggtcagccgccgcgctgctgctggtggtgctggtggccatcgccaaaccgcaggccagtcagtccgcgcaggtgatggattcgctcggcgccaatcgcccggcgatcgatttaaaaacggcggtgcgcatgttccgccagcgtaagatgtggatgtttattctgtatgttatcggcgtggcctgcgtgtatgacgttttcgatcagcagttcgccaccttcttcaaatcgttcttcgcgaccccggaagcgggcacccgcgcctttggtttcgccaccaccgcgggagaaatatgtaacgccatcattatgttcagctcgccgtggattattaaccgtatcggagcgaagaataccctgctgatcgccgggatggtgatggcggcaagaatgattggctcttccttcgccaccaccgccgcggaagtcgtagcgttgaaaatgctccatgcgctggaggtgccgttcctgctggtgggcgcctttaaatacatcaccggcgtgtttgacgtccggctgtcggcgaccatttacctggtgggcttccagttcgccaagcaggtggcagcgatcttcctctccgccttcgccggcaatatgtacgatcggatcggtttccaggagacctatatgatcctcggtggtattgctctgacggttaccttaatatccgcgtttacgttagcgggtaagacgaaaaccgagccgctgcgcgataatgcaatgaccgtttaatcgaccggcctcccgtctggagggaggccagttatttttacgccagataaaacacttctttgagctccgcgctcagcgggctgttgtccgggttgctgggcatcacctcgcgcatgtatttccaccaacgctggcatacttccgtgctggcgaccgcttcccagcgggcttccgattcaatctccaccgtcgcgaacaggagatggcgttctttatcgagataaatggcgtagtggtgcgcgccgtgatccttcaacactgcctccagctccggccagatggggttatggcggcgctggtactcctcgtgcgcgtcggggttcacctgcatgacgaaggctttacggatcataaggcctccagatagagctcgcgaacctcatcgcggctggcggggcgcgggttacacggcgcgcatgggtcggccagcgctttatccagccagccttcgatatcggctttgctgacgccaagctggctgaaaccctgggggatccctacgcgtttgctcagcgtgcggatggcattgatggcctccatgctggcagcttcatcactcatgccgcgagtatcgacgcccatcgcctgcgccacgcgggcaaagcgcgccaccgcgttcgggcggttaaagttttcgatgatcggcagcaggatggcgttgcataccccgtgcggcaggttgtgggtcgcgccaggctgatgggccagggcatgtaccagcccgagaccggcgctgttgaacgccatgcccgccagatactggccaaacgccatctgctcgcgggcctgcagatcgtgcccatcgtctaccgctttcggcagccacaggttaatcaggcggatggcttcgagggcgttggcgtcggtcagcggatgggcgccaacggagacaaaggcctcgatggcgtgggtcagggcatccatgccggtggcggcggtaacggctggcggaatgtcgagcatcacgctggcgtcgtcaacggcgatatccgggatcaggttcgggtcgataatcacctctttcacctgccgctcgctatcgataattaccgcgttgctggtcatctccgccgccgtgccggcggtggtgttgatggccaccagcggcacgccagcgtttttcactttgccgacgccggagtaggcggtggaggggcctgggttggcggtgaggatttttatcgctttggcggtatcaatcgggctaccgccgccgaaggcgatcaggtaatcgcagcgggccgcctggtaagccgcatagccttgctgcaccagcgcttcggtggggttggggaatacctcgtcaaatagctgataagccatctgctgttcatccagcgcggcgaacaggctgtccagcaggcccagcttcaccagctgaccgtcggtgacgatcagcgccttgccccattgtttgcccgctaccagcttgaccatatcaccgatcgcgcctgcgccgtggaggctgattttaggtagtgccaacataaaactcatgataattctccttaatgttgattttgggaaatccgtttcccctcaccccgaccttctcccgcagggagggggccagggtgagggggaaattaacatcgtcttcgctgcatcatccgccgggtaataatcggcagggagatcaccacgatcagcatggcgccgataatcaccgacatcacgatgccggggacgttcagcaggctcaggccgaaggtcaccagccccatcagaaaggcggcgatgatcaccccgggcatgctgccggagccgccgagaatattgacgccgccgagcaccgccatggtgacaaccgccagctcccagcccatcgccagggtggggcgggtactgccgagccgtgaggtcagcaggaccgccgccagcccggccatcagcccaaccagcgcgaacagcaccaggttatgacgcttaacgttgatcccagagaaccaggcgccggtcgggttattgccgatggcgtaggtccggcgaccaaagttggttttatgcagcaggaaggtgaaggcggccgcgaggaggataaacagcgcaaactcaaaagagagcgccccccacacgtacccttggccgaaccaggcaaagctctccggatagtgattgagtgcctgatcgcccagcaggatataggtgatgccgcgatacaggctcatggtgccgatggtgatcacaatggacgacaggttaaagcgggtcaccagcaagccgttgaacaggccgcacagcagacctacgcccaggccgatgaccaccagcagcggagtgtccatccccgctgccgcgcagaagcccatcaccgttgagctgagcgccatcgtcgaggctaccgacagatcgatttcccgggcgataatcagcatcgccatcggcaggacgacgatcgccttctcggtaaaggtaaaggtggcgtccgacaggttccagatattgaggaagtacggggaagccacggcgttgccgataaataccgccagggtgaccgccagtaaaaacccttcccagcacagcaggcggcgcagcggcgacggcgcggccggggcgtttttcatctcttcagataccagcattttgctcatgatttccccgcctgtttctgtcgggctaacgccgcgttgcgcaggattaaccgcccgtgaccgcgattgccgcgctcgttgagcagcaccgccatgacgatcaccgccccggaaatcgccatctgccagaagggcgagatgccgatcaccggcagggcgttattaatgaccccgaggaacagcgcgccgcacaggcagcccagcacccgtccgcttccgcccatggtgctgataccgccgatcacgcaggcggcgaccacctggagttcaaaaccgttggcgacgtcgacataggcgacggcgaagcgcgagatccacagatagccgcagaagccggccagcgcgccggagagacagaagctgacgaactgcatttttccggcgttaatgccggtgtagtatgccgccgtcgcgttgccgcccgcggtgtataaggcccggccggtgcggctgtagtgcaggaaataacccaccagcagcagcgcggcgatggcgcaccagctcagtagcggcagcccaaggagggggctgcgcggcagactgagaaaatcagcactcatctgatgtgagttaacccagccgccgtcagtcagcaggaagataatgccgcgataaatgctcatggtgcccagggtcaccacaatggcgggaatgccgaggcgccagaccagcaggccgttaattactcccatcagcaggcccagcagagtcgccagcgccagcagcgctaccaccggaatacccggatagtgggcgttaagcagggcgacgatcatcccggtcagcgccaggttggcggccatcgacagatcaatgcctttggtgagcaacaccatcatctggccgagggcgaggatgataaggatggcggtatcgttaaacatctccaccagattgcccggtgaaacgaacgacggcgcccggctgccgatggcgccgatcatcaaaataatgaccaccgccagcagcgcttcgcgatgtttcagccatgcgtgtcccatcatgccgcctcctggccgatgccgctagcggcgctaacgatggtttccgccgtcgcttccccggcccggtactcggcgaccatcagcccttcgtgcattacgataatccggtcggccatgcccatcacttccggcagctctgacgacaccataatcaccgccagcccctggctgaccagctcggacataaactgatgcacggcggcctttgagccgatatcgatgcctttggtcggctcatcgagaatgatcacctcgggctgggtcgccagccatttgccaatcaccactttctgctggttgccgccggagagggtctccaccggctgccgccagctgaaggctttaacctgcaggcgcgaggcgtactcgtcggccagccgccattcccggccgtcgttcaggatgccgttaggattgagcttgctgagctgcggtaaactgatgttctgggcgataggcagggcgatgatcgctccctgtgtctgccgctcttccggcacgcagacgatgcccgcgcggatggcgtcggcgggctggtgaaagcgcatggttctgccgttcaggcggatctcgccggaggaggggcgcgaaacaccggagagcgcctgcatcagctcggtgcgtccggcgcccaccaggccgtaaaagccgagaatttctcccttgcgcaggcggaagctgatatgggcaaacgcggtaggatgacagagatcggtcacctccagcaccgtttctccgggggtgcagtcgactttcgggtaggtttggctgatcgcccggcccaccatcatcgacaccatccgctcttcggtgatgtcgcttatcgccccggagctgacgtacaccccatcgcgcaggatggtgtaataatcggccagctcgaagatttcatcgaacttatgcgagataaacaggatcgctttgccgtcctgcttcagacgctcaacgatgtgataaaactccaggatttcatgctgggaaagcgcggcggtcggctcatcgaggatcaccacctgggcgtcgaaagccagcgcccgggcaatcgccaccatgtgacgctgggcgatgctgagggttttcagcgtggctcgcgggtcgatctggacttccagccgggtgaggatctcgttggctctgcggtgcatcgtcggccagtcgagcgttttcagcagtcccttatacagatactggccgacgaaaatgttttcgctgaccgagagttcgtcaaacagcacggtttcctggtgaatggcggtgatccctaccttatgcgccgactccggcgttggcagatgaatggggatcgctttatagaggatctcgccctcttcgggctgataaataccggtcatcactttgaccagcgtggatttccccgcgccgttttcgccgattaaggcggtcactttgccgggccagagatcaagctgcacgttctcaagggcgcgcacaccgggaaaaattttggtgatccccttcagcgacagcagtggcgttgatgctgacatgatagttctccacaaaaatcacccctcaccctaaccctcccccacaggggcgagggaacggtccggcgtccgctggccgcatcgcgcagagggccagccgttccccctctccctccgggagagggccggggtgagggaacaaggattagaaaattttcgagaacttatcgatgttgctcgcatcgtagacaaacggcttggccatcgcgccattcccctcggcgtccagcttcactttgcccagcttgcccatactggcttcggttttggtcgccgtgcctttgactaaatcgtcggccagataggtggcggcgtagcccaggtcaatcgggttccagatggcgaagcttttgctggcgccggacttgatcgcgccggccatttccgacggcagccccagcccggtgacatacactttgccgattttgccctggtccttcaccgcctgcgcggcggcaacaatccccaccgacgacggcgagacaatgactttcaggtccggatatgatttcagcagacccaccgcttcgcggtagcttttatccgacagatcgtcaccgtaggcgacggtgaccagctgcaccgacggatactgcggtagcacctttttcatctcctcaatccagatgttctggttcgtggaggttggggtggcgcttaacacggccacctcgcctttctcaacgttcagcgcctgcagcgcatcggcggcaagcttgacgttggtttcgccaattaaggcgttatttgaggggttaagatggatctgacggcctgccggcgccacgccggagtcccatgagaccaccttgatgccgcgctgcatcgcttttttcagcaccggcaccaccgcgtccggatcgttggcggaaatggcgatcgcatccaccccctgggcgatcaacccgttcagcacgtcgatctgcgcctcggcggtggtagtggtcgggccggtgtagatcactttgacatcacctaactccttggctgcctgttgggcgccaacgttggcggcttcgaagaagccatttcccagcgatttcgccacaagggcgattttaacttcggctaaggcggaaccggacaacgccagggcggcaacggtgaggatcaagcttgtctttgttttcattgcttttactccacatgagttagttttgtagggtttgcaggtgatatttcgccccgtctcggtgagcggggcgcgatgttgttatggataaagatctaaagcggactgcagcggctgcacgttgaagcgtttgccaagggcgataagctcgtcgcgggtgatggtctgcttcatcccgcccatcgacaagactttcaccagcacttcggcggacttctcggcggtatcgatcaggccgaaggtctcatccagcgtggggccgctgccgaagacgccgtggaacggccacagcaccagcgagtgtttttgcatggtttcggcggtcgcctggccgatttcatcggtacccggcaccatccacggcagaatgccgacgccatccgggaagaccaccagacattcggtgctaccttcccacagcttacgggtgaaaagatcgctgtggttctccagaacataggtcagggcgatcaggttggtggcatggcagtgcatgatcacccggtctttgccgccggtcagtttgatgcgctcgctgtgcgacaggaagtgtgccggcagctcggaggtcgggacggcatcctccgtcaggccccacaggatatggtatcccgcgccgtcgctgtcgaccttcaccacgccgaggttagcggccgggtcgagctggacgttacggaagaatttgccggagccggtgacgataaacggctggttggccagggttggcatcggctggctgagggcgatatagcgcggtttggcgtggaaatccgccgcgtaaggttcgatatccgcttcatccagacgcagcgtcaggttgccgccgttgcgttcgtcccagcctttcagccaggcgtcggaggtggctttgatcatgccctggacgaaccaggcgtcgataatggtctgcatagtcttgtctttcctgttgattcggtgcggggttgaccccctcaccctaaataggtgcgtgcccccggattgcgccgtaaacggcttatccgggctaccggttcgtagcccgggtaaggcgtcagccgcgacccggggaagctcgtgcattacccgcgctggctcagaaccgcattctcataagcccgtacgctgtccagccactggctacccgccggcgtgtcgtgacgctgacagtacatctcccagatggcctgccaaggcagcgatttttgctcttcgagcagcgccaggcgggcggtgtaatcgccgtcgttctccagctggcgcagctgggcggtcggttccagcagggcgcgcagcagcgcttttttcatattgcgggtgccaatcacccaggccgcgatgcggttgatggaggcatcgaagaagtcgaggccgatgtgcacgcggtcaaacaggttatggcgaatgatttcgctggcgatggcctgggtttcatcatccagcagcaccacgtggtcgctgtcccagcgcaccggacggctgacgtgcagcagcaggcgcgggatgtagagcatggcggcggagatcttgtcggagatcacttccgtcggatggaagtggccggcatcgaggcacagcgccgtctgacggctggtggcgtaacccatatagaactcgttggagccgacggtgtagctttcggcgccgatgccgaacagcttgctctccacggcgtcgatatggtgcgccgggtcgagcttctcgctgatcacctcatccagggcgttcagcagccgctggcgcggggcgaagcggtcaacggtaatatccttcatgccgtccggcacccagatattcatcaccgacggcgtgcccagctgttcgccaaaataagcggatacgcggcggctggctttgcagtggtcgatccagaactggcggatctcatcgttggcgtgcgacagggtaaagccgtcggcgctcagcggatgcgagaagcaggagggggtgaaatccagccccagtttgttggctttcgcccacgtaacccagtttttaaagtgctccggcttaatctcattgcgggctaccggcgcgtcggattccaggtaaatagcgtgcagattgagacgctttggccccgggatcaggctcagcgcctgctcaaggtcggcgcggagttcttctgcattgcgcgctttgcccgggtagttgccggtcgcctggatgccaccggtcaggcttcccgccgggttttcgaaaccggcgacgtcgtcaccctgccagcagtgcatggagacgggcagacggtccagctggcgcagggcctcctcgacatccacgccgacggcggcgtagcgctgcttagcaatttcccaggcttgttcaagttgagtggtcatgcgcaaagctccttggtctgttgtggctgaaactgcgccacgaaacgggcaatttcactatcaggattgggggtaaaagtggtgagcgccgcgttgccgcgcactacctgacgaaactcatcgacattggccagctcgtcgagggtcattaactggatgccgatattgccgagggtggaggcctctatcgggccggccacgacggcgatcccgcaggcgtcagcgcacagctggttgagcagcgtgttctgacagccgccgccgacgatatgcagctggctgaaagggtggccgcgcagcgccgccagctcgttaagcacccgggcgtagaacagcgccaggctgtcgaaaatgcagcgcgccagttcggcatcgctttcaggaaccggctgcccggcgtcgcgacaggcggcctggatctcggcgctcatactggccgggttgataaagcggtcatcgttgcagtcaattatgaagcggcacgccggtagcgcggcggtgcgggcgatcagcccctgcaggtcgctgacgttttgctcttttagcacccgctgcagcagccacaggcccatgatatttttcagcacccgatagcggccttcggctccgccttcgttggtgatattggcctgcagcgccgcgtcgcaggtgtacggcgtcaggctttcaaaccccatcagcgaccaggtgccggaggagagataggcggcatggcggtcggccagcggggaggcgatcaccgcgctggcggtgtcgtggctggcgacagcgactaccggaattcggttaccctgcgggcagatccagtggcctatcacattgccggggtgggtcggctttccgaaccacgccaacggcgcgccggtccagttcagcagcgtctcatcccagctatcgctgttaatattgaccagctgggtggtggtggcgttggtatattcccagttcagattgccggtcaggcggaagctgaaatagtcggggatcagcagggcatgggcagcctgactgaccagctccggctgctgctccaccagcgcgcgcagctgataaagcgtgttaaacggcaaaaactgaatgccgctgcggcgatagatttccgccctgcccagctgcgcttcagcgtgacgcagcaggccctgggtgcggtcgtcacgataggaaatcggcagcccgacgcgctggccctgcttatccagcaggacataatctaccccccaggtatcgatgccgatactgtctatcagaatgccctgctcacacactttctccagcccgcggcggatctcgccttccaggctatctacatcccagcagtcgaagccgtctactttctgcagactattggtgaagcgatgaatttcgcgcagcgtcagggcgcgcggcccgggctgatagctggcgagcatcacccgcccgctggaggcgcctaaatcgacagcgacacaatgacgaatactcatgaaacgatccttcttaaaatcattgtccgcagtctaaaaaaggccgtttactgacaccttctcgctacggacagccaaaactggccgctggcaagaaagcaaaggtgaccgtgagggacatcacagtttgcggttttaggggatggcgagggggatgtgatggcctccgcagttccgcatctttccggctgattcttgaaaaagcggcaggatttacgaatttcgcggtcaaaaattgaaggccggatagccaacccttcattactatcagccggtgactgataatttttctcattacgagggtggcatcatgaccatattgcacagtacggatttctttaaggccgggatctcgacggtggctattgaaccccgcctccctcagtcggcctttccggaacatcaccatgatttccatgaaatagttatcgtggagcagggatcgggtattcacgtcttcaatggccagccctacaccattggcggcggttcggtctgttttatccgcgatcacgaccgccatctttacgagcacacggataatctgtgtctgaccaatgtgctctatcgcgcgccggatgcgtttcgctttctcgccggggtcagtcaactactgccccaggaacaggaaggaaactacccctcgcactggcgggtgaatcaaaccgtcctgcaacaggtgcggcatatcgtggcgcagatcgaggccgtggggagcgaaacggatactcatgccgtcgccagccgtgagatcctgtttatgcagctgctggtgctgttacgtaaaagcagccttgcggaagaggccaccaacaacgatgcgcggctgaatcagctgttggcctggctcgaagaccattttgcgcaggagatctgctgggaggaggtggcggcgcagttttcgctgtcgctgcgtacgctgcaccgccagctgaagcagcaaaccggtctgacgccacagcgctatcttaatcgggtgcgcctgatgaaagcccgccacctgctgcgccacagcgatgaaagcgtgactgatatcgcttatcgctgcggcttcggcgacagtaaccacttttcgacgctttttcgccgggagttcgactggtcgccgcgcgatatccgccaggggcgcgacgccattcttcagtaacgcgagaagagtcaacgtattgcagactaaaaacgcgaataatgcgccgttatccgcgtttggagtgtgagccgtggccggtctgattttacgtaaagaggagtttttcccttccgccacacaggcagtggcggtggcagaccgctacccgcaaaatgtctttgccgaacatacccatgagttcagcgagctggtgctggtgtggcgaggcaacgggctgcacgtccttaacgatcgtccctggcgcattacccgcggcgatctgttctacattcgcgccgaagataaacactcctatgcttccgttaacgatctggttctgcagaacatcatctattgcccggagcggctgcagctcaattttgactgggccggggcgatccctggcctcttcggtacgccgtggaagccccactggcgcatgggcagcacaggtatggcgcaggcgcgccaggtgattagccagcttgagcatgagtgcgcccggcgcgacgcgcagggaaatgcgatggccgaactgctttttgcccagctggcgctgacgttgcagcgccatcgctatgcgacggatgatcccgcggcgacgcagcgcgaagcgctgctggacaaactgctggccgcgctggcggccagccttagccgcccctttgttctggagcgtttctgcgagcaggagggcggcagcgagcgggcgcttcgccagcagtttcgccagcaaaccgggatgaccatcaatcactatttacgccagctgcggatctgccatgcgcagtatctgctgcagcataccgagcgcttaatcggcgatatcgccatgcagtgcggctttgaggacagtaactacttttcggtggtttttagccgggaaatcggcatgtcgccggggcagtggcggcagcgcagtcgcgccgccgcctgaagagcgtcgttgtcaggcagatgatccggtgattaactggccattcccagaccgacgatattggcggcgatgatgatcaccacgcagccgaggctcaggacgctcaccggacgacggccggcgttgttccactccttcagcaccagacccaccacaccgccgcacagcacgtagaaactcatgtgcagcatccagctcatataatcatactgcgccggaatgctggcgtggccccaggcatagaagaagaactggagataccacatcagaccgccgagggcagagagcagaaggttgctgatgataagcggtttggccagcgagaaatcggctttgactgacaggttcttcactttcgccagacgaataaagcagaagccaaggttaaccagcgccccgccgcccataatcaccacgtagcttggcagcgctgcgtacagcgggtcgacgccgagcgccgcggcggcatcatgcatcggtttggcggcgttcatcgcgaacgacatccctgcggagaagataccgcacattaccgccagcagaagccctttcttcagattgaactcttcggctttgatgcccattttgcgctctttcagctggcctgcgcgggtgacgatgccgacgccaatcaccgccaccagcacgccgagcagcgtcatttgaccgccctgggtgcgcatcagcactgcaaactgaccgttaataatcggcgtcatcagcgtgccgacaatcagcgtgatgccaatggcgatgccaatccccatcgacatgccaagatagcgcatggtcaggccatagttgatattaccaatgccccacatggcgccgaacagaaagaccggcagcagcgtggaggcgctaaaagagcggtagtaggcccagaagtcgggtaacagcgtggcgctgatggcccagggcagaatcagccaggagacgatccccccgaccgaccacatggtttcccacgaccagtgttttactttcttgaacggggcatagaaacaggcggcactggcggcccctatcaaatgccaaaaaatacccatcgtaatcgcgtggttcattgattttatcctcatctttttttatcggagacggcggcttccgatgggatgagtgtaaaaattggccgctttggccgccttcaggacgttgccacaggatggcgaaccctggcaaccatgggcttaattagttgttctacatcacaaaacgacgggtatttcttctggttatatccatatgaaaaatacggcattgataagcattttcaataccatttaattaactataatggacaaactgcttacgcggcgttaacacttgagccgctcgacaataatggagatgattatgagctataccctgccatccctgccttacgcttacgatgctctggaaccgcacttcgacaagcagacgatggagatccatcacactaaacaccaccagacctacgtgaacaatgccaacgccgcgctggaaagcctgccggagttcgctaacctgtccgctgaagagctgattaccaagctggatcagctgccggctgacaaaaaaaccgtactgcgtaacaacgccggcggccacgcgaaccacagcctgttctggaaaggcctgaaaaccggtaccaccctgcagggcgacctgaaagcggctatcgagcgcgatttcggttccgtggagaacttcaaagcggaattcgaaaaagccgctgctacccgtttcggctccggctgggcgtggctggtcctgaaaggtgacaaactggccgttgtctccaccgccaaccaggattccccgctgatgggcgaagccatttccggcgcttccggcttcccgattatcggcctggacgtctgggaacacgcttactacctgaaattccagaaccgccgcccggactacatcaaagccttctgggacgtagtgaactgggacgaagctgcagcgcgttttgccgccaaaaaataaggttgcattgcgctaaaagagaagcgagtctgatgactcgctttttttatatctgtagcaaggagagcagccatgcattatccggtgaatgtctttgtcggcaaaatcagggactacgcgggcagtcgccccagcgcgatcgacaaaatccaggtcgacggagaattgcagctcggcgatctcggtctcgatggggaccagcaggcggagaagaaaatccacggcgggccggaccgcgcgctgtgtcattatccgcgcgaacactatgccgactggatccgtgacttcccccagcaggccgagcggttctgcgcgccggcgttcggcgaaaacctctccaccaccgggcttaccgagcaaaacgtttatatcggcgatatctttcgctggggcgaggcgctgatccaggtcacccagccgcgatcgccgtgcttcaagctcaactttcattttgcgatcaatgatatggcgcagctgatgcaaaacagcggaaaaaccggctggctgtaccgggtgattgccggagggcaagtttccagcgatgcgccgctcgagctggtttcccggctgagtgatgtcagcgttcatgaggccggggcgattgcctggcagatgccgtttgatgatgatcagtaccaccgcttattgtcggcagcgggcctgtctgttagctggagccgaacgatgcagaaacggcgtttaagcggcaagatagaggatagttcgcggagattatgggggaaataatcccccatattaagtattcccggggatgctcccggcgcagcgccgcacagcgcaggccgggtcggcgtcaggttcgtttatacagcggcagccagattgttaaacgcagaccacccagcgggctgtcgtcggccttcacccagccgcggtgctgctgaatagcggtttcgacaatcgccagccccaggccggtgccgccggactcgcggtcgcgcgcctcgtcggtccggtagaatggccggaaaatctgttcgcgatcctccgggctgactcccgggccgtcgtcatcgacgttaaccgtaatcccgtctttatccaccgagaagctgacggaaattttcgtatgcgagtagcgcagggcgttgcgcacgatattctccagcgcgctttccagcgcattggggttaccgtacagcggccatgggcccggcggatactcaacggtgaaagatttccccatctgctcagcttcaaacgccgcattgtccaacacttcgttccatagctgattggctttcaccgtctcgctgaccagggcgtttttcgcctgattgcgcgacatcaccagcaggtcgttgatcatgctgtccagccggtgcgcttcggtttcgatacgctccagctccttgctctctccgctgcggcgacgcagcagggcggtacccaattgcaggcgcgtaagcggcgtgcgcagctcgtgcgagatatcggacagcagccgctgctggctggtcatcatccgctccagggccgtcaccatttggttaaaactggcgccagcggctaaaaactcctgcggcccggcttccagctccggatgctggcgcaggttgccctgggcgacttcatcggcggcatttttcagcttacgcgccggtttcgccaggctccacgccagccacagcagcagcggggcgctgaccagcatcgtgacgatcagcagcagcagcggccggtcaaacagcaggttgataaagtcggattgtgaggtgctggcgggacgaatcagatagagctgatagttatcctccccgtcccggacggaaaacgggcccaccatttccaggcggccatagcgttttttctgcggatgatcggcgttatcggcctggccgataaagttacgaatgatctgcatctcgttgcgttctgcgccgatcacgcggccttcgctggtcaccagcagcaggcgttgtcccggaggcgcccatttatcgatggcgcgaaacaaacgacgccaccacatcaggtcgtttggcggatcgttggccagctcggcctcgacgtgctgctcgatcatgatgccctgacgctgctcgctttccagcagctcggtcagctgccgggaatccagtttgggcaacatcagcaccagcatcaacaccagcgccagcgtgagccagaagatggcgaagatgcgtgcagtcaaacttccaatcatgaagcggaaaccatcagatacccgcggccacgcagcgttttaaaccacggatggccatctttgcgctccggcagcttacgccgcaggttggaaatatgcatatcgatggcgcggtcgaacggcgtcaggcgcttgcctaacacttcctggcttaaatgctcacgggagactacctgaccgagatgctgcgctaacagatagagcagggtgaactcggtgccggtgagctccagcgtctggccatcgaaattggcttcctggcggcccggattgaggcttaaggcatccacttccagggttggtgagccggcttcggtcgtctgctgctgctcgctccagtgggaacggcgcagaatcgcgcgtatacgggccaccagctcgcgatcgttgaatggcttaggcaaatagtcatccgcgcccagctcgaggccgagaacgcgatccagctcgcttccgcgcgctgttagcatgataaccggagtctggtgtgtctgacgcagctctttcagcgtatcgataccgtttttcttcggcatcatcacgtcgagcagcaataaatcaacgctgtcgtccagaagggccagcgcctgttccccatcatgggccaccagcacgttaaaaccttccatatcgagcagctcttttaacagggaggtgagctcccggtcatcatcaactaacaggattttattcattgtttaaatacctccgaggcagaaattacgtcatcaaggcccgctaatccatgactttacgttgttttacaccccctgacgcatgtttgcagcctgaatcgtagactgtctctcgttgaatcgcgacacaaacgttttgggagtatgtgatgcgcaatgttatcgctgccgtcatggcctcaacgctggcgctaagtgcatatagccaggccgctgaagtcgttaccagcgttaactggctccccggagacgaagggggacagcgcggtagccaaagccatatgtttgacggcataagtttaaccgagcagcaacgtcagcagttacgggatcttatgcaacgggcacgccacgacaggctccccgttaatgttagcgaaatggagacaatgcatcgccttgtcaccgcagaaaattttgatgaaaacgctgtgcgcgctcaggcagaaaagatggcgcaggaacaggttgcccgccaggtcgagatggctaaggttcgcaaccagatgtaccacctgcttacgccagagcagcaagcggttttaaatgctaagcaccagcagcgtatggatcagttgcgtgaggttgcaaggatgcagaaaggctcagcgatgatgctttcgagtagtagcaacaccctgcaaccccagtaacaaaccctgttttccttgccatagacaccatccctgtcttcccccacatgatgtgggggttttttttgccctttttacggtaaatcaactccttcgcctatcccgtgagcgtcacaagttcgggttatactaagcgcattgcaggagaaggagcctatatgaatcaatcttatggccggttggtgagccgcgccgctatcgccgcgacggctatggcctccgcgttacttttgatcaaaatttttgcgtggtggtataccggttctgtcagtattctggctgcgctggtggattcgctggtggacattgccgcctcgctgaccaacctgctggtggttcgctattcgctacagcctgctgatgaagaacatacctttggtcatggcaaagcggagtcgctggcggcgctggcgcaaagcatgtttatctccggctcggcgctgttcctgtttctcaccggcattcagcacctggtgcgtccggagccgctgcaggccgccggcgtcggggtcgtcgtcacattgatcgccctcgttagtacgctggcgctggtgactttccagcgctgggtggtgcgaaaaacccagagccaggcggtgcgggcggatatgcttcattatcagtctgatgttatgatgaacggcgccattctggtggcgctgggcctctcctggtacggctggcatcgcgccgacgcgttgtttgccctggggattggcatctatattttatatagcgcgctgcggatgggctatgaggcggttcagtcactactcgaccgcgccttgcctgacgaggagcgtcaggacattatcaccatcgtgaccgcatggcccggcatccgcggggcgcacgatctacgaacgcggcagtcagggccgacccgctttattcagattcatttggaaatggaagataacctcccgctggtgcaagctcacgtgattgcagaccaggtggagcaggcgattctgcgccgtttcccggggtccgatgtcattatccatcaggatcccagctctgtggtgccagcggcgcagcagggcttttttgagcgttaggttatagtctgtaaactcgatgtaaaaatgtggggcagatcggcattttttgtataaattaccgccgtttggtctgacctgaatcaattcagcttgaggcgtttgatatactattgtcattagcgtcgtgcactcctggtgagggagcgcttcaggcaacagaattattttttgcttcctaagttcagaggtagtcatgattaagaaaatcggtgtgttgacaagtggcggtgatgcgccgggcatgaacgcagcaattcgtggcgttgtgcgcgcggcattaacggaaggtctggaagtttttggaatctatgacggttacctcggattgtatgaagaccgtatggttcagctcgaccgttacagcgtttccgacatgatcaaccgcggcggcaccttcctgggctccgctcgcttcccggaattccgcgaagaacacatccgcgctgtggctatcgaaaacatgaagaagcgcggcctggacgcgctggtggttatcggcggtgacggttcctatatgggggcgatgcgcctgaccgagatgggcttcccatgcatcggcctgccgggcaccatcgacaacgatatcaaaggcactgactacaccatcggcttctttactgccctgagcaccgtggtggaagcgattgaccgtttgcgcgacacctcctcttcgcaccagcgtatctccgtggtggaagtgatgggccgttactgtggcgacctgaccctggcggcggcgattgccggcggctgtgagttcatcatggtgcctgaagtggaatatacccgtgacgatctggtggcagaaatcaaagccggtatcgcgaaagggaaaaaacacgctatcgtggccatcaccgagcacatgtgcgacgttgacgagctggcaagctacatcgagaaagagactggccgtgaaactcgcgccaccgtcctcggccacattcagcgcggcggttccccggttccttacgaccgcatcctggcttcccgcatgggcgcctatgcgattgagctgctgctgcagggccatggcggccgttgcgtcggcatccagaacgagaagctggtgcaccacgacatcatcgatgccatcgagaacatgaagcgtccgttcaagaacgactggctggattgcgcgaagaaactgtactaagttacgcgccggataaacaaaaggccttctcatggagaaggccttttttatggcggaaggtttattcgatatccagcgggtcttccgacaggatcatcccggtgttatcggcatacagatggtcgccggagaagaaagtcaccccgccgaaattgacgcgcacgtcgctttcgccgatgccttcgccagccgcgccgaccggaatagccgccagcgcctgaataccaatgtccagctcctcaaggtcgtcaacctggcgcaccgcgccatagaccaccaacccttcccattcattctggacggccagacgcgccaggtctgcgtcaattaacgcgcgtcgtactgagccgccgccgtcgatcaggagaatatgaccacggccattctgctcgagcagatcgtagagcaacccgttatcctcgaaacatttaaccgtaatgatctgtccaccaaacgacgaccgtcctccaaagttagagaacagcggttccacgacgttgacatcttcctggtagatgtcacaaagctcggaagtatcgtatttcataggcttaacgttcagttgctgcgagagtttttagtatatcccgcgaatcgcattgttggcaaaatcatcaattgttaattgatatttgtcagttaagccatcagcttactggcaataattccgataacaaacagcaggttggtcagtaaggcccctttgaccgtcttttcgagcattggccgcatcgccagcggatcggattcgcgcaggacgtagcgcgcctgtttcaccagcagcggcgtggcgagaataaacagccagccccaggctgaatgcagcgccagcaggttaaacagcgccagacacagcagggcgccgagcagcaggcaggcatgatagcggcgggcattgaccgggcccaggcgcacggcgagggtgttcttcccgttctgccggtcgctgtcgatatcgcgcagattattgatgttcagcacggcggtcgccagcagaccgcaggctgtcgccggcagaaaaatggccgcttccacattatgggcttgcagataccagctgccgaggacgctcagccagccgaagaaaacgagtactgagatatcacccaggccaatatatccatacggacgggtgcccaccgtgtaggtgatggcggccacgatagacaggcctcccagggcgaggaagccgatgaaatcgccgacgctctgccaggcggcgcacagcagcgccagaccaaacaggcagatgagtacgacggtgacgatcagagcgcgcttcatctgctggggggtaatcacccctttctgcatcccgcgcagcggcccgatgcgatccggtttatcgctccccttaaccgcgtcgccgtagtcattggcgaggttggaaagaatttgcagcaagccggcggtgatcagcgccagcagggcaacccagggatcaaaatggccctgctcccaggcaaggacggtgccaacaataatcgcggcaaatgccagcggtaacgttttaggacgcaggctttccagccacgcctgtgaacggctgatatcagtcatagttattctagccaataaaaatgggggcgatagcccccatcaacagtgatgaaaatgcattgcaccggattataggataaaacggctcagatcttcatctgccaccagaacatccaggtgtttactcacatattcggcatcgatagtgacggtctggccgttcatctcgctggcatcataggagatatcttccaccaggcgctccagcacggtgtgcaggcgacgcgcaccgatgttctcggtggtttcgtttacctgccatgcggcctgggcgatgcgcttgatgccgtcttcggtgaattcgatgttcaccccttcggtcgccatcagcgccttgtactgcacggtgatggaggcattcggctcggtcaggatgcgctcgaagtcgtgggtggtcagcgccttcagctcaacgcggatcggcagacgcccctgcagttccgggatcagatcggatgggctggccacctggaatgcgccggaggcgataaacaggatgtggtcggtcttgaccatcccatgtttggtggagacggtgcagccttccaccagcggcagcaggtcgcgctgtacgccttcgcgggagacgtccgggccggaggtgttgccgccgcgcttacagattttgtcgatttcgtcgataaagacgataccgtgctgctctacagcgtcgatggcttcctgcttcagctcttccggattgaccagtttggccgcttcttcttcaatcagcagcttcatcgcgtctttgattttcagcttacgcggtttctgcttctggccgccgaggttctggaacatagactgcagctggctggtcatctcttccatgcccggaggggacatgatttcaacgcccatcggcgccgcagcgagatcgatttcaatctctttatcgtccagctggccttcacgcagttttttacggaacgcctggcgcgctgcagacggttcctgcgacggctcagtctggccccagttgttcttcgccggtgggatcagcacgtcgagcacgcgctcttccgccagctcttccgcgcggtaacggttcttatcgatggactgcatgcgaaccattttgatcgccgcatcggtcaaatcgcggatgatggagtccacttctttaccgacatagcccacttcggtgaacttcgtcgcttcaactttgataaacggcgcgttggccagttttgccagacgacgggcgatttcggttttaccgacgccggttgggccgatcatcagaatgtttttcggcgtgacttcatgacgcagctcttcgttaagctgcatccgacgccagcggttacgcagggcgatagcaacagaacgcttggcggcgtcctgaccgataatgtgtttgtccagttcgctgacaatttcgcgtggggtcatttcagacatgggagatccttacgctttagaaggtaattcttcgatggtgtggaaatggttggtgtagatgcagatatcacctgcaatatccaacgctttctcggcgatgtcgcgcgcgcccatatcggtattttccaacagcgcgcgggccgcggcctgggcgtaaggaccgccggagccgatagcaatcaaatcgttttccggctgtaccacgtcaccgttaccggtgatgataagcgacgcgttttcgtccgcgacggccagcagcgcttccagtttgcgcaacatccggtcagttcgccagtctttggccagctcaacggcggccttcaccagatggccctggtgcatttccagtttacgttcaaacagttcgaacagcgtgaaggcgtcggcggtgccgccagcgaaaccggcaatcactttgtcgttgtacagacgacgcactttcttcacattgcccttcatcacggtgttgcccagcgtggcctggccatcaccggcaataacaacatggccgttacggcgaacacttacaattgtagtcacgagcagaccccttggttgcaaaagcggaacaggggccccgcgctgtccgcggggccgaatgcaattatagatgggggggattttgagggtttcaacccctggcggcgagacgaatgcagttcgcgtgtccagccatcttcaggcgggtgatcatctcgttggcgctttctttgcctttcaacgggccaataaccacgcggttccagccattgttagtggtaatgtgcgaagcaaacccttcgaaagccagctgagcgcggacggtttcggcctgctcggcgcctttaaaagagccgcactggatcatccagctacgatcgtctttcttctcggcggtggttttcggcgcttcttccacccgagttaccggcgccgcggcctgggtacgcggctgcgtggtattggtatgcgctggcgtctgcagcagatcctggtacggctgctggtttgacgcggtctgcttcggctgttgctgctgaaccggcttcggctgctgaacgcgcggcggctgctgttggacggtctgcgcctgagtctgcgcccactgttgctgctgcgcctgctgctgttgctgcgctaaacgctgacgctgaagcgtctgctggcgctgcgccggcgtttgttcgttccacggcacttcggtcagctgggtcggctgctggcgcatatcggcctgcatctgggcgagcagctggcgctgctcgtcggtcagctgttccggtttcatgacttcgccaccggcggtcggttcggtcggcgcgcggacgccaggctggcggctttccagctctttaatatagcgccagcgctcttccggtttgggcggcaagccgttgccggcggcctggcgattttgcatcgcttccgcttcttctttcttatgatgcgtaatgaaatagaggccaccgataaaggccaccagcacagccgccgcgatcgccaccatcgccggtgaaatcgccggaaggctgctttgcttattccttgagcttcgggtcgtgctctttttgcgccgcgaagaagccggttggctgcggcgtacataatctcgttgtgccactatcgtttcgctgtcttatattcgttcgtcagcccgccatgttacttaagcggcgggcctttgaccagaagagcaggcccgaaagcctgatggttatcgtctgattttttgcgtactgccgcgaacaatcagttcgcaatcgagcagacgcgagccgctgttcacgttatgcccctgcatttgctccagtaatagcagcattccttcacggccgatatcaaaccgtggctgtgaaaccgtggtcaacggcggatcgcaaaattcagacaacgcgatgttatcgaagccgacaattgacaggtcgtccggcactttcagaccgcgacgttttgccagcgataaggcgcccagcgccatcacatcgctatggcaaaagactgccgtgggcggcaccggctgcgccaggagctgctccagcgcattggcgccggcttcgaaggtaaagttgccgcgagcaatatagtgcggatcgacggtgataccgctgcggcgcagcgcctgcacataaccctgcaggcgataatggcacaacggcatatcttccgggccggcgatacagccgatacgctgatgtcccagctcgtggagataatttaccgcgttaaaggccgccgtcaggttatcgatatggacggtgggcagctccagctccggcgcaaactcattcgacatgaccattggcggcaaattgcgctgctcttccacgctggcgtcaaacggcaagcgcgagctgagcagcaccatgccgtcgatctgcttggtgatgataaggtcgataaaggttttttctttctgattctggtgggcgcaatcgccgattaacaccagatagccgtgctcggcggcagtgacttcaataccgcggatcacttcactaaagaagggatcgcagatatccgggacgatcacgaggatcgttcgcgattcgttgcgcttcatattgcgtccgagcgactgcggtaaatagccgacttccagcgccgcctgctcgacccggttacgggtggcttgcgacaccttatcagggttcatcaacgctcgggacacggttgccgtggaaacgtttgccttgagggcgacgtctttcatggtggcggcaaccacttgttttttgggcttcacctggtttctcctcgctgaatggcgctggcatttcccttgggcgctaactgctgcatcatttttatcagatagtcgcggcagtgagttacagaattttcatgaaaaacgtgatgcttgttaaatttttcgatccggctcgcaagagaagccttatccttcaatcggatcgacatccagcacccacttcacttttctcgcctccggaagcgtattgatcagcgccagcgtaccgctaacgatatgttgcagacgcacccgcgaaggatgctgcagcaatatttgccagcgccagcggccgccgcgctttggcgccagcgccggaaccggaccgagcacccatagcttttcgtcggccagcgggctggcctgcagcagattgcgcagctgttgtaaaaacagcggcgcctgctggttgttatggtcttccgcacgaatcagcacatggctggtccacggcggcagctgcatcgtctgccgctctgccagcgcctgttcggcaaaggcgtcgtagcctttatacagcagggtctgcagtagagggtgttccggatggtgggtttgaagaatgacctcgccctgttttcctgcccggcccgctcgtccggagacctgggtataaagctgagcgaaacgctctgcggagcggaaatcagcggaaaacagcgccccgtcgacatccagcagggagacgagggtgacgtccgggaagtggtgccctttggccagcatttgggtgccaatcagaatacgcgccccgccgcgatggacggcggcgagatgctcctccagcgctcctttgcggctggtggtatcgcggtcgatacgcgagataggcacctcagggaacagcggcgccagggcctgctccagctgctcggtgccgatccctaccggcaccagatgcgtggagccgcaggaaggacactggcgcgggattgggcgctggctgtcgcaatggtggcagcgcagatggtgctgcgcctggtgcaacgtatagtaactgtcgcagcgcgggcattccgctatccagccgcaatcgtggcacagcagcgctggcgcaaagccgcggcggttaagaaacaggatcacctggttatccgcttgcaggtgctggcgcatacggctaatcagcgcgggagacaggcccgcctgcagcggttgccctttgagatcgagcacgtgctgctgggccgggcgcgcattgcccgcgcgtttgcttaaggttaactggcggtatttaccctggcggacgttatgcagagtctccagcgccggcgtcgccgagccgagaattatcgggatctgctcgctgtgggcgcgccataccgccaggtcgcgggcatggtagcgccagccttcctgctgcttgtaggagctgtcatgctcttcgtcgatgacgatgacgccgagatctttaaatggggtaaacagcgaggagcgggtgccgatcacgatggccgcttcgccatttttcgccttcagccaggccgagagacgttcgctgtcattgagcccggagtgcagcacttccaccggcgcgttaaagcgctggcgaaatcgggcgatggtttgcggcgtcaggccgatctccggcaccatcaccagcgcctggcgcccctgcgccagcacattctccagcacgctcaaatagacttccgttttcccggagccggtaatacccgccagcagccaggcggagaaacgatcggcggcgctgtggatcgccccgacggcggtggcctgctcggtattcaggcgcaggcgttcgccggcaaccgaatacgcgctgcgccagtcggtgagggcgggcgcttcgcaggccagctccgccagccctttaccgcgcagcgcctgcagcgccgcttcattgaattccagttcgccaacctgatgacgccagattttaccctggcgcagcgccgccagcgcctgctgctgcttccgggagcgtttcaggccgttaaggtcgacaacctgcccctgctcggtggcgaaccagtaccacagcggcgtggcgctggcgggtttgccctggcgcagcataacgggtaatgcatggaacagcacatcgccgatcgggtgatggtaatactcagccgcccacatcagcagtcgccagacagtcgtggagaagaccggctcgtcgtccagcgcttcggcgaccggttttagctcatccagcggcagttcgctgcgctcgctcaccgccgcgacaatgccgatccgctcctgtttgccgaacggcacccgcacccgacagcccgctttgaccgccatgccttcaggcagcaggtagtcaaaagtgcgcggtagcggaacgggtagggcaacgtgggcgacggacatgtcatcttcctgacttgaaatctggcgggatagtatacacattacgataaggcggcgcggatcagtttgcatatgctggtcaaattctgtatgattcgccgcctttgatgcgctttatatcgcattgaagattgaccattaccgcgtgcttcacgctgtcagcagcgtagaaggcgacgggaaattactaatatcgcgtggtgtctggcgttagggctggaagagcgacgcggccttaactgaggttctcccatgaaaaaaggtattcacccaaattacgacgaaattactgctacctgttcttgcggtaatgtcatgaaaatccgctccaccgttggtcacgacctgaacctcgacgtgtgcggcaaatgccacccgttcttcaccggcaaacagcgtgatgttgctaccggtggccgtgttgaccgcttcaacaagcgcttcagcatcccgggcagcaagtaagttgccagaagaagccgcctcagggcggcttttttgtctctcccgcctgcctgggcgggaaagaaaaaagggcggaagattattccgccctttttatcgtctcagtattcccacgtatccgggtcgattcccagttcacgcataatcgctttcgccgcttccgggatctcatcgctgcgctctttacgcaggtcttcatcgttaggcaacggttgtccggtaaaggcatgcagaaacgcttcgcacagcagctcgctgttggtcgcgtgacgcaggttattcacctgacgacgcgtgcgttcatcggtgaggatttttaacaccttcagaggaatggaaaccgtaattttctttacttgttcactcttcttaccgtgctcagcgtatgggctgatatattcgccgctccattcagccatgagataccttaatcctctgtttattagtgaagggccagaatattccgcccgggctataattgcgcgtagtttaccgtatgcgcgggctttctgacatgagataagccgccgacgacgtgcgctaatgcatataattttaacggctatttgcactttgctcaatctatacgcaaagaagtttagatgtccagatgtattgacgtctattgtgacaatgattactctggagcctgacttttcaccgattcagcccaggaacttcccaacatgacgcgtaaacaggccaccatcgcagtgcgtagcggtttaaatgacgacgagcagtacggttgcgttgtcccgccgattcacctctccagtacctataacttcaccggctttaatgaaccgcgcgcccacgactactcccgtcgtggcaatccgacgcgcgatgtggtgcagcgcgccttagcggagctggagggcggcgccggcgcggtgctgaccaataccggaatgtcggcgatcctgctggtgacgacagtgttccttaaaccgggcgatctgctggtggcgccgcacgactgctacggcggcagctaccgtctgttcgacagcctggcgaagcgcggctgctatcgcgtccagtttgtcgatcaaagcgatgagcaggcgctgcgggcggcgctggcggaaaaaccgaagctggtgttggtggaaagcccaagtaatccattgctgcgggtggtggatattgcgaaaatctgtggtctggcgcgtgaggccggggcaattagcgtggtggacaacaccttcctgagcccggcgttgcaaaacccgctggcgctgggcgccgatctggtgctgcattcctgtaccaaatacctcaatggtcactccgatgtggtggccggggtggtgattgccaaagatccggcaactgtcaccgaactggcatggtgggcgaataatattggcgtcaccggcagcgccttcgacagctatctgctgttgcgcgggctgcggacgctgtctccacggatggaagtggcgcagcgaaatgccctggcgatcgttgagtatctgaaaacccagccgctggtgaaaaagctgtatcatccatcgctgccggaaaaccaggggcatgaaattgcggcgcgtcagcaaaaaggttttggcgcaatgttaagcttcgagcttgacggtgacgagcagacgctgcgccgttttctgagcgggctgtcgctgtttacactggcggaatcgctggggggcgttgaaagcctgatttcccatgcggcaacgatgacgcatgccggcatggcgcctgaagcgcgtgccgccgccggaatttcagaaacgctcctgcgtatatcgaccggtattgaagatggtgaagatttaattgccgacctggaaaatggcttccgggcagcaaacgaggaataaagatgagtgtgattgcgcaggcaggggcgaagggtcgtcagctgcacaaatttggtgggagtagtttagcggatgcgaaatgttacctgcgcgtcgcggggatcatgaaggagtattcgcaggcgggggatatgatggtcgtctccgccgctggcagcaccaccaaccagctgatcagctggcttaagcttagccagagcgatcgccttgctgcgcatcaggttcagcagtcgcttcgccgctatcacaccgagctgattggcggtctgctggagcctgcggcggcggatacgttgatagccgcctttatccacgaccttgagcgtctggctggtctgctggacggcggggtttccgaagcggtctatgcggaagtagtcggccatggggaagtgtggtccgcgcgcctgatggcggcggttctcaatcagctgggtatggaagccgcctggctggacgcgcgcgcgttcctgcgcgcggaacgcgccgcgcagccgcaggtggatgaaggattatcctatccgctgctgcagcagctgatggcgcagcatcctaacaaacgtctggtggtgaccggctttatctcccgtaaccaggccggcgaaaccgtcctgctgggccgtaacgggtctgactactctgccacccagatcggcgcgctggcgggtgcctcccgggtcactatctggagcgacgttgccggggtgtacagcgcggatcctcgcaaggtgaaagacgcctgcctgctgccgctgctgcgtctggacgaagccagcgagctggcgcgcctggccgcgccggtgctccatgcccgcacgctacagccggtttccgccagtgatatcgatctgcagttacgctgcagctacacgccggaacagggttccacgcgcattgagcgcgtgctggcctccggtaccggcgcacggattgtcaccagccatgacgacgtctgcctggtggagttccaggtgccggccggtcacgatttcaaactggcgcataaagagctggacgctctgctcaaacgcgcccagctgcgcccgttagccgttggcgtccatgccgaccgtaagctgctgcagttctgctatacctccgaggtggccgacagcgcgctgaaattgcgcgaggaagccggtctgccgggcgagctgcgtctgcgtcagaagctggcgctggtggcgatggtgggcgcgggagtcacccgtaacccgctgcactgccaccgtttctggcagcagctcaaagggcagccggtggagttcacctggcagtctgaagaggggatcagcctggtggcggtgctacgcgccgggccgacggaaagcctgatccaggggctgcatcagtccttgtttcgcgccgaaaagcgtattggcctgatgctgttcggcaaagggaacattggttcccgctggctggagcttttcgcccgtgaacaaactacgctctcggcgcgtaccggtttcgagtttattctcgccggcgtagtcgacagtaaacgcagcctgctgaattacgacgggctggatgccagtcgggcgctggctttcttcaacgatgaagcggtggagcaggatgaagagtcgctgttcctgtggatgcgcgcgcacccgtatgatgatttagtggtgctggacgtcaccgccagcgaacaactggccgaccagtatcttgattttgccagccatggcttccacgtcattagcgccaacaagctggcgggcgccagcagcagtgataaatatcgtcagatccacgacgcgtttgagaagacggggcgccactggctatataacgccaccgtgggcgccggcttgccggtgaaccatacggtgcgcgacctgatcgacagcggcgatactattctcggcctgagcggtatcttctcgggaacgctatcctggctgttcctgcagttcgatggcaccgtgccgttcaccgacctggtggatcaggcgtggcagcaggggctgaccgagccggatccgcgcgtcgatctgtccggtaaggatgtgatgcgtaagctggtgatcctcgcgcgggaagcgggctatgacatcgaaccggatcaggtgcgtgtggaatcactggtgccggcgcactgtgaagaggggtcggtcgatcacttctttgagaatggcgaagagctgaacgagcagatgctgcagcgtctggaagcggcccgcgagatggggctggtgctccgctacgtggcgcgctttgatgccaacggcaaagcacgcgtcggtgtggaagcggtacgcgaagagcacccgctggcggcgctgctgccgtgcgataacgtgtttgccatcgaaagccgctggtatcgcgataacccgctggtgatccgcgggcccggcgccgggcgcgatgtgaccgccggggcgatccagtcggatattaaccgcctggcgcagctgctgtaagcgtcgcgttatactcttgaaccagtgaggccactatttgcgttacgcgccctgcggaatacagggcgctctgcgcaaacgcgggtctgtttttcagccatattgtaaaccgtcggctggccgcaaggtctggtagaaaggcgttctcttctacagtgccggcaagccggcagaccattttctgattctcttcctgcgtccaacgctgccatgaattttgccaccagccatgatgggttttcccctgtagctgccacggagccgggctggctgggttccttatctcttcttccacataccatagatcgccttgccgctgacgaaaaagcggcgcccaggcaacgatcgccgcgccgcgtaaaaagcattcatgcgcaataacgtgcgttttcacctctggaaaccgctggctgagcagtttgaaatgaccgtgcgcggcgataaccgggcgcaatatattgccgcgggcatggcgcttttgcattgcgctgccgtactggatttcatcgaactgactgcgttgtaaaaagcgcatttcagtgagagaaatacgttgaataatatcgtcagtctcctccctgtcggcttgtccgccgcgccagtgatagcgtaatgattcgcctaccgcgaaaggagtgaaattagaggtaaaatgaataacattaccgcgcacggcatcaaagcttaataaaaaatagagcttttgcccggcggcattaccctggaatggcgctatcaacggtacgctgcaaatacgtcgtggggcttcaattggggcgatgtgtgggaattttggcgtccagacctttttacagtggcggcactgaaggcgttgcgtaccctgcggattgcggccgtagcgaataatatcccgctgatagcataccgggcaaaaatagccgtagcggcgggcatgatccgtcagataagccgccagccaggggcggaattcccgttcgttaaacagggggggatagctgccgcaggctgcgcagtagagcgccgggtagcccagccgaaaattcgggaaatgatactcagccgcagacggtaaacctaaattgcggcagccaaaagttttacaggcgttaatggtaaagagagtatccactggcaggtcaataccaacgatttttacaggtcgttaattttgtcctgctcaggttgcatacaactgtgaatgctctcacataaaaaagtctttcagaacgtaacttagcggttctttatcactctgaaaggaactccgatgaaactaaaaacaatgagcgcagcacttctgttgactttgcctttctgggcctgcgccaaagatgtcaccataatttataccaacgatcttcatgcccatgtcgaaccttataaagtgccatggatagcggatggtaaacgagatattggtggttgggcgaatatcacgacgatggtgaaacaggaaaaagcgaaaaataacgcgacctggttttttgatgccggggattattttaccgggccttacatcagtagcctgacgaagggcaaagcgataatcgatattatgaatacgatgtcctacgatgcggtgactatcggtaatcatgagttcgatcacggctgggataatacgttgcttcagcttagccaggcgacattcccgattgttcagggcaatattttttatcagaacagcgataaatcgttctgggataagccctataccattatcgaaaaagatggcgtgaaaattggcgtgattggcctgcacggcgtgtttgcttttaatgacaccgtttctgccgcgacgcgagtgggtatcgaagcgcgcgatgaggtgaaatggctacagcattatatcgatgaacttaacggtaaagtggatctgaccgtggccctgatccatgaaggcgtcccggcgcgtcagtcgagccaggggggaaccgatgtgcgtcgtgcgctggataaagatattcagactgcgggtcaggtgaaaggcctggacgttttaattaccggccatgctcacgttggcacaccggagcccattaaagtgggtaatacgttgattctttctaccgatagcggcggcatcgatgtgggtaaactggtgctggattatcaggagaaaccgcaccaattcacggtgaagcactttgagctgaagacgctttatgccgatgagtggaagcctgatccgcagacaaaacaggtcatcgacggctggaataagcaacttgatcaactggtgcagcaggtcattacacaatcgcccgttgaactgacccgtgcgtatggcatctcttcgccgttgggcaatcttgccgctgacgccttgctgttggcagcaggtaggagtacgcagatggcgttaaccaactcgggcgggatccggaatgagatccccgccggggcggtgagcatgggcgccgttatcagcaccttcccgtttcccaacgagctggtcaccatggatctaaccgggaagcagttgcgtagcctgatggagcatggcgccgggttgagcaacggcgtgctgcaggtctcccggggactggaaatgaagtatgacagcagcaaacctgtgggccagcgcgttgtgttattcaggctaaacggtaaaccgattgacgatacgacggtttaccatattgccaccaacagcttccttgcagatggcggcgatggttttgtcgcgtttaccgaggggcaggcgcgtaatacctccggcggctattacgtttcaaatgcggtcgtagactatttcaaagccgggcaaaagataacggatgagcagcttaacgggcagcgcgttgtcgatgtgaagaaataagtttttaaggccgggcagtcagcccggccttaagcgatcagtgggccgcaaataccgccctggcggcaaacaggccgttgagggccgccgggaatccggcatagactgccatctgcatgatcgcttccgtaatctcctcttgcgtcaggccgacgtttaatcccgcggcaatgtgtactttcagctgtggctcggcgttacccaacgccgtgagcgcggcgatggtggcgatttcccggctgcgtaaatcgagccctggcctggcgtaaatatcgccgaaggggaactcaatcagatagcgggcgaaatcgggggcgatatcccgcaggctgtcgacgacggcttccccgcccttaccatccacccgctgaagcatttcctgaccgatgatataacgttcgctggacatcgttttttcctctctgtgatggtgcgttaagaggaagggtagggaagtgtgccggacttgagtaatacccttttcgtgataccttttcagtatgacaacttcaagattacattctctggatattcgcctgctgcgcgcctttgccgtggtagcggaggaaaataacatcagccgggcggcgcagcggttatttatctcgcagccgccgctgacccgccatatccgccatctggaagcgcagctgggggtgacgctgtttcagcgccatagcaaaggcctgatcctgaccgacgcgggtaaagaggtgctggagatgattcaacctctgctggcgctccaggaacgcacgctggcggcattgagtgagctcgccgcccactcgccgcaggctctacgtctgggcgtgacgacggccttcgaacagggcattttcgccgccgttgaggctgcgctgagcgaacatacccgcgcgttgcatatcacccgccacgcctcaccggcgctggctcagcaggtacgcaaaggcaaactcgatgcggcgctggtcgcgttgccgctcaatactgaagggctgcacctgcacccattgccgtatcatgagccgctcattgcggcattacctgcctcctggccggaagccgccaggccagggctgacgttaagcgcgctcaatcatcggccgctgttctggtttaaacgcgagcgtaatcctggtttctttgactacacgcgccgtattttcgaccgggctggctatgccccgacgtatgtggaagagccggccgagcatgatgtgctgctggcgcgtattgcgcgcggggaaggcatgatcctgctgccggcgtccttttccgcgattcagcgtcagggggtggcgttctgcccggtggctgagggcgacgcgatgccgttaagccttggggtgatttatccgcctcaccaggcagagtccgtgcagcaatggctttctctgctggatggcattctggcgactggctagtctcaggctgactcgcgagccaccttatattgcccaccgagccgcttcctgagcgtggccaggtgatcggaagatgaacttttttcaagtaggtgacctattcctcactctttacgcagatttttctattgacgcccgcgcgcttttccgtcatttttacatctggacgtctaaacgtatagaagttcgcaatataacagccattacatgcgattgatgaggtaaggtatgagcttttttcacgccaatcagcgggaagccctgaatcagagcctggcggaagtccagggccagattaatgtgtcttttgaattctttccgccgcgcaccagtgaaatggagcaaaccctgtggaaatccatcgatcgcctgagcagtctgaaaccgaagtttgtttcggtaacctatggcgcgaactctggcgagcgcgatcgcacccacagcatcatcaaaggcattaaagagcgaaccggtctggaagcagcgccgcacctgacctgtatcgatgccagccgcgatgagttgcgcactatcgctcaggattactggaacaacggtatccgccatatcgtcgccctgcgcggcgacctgccgccgggcagcggtaaaccggatatgtacgccgccgatctggtgacgttgctgaaagaggtaggcgattttgatatctctgtcgccgcgtatccggaagtgcatccggaggcgaaaagcgcgcaggcggatttactgaacctgaaacgcaaagtagaagcaggggccaaccgcgcgatcacccagttcttcttcgatgtggaaagctacctgcgttttcgcgatcgctgcgtctcggcaggcatcgacgtggaaatcattcccggtatcctgccggtctccaactttaaacaggcgaaaaagtttgcggatatgaccaacgtccgtatcccggtgtggatgtcaaaaatgttcgaagggctggataacgacgccgaaacccgtcaactggtgggggcgaatatcgccatggacatggtgaagatcttaagccgggaaggggtcaaggatttccacttctacaccctgaaccgcgccgagatgagctacgccatctgccatacgctgggcgtacgcccggcctgagttttcattaacgtttagtgcgatggcgaagccggtattcgccatcgcttttttttgcccaaaacgctgatacaggtcaggggagagcagaagataaagcgcgtatagtgccagcctgataattgacagggatgggttatgcaatggcaaggaagagcgatccactggcgtttggtgggttggcgttattaacgctgatctggagctttagctggatcgcgatgaagcaagtgacgagctatatcggcgcttttgacttcacggcgctgcgctgtatttttggcgccgtggtgctatggatagtgatgttgatccgcggtaaagcgctcaagccgacgcctttcggctacaccctggcaatcgcgttattgcaaacctgtggcatggtcggtctggcacagtgggcgctaatgagcggtggcgccggtaaagtggcgatcctgagttataccatgccattctgggttgtggtgatggccgcgttattcttaggtgagcgcatgcggcgatggcagtatatcgccatcggggtggcatgcgtgggcctgatactcgtacttcagccttggcaactcgactttacctccctgaaaagcgccttgctggcgatcctctccggcgtgagctggggggcaggtgcgatcgtcgcgaagcgtatgtatacccggtatccgcaggttgatttgctggcgctaacgacatggcagatgctatatgccgccgtagtaatgagcgtagtggcctggctcgtcccgcaacgggcggtagactggcagcccgacgttttctgggccctggcttacagcgcaatccttgcaacggcgctggcctggagtctgtggctttttgtactgcgtaatttaccggcaagtatagccggcctgagtacgctggccgtaccggtctgtggcgtgctattttcctggtggctactacatgaaaatccaggaaaggtggaaggttgtggcattgcgttgatagtactggcgttggcgatgatcagtatcaagagacgaggggcatagcctgctccggcctgcagagatgcataaaaaacacccggcatcagccgggtgttttgctctggtttattcccattcctgcaggaagcgctgaccatactggtcggccaccagcagcgcggcgtagacctggtcggaatcaacgccgcccggcatattgtgaatggtttcgccttcagcgcaggcggcttccgccaccagacgcattttggtcgggatatcacctttgatatccagctgcgccagggtgatcggcagcccaacgctgtggcacagcgcggcgacggtctctatttcgtccaccggcgcattttccagcaccagctgcgtcagtgttccgaacgccactttttccccgtgataatagtgatgggcgtcagggatggccgtcatgccgttatgaatcgcgtgcgccgccgcgagaccaccgctttcgaaacccacgccgctcagataggtgttggcttccaccacccgctccagcgccggggtgaccacgtgctgttcggcggccagcatcgctttttcaccctcttcgagtaaggtgttgtagcatagctcggccagcgccagcgccgcctgggtgcacttcccgcccgccatggtggtggcgccgctacgggagcaggcgcgggcttcgaaccaggtagccagcgcatcgccaatcccggcggccagcaggcgggccggcgcgccggcaacgatctgcgtatcgacaatgaccatgttggggttgcgcggcagcatcaggtagctgtcgaattccccttcgtcggtgtatatcaccgacagcgcgctgcacggcgcatcggtggaggcgatggtgggggcgatcgccaccggcacattcataaagtgggccagcgctttcgcggtatccagggttttgccaccgccgatccccagcacggcggtgcacttcgcgttgccggcgatatcgcgtagacggttgatttcattatgcgaacactcaccgccaaacggcgcgatttcggccgccaggccagcgtcggccaggcttttacgcagcatctcttccgcaaaccccaggacgaacttatcaccgaccaccagccagcgctcggccagcggtttcagatagtcgccgaggcgcttgatggcgcctgcgccctggatatatttgcctggtgattgaataatgcgatccatttcgattcctcctcgatgaccgtgacgccgcccgcaggcggctcgcggatccggttacagattcagcgtgccaaaggcgttattccagtcctgttcaaacttctctatggctgactctaccgcaggggtgccgagcatttgttgcgctacatctagtggaagggtgattgcttcgcagccagccagcagacaatccagcgcctggcgtggcgttttgaagcttgccgccagaactttgctctcgggcgcatgcatttccagcagggattgcagctcctgcaccatgcggatgccgtccccgccctgggcgtcgacgcggttaacgtaaggcgcgacgtactttgcgccggccagcgcggccagcaggccttgcgaagcgctgtagacggcggtgccaagggtcgggatgccttctttcttcagcagtttgatagcggcgagcccttcggcggtgaccgggattttgaccacaatgcccggcacggcattgctcagacgtttggcctcttccaccatgccctgcgcgtcgcggctcatggtctgcgcgaagagggtgccctccggaccgacggctttttgcaggcgcggcagcacatcccagaccgggactttaccggcggcgataatgctcgggttggtggttaccccggccagcgggtagatgcgggccaggcgttccacttcggcgacgttggcggtatccagatagagttccattgtgttttcctcaatgcttaattcggtgctgtcgttgaggtaagcatacggctttcgttcgaaggatcgccagatgacaaatttgccaaaaactggataaatgtacgcatcgtgattaaggatgatttagatcacatttatcggcgctggctgggatgggaggttactatagcgcgcacaaaagtcaggtttaacacacaaaaatctagttttttaccggggatgctttttccgtcagctggctatggtactggcggcggtattcagacggcgagcgttccgtagttttgcggaacaggcggcagaagtagttgctgtcggcgaagccgcaggcgtgggcgatgtctttcactttcatatcgtggcccttcagcagcatacgggcctgttcgagacgaatatggtttagatattcattgaagcccattggcccacatttctggaacagatgggaaagatagttgggagagaggtagaacgcctgggccaccgattcccggctcagcggttccgcataatggatgtccatatattggcggatcgcttcaaacaacgcctggctgcgcgaggaggtttgcgcctggctgccgagaagatcatggcagtggctgagcaggctgacgacgatgctgcgggcggtttgctgctcctgcggttgcatccggagttcattgagcgcctgcagcagaaatgatccgacgcgcggcccgcggcgcagcgcctgccgcttgtcgacaacagttatcgccttgccattccagtgctgcagcgagcactccagctgctgcttagcgaacaggatgcttaacagcaggcaaggcgcttgccactgcgggcagttccagctatcgccaggaatatagagcacgtcgttggcttcgaggggaggggcgttatcgccgagcgcctggtcgggcaactgcccatcgaggaggatattcagacggggaaaatccacctgcaccaccggctcagcaggcgagcgcgtctcgccggcgaaataaacccggccgaggctggtctgcttttttagcaatgcatcaataagttgattgatatcgttgtccatcattcttccgttcagcgcatcacccttttcatcataccggacattattccagcggtaaaagcgcttgcctgtcgctcttgcctcccagacaaggtatgttatatcgtaacaatttgtcgccattgatagcaaactcaggagagagtaatgaccagaaagatccccctgctggccttaggattcggcatggctttagccagcgcccaggcgttcgcccacggcaaccatagccatggcccggcgttaaccgaagtggagcgtcaggccagcgaaggcatttttgcggataaagatgtgcaggaccgcgcgctgagcgactgggaaggcgtctggcagtcggtgaacccgtatctgctcaacggcgatctcgatccggtgctggagcagaaggcgaaaaagcccggcggcaagagcgtggaggagtatcgcgcctattataagaagggctacgccaccgatgtggagcagattggcattgaagatgacgtgattgagttccacgttggccagaccgtcaatagctgcaaataccgctattcaggctataaaattctgcattacgcctccggtaagaagggcgtgcgttatctgttcgagtgccagcagggcgatgccaacgcgccgaaatttgtgcaattcagcgaccatatcattggcccgcgtaaatcacagcatttccatattttcatgggcaatgaatcacaggaggcgttgctgaaagagatggataactggccgacctattatccgtatgcgctgcataaagaacagatcgttgatgagatgctgcaccactagaacgggcggaaaacccccggccgggcggccggggagagatagattaaccggtgttacgcataccggcggcgacgccggcgatggtgaccatcagcgcttgttcaacgcgcggatccgggtccttgccctcttcttcagcctggcgtgaacggtgcagcagttccgcctgcaggacgttcagcgggtcggtatagatattacgcagctggatagactcggcgatccacggcaggtcggccatcagatgggagtcgttggcgatggccagcacgacgttgatatcggcagccagcagcttgcgcagctcggaacccagcgcccacagctccggcttcaccaggcgctgatcgtagtactccgccagccacaggtcggccttcgagtaaaccatctccagcatgccgaggcgggtagagaagaacggccagtcgcgacacatggcttccagttcactctgttttccaccttcgaccaccttctgcagcgcagcgccagcgcccagccaggctggcagcattaggcggttctgggtccaggcgaagatccacggaatggcgcgcagcgactcgacgccgccggttggacgacgttttgccggacgcgaacccagcggcagtttgcccagctcctgctccggggtcgcagagcggaagtaagggacgaaatctttgttttcacgcacgtagccgcgatacatcttgcacgacacgtcggacagctcggccatgatgtcgcgccattctgctttcggctccggcggcggcagcaggttggcttccagaatggcgctggtatacagcgacaggctgctgatggtgacttccggcaggccgtacttaaagcggatcatctcgccctgctcggtaacgcgcaggccgcctttcaggcttcccggcggctgcgagagcagcgcggcgtgggccggcgcgccgccgcggccgatagagccgccgcgaccgtggaacagcgtcagttcaataccggctttttcgcaggttttgatcagcgcgtcctgcgcctggtactgcgcccaggaggcggccatcacgccggcatctttagcggagtcagagtagccgatcatgaccatctgcttgccctggataaagccgcggtaccagtcgatattcagcagctgggtcatgacgtcgttggcgttgttgaggtcatccagcgtttcgaacagcggggccaccggcagagcaaagccaatcccggcttctttcagcaggagatgaaccgccagcacatcggacggcgttttcgccatcgagatcacgtaggcggcgatcgatccgcgcggcgcctcggcgatcaccttgcaggtgtcgagaacttcacgcgtctcttcgcttggctcccactggcgcggcagcagcggacgtttggaattcagttcgcggatcaggaaagcctgtttgtcggcttccgaccagctttcgtagtcgccgatcccgaggtaacgggtcatttcacccagcgcttcggtatggcgggtgctttcctgacgaatatcaatacgcaccagcggtacgccgaaagacttcacgcggcgcagggtgtcgagcagctcgccgttggcgataatgcccatgccgcaggcctgcagcgatttatagcaggcgtacagcggctcccacagctgctcgttctgagtgatcagtcccgccggtttcggcagcttctggcctttcaggcgcgcttccagccaggcctgggtctccatcagctgagagcgcagttttttcatcagataacggtaaggttcctgagcgccctcggcgccagccagggcgcgcagctcgtcggtacactccaccatcgacagctcggagatcagcacctgcacgtctttgaggaacaggtcggtcgctttccagcggctgagcagcagcacgtggcgggtgatgtcggcagtcacgttcgggttgccgtcgcggtcgccgcccatccacgaggtgaaacgcaccgggacgaagtccaccggcagctgatagccaaggttggcttccagctgttcgttcagctcgcgcagatagttaggcaccccttcccacaggctgttttccaccaccgcgaagccccatttggcttcatcgaccggggaagggcggtgcttacgaatttcatcggtatgccacgactgggcgatcagctggcgcagacggcgcattagctgatggtgctcgtagtcagcgatatctttgttgtccaactgcttaaggcagttgttcacttccaccattttatggatcagcgtccggcgggtgatctcggtcgggtgggcggttaacaccagctccagagacagcgattccaccgcttgtttgatggtctcttcgttgagattgggttggtctttgagctttctcagggtacgcgcaatgacttccggattgctggccgcttcgccattggccgaaatgctgtggtactgctcagcggtgttggccagattcagaaactggctgaaggcacgggccaccggcagcagttcgtcgtttgacaaattctgcagcgtggtcagcagctcctggcggttagcttcgttgccggcgcgtgaagatttggacaacttacggatagtttcgacacgatcaagaatattttctcccaatgcatccttgatggtatcgcccagcaccttgccgagcatactgacattactacgcaatgcggaatattgttcgttcatgttaccccagacaccccatctcattttattttgttatatccgctgcgctggaacgtgagcaacggataagcaacccgtcttttataaagccacgtaaatacccccacgtcaattactgcgaaatcgcttcagcaaacgagtaaatcgccgtaatttgcgaaatttaattcagggagcgctggataagtatcgcttatggaaatgtgacgatcgtcaccgttccgccccgggagaacggggcggaaaaagagggcgattttagtgccagcagaagtgatgaaccacctggctaatcagctcccgggtcggcttgataaagcgcgtctccagatactcgtcaggctgatgggcctgattgatggagcccgggccgagaaccagcgtcggacatagcgtctggataaacggcgcttcggtgcagtagttcaccacgtcggtctgcgcgccacgcagtttctcgaccacctgcaccagcttatggtccggcgggcactcgtagccggggatcggcggatgcagctcagagaccgtcaggcggcccggccagcgttcgctgaccggggccagcgcctcgcccaacagaccattaagatcgtttagggtcatccccggcagcgggcggatatccatatgcagttcacagcaggcgcagatacggtttgaggcatcgccgccatggatagcgcccaggttgagggttgggtaagggaccgtaaacgcctcgaagtgatagcgctctttaagcagatcgcgcaactgcataatccggccgatggcgtcgtgcatcagctcaatcgcgttgaccccgcgcgccggatcgctggagtggccggactggccctgaatacggatcgcgttggacatatggcctttatgggcgcggatcggctgcagggaggtgggctcgccgatgatggcgcagtccgggcgcagccgggtggtttcggcaaagtagcgcgcgccggccatgctggtctcttcgtcggcagtggccagaatatacagcggctttttcagcgtggtgacgtcgacatcgcgcagggcgtcgagaataaaggcgaagaagcctttcatatcggccgtgccgagaccgtagagcttgttatcgtgttcggtgagggtgaacgggtcgcgcgtccagcggccatcatcgaacggcacggtatcggtatgcccggcgagcagcaggccgccggcgccgtgtccggtgctggccagcaggttgaatttatggcgcgtatccggcaccggctgtatctcaacattgaagccgagatcgcggaaccagcctgccagcaaattgattaaagactcattgctttgatcgagagcctcttcagtcgcgctgatggacggtgtggcgatcaacgcgcggtaaatctcgataaagggcggtaaattgtttttcattgttgacacaccttgggtcgtgatagtatcaatattcatgcatttattgtgaataaaaatacaatatcgttgagcgtaagaaaacccatcgaatgtaaggagatgcgcttccaatgttaaatacgctgattgtgggtgccagtggttatgccggcgcagagctggtgacctatatcaatcgtcatccgcatatgaacataaccgctttgacggtctccgcgcaaagcaatgatgcgggaaaattaatttccgacctgcatccgcagctcaaaggcattgtcgatatgccgctgcagccgatgtccgatatcagcgaattcagcgctggcgtggacgtggtgtttctcgccaccgcgcacgaagtgagtcacgatctggcgccgcagttccttgccgctggctgcgtggtgttcgatctctccggtgccttccgcgttaacgatggggcgttctacgaaaaatattacggtttcactcatcagcatcccgacctgctcaaacaggcggtgtatggtctggcggagtggagcgcggatgcgcttaaagacgcgcagttaatcgcagtgccaggctgctatccgacggcggcgcagctgtcgctgaagccgctgattgaggccaatctgctggatctcaaccagtggccggtaatcaacgctaccagcggggtgagcggcgcgggtcgtaaggccgcgatcggcaacagcttctgtgaagttagcctgcagccgtacggcatatttaaccatcgccatcagccggagattgccagccaccttggggcaaaggtaatttttaccccgcacctgggtaattttaagcgcggcatcctggaaactatcacctgccgcctgaagccgggcgtcggccatgcgcagatcgcggcggtttaccagcaggcttacgccgataaaccactggtacgtttatatgataaaggcgtgcccgctttgaaaagcgtcgaaggcctgccattctgtgatatcggttttgccgtgcaggacgatcatctcatcgtcgtcgcggcagaggataacctgctgaaaggcgccgcagcgcaggcggtgcagtgcgcgaatattcgtttcggcttcgctgagacgcagtctcttatttaaggtgtgatgatgaacccattaattatcaaacttggcggcgtattactcgatagcgaagaagcgctggagcgcctgtttaccgcgctggttaactaccgtgaagcgcaccagcgtccgctgattatcgtccacggcggcggctgcgtggtggatgagctgatgaagcagctcaacctgccggtgcagaagaaaaatggcctgcgcgttacgccggctgagcaaatcgacatcatcaccggcgcgctggcggggaccgccaacaagacgctgctggcgtgggcgaaaaaacatggtatttcctcggtaggcctgttcctcggcgatggcgatagcgtgaaggtgacgcagctggatgctgagctgggccatgtcgggctggcgcagccgggctccccgacgctgatcaacaccctgttggccggcggttacctgccggtggtgagctctatcggggtgaccgatgaaggccagctgatgaacgtcaacgctgaccaggcggcgacagcgctggcggccaccctgggggcggatctgatcctgttgtctgacgttagcggtatcctcgacggtaaagggcagcgcattgccgagatgaccgccgagaaagcggagcagctgatcgagcaggggattatcaccgacggcatgattgttaaagtgaatgcggcccttgacgccgcacgtgctctgggtcgtccggtggatatcgcctcctggcgtcacgccgagcagctgccggcgttatttaacggcacgccgatcggcacacgtattctggcttaagatttcatgcccggcggcgcgtcgtctgccgggcttacaagaccgtaggccgggcggcacaatgccgccggcggaactaacgaataaaggaagcatgttatggcactttggggcgggcgttttacacaggcagcagatcaacggttcaaacagttcaacgactcgttgcgcttcgactatcgtctggcggagcaggatatcgttggctctgtcgcctggtcgaaagcgctggtaacggtcggcgttctgagtgccgctgaacagcagcagctggaagaagtgctgaacgtgctgctggaagaggggcgcgccaatccgcagcaaatcctcgccagcgctgccgaagatattcacagctgggtggaaggcaagctgatcgataaagtgggccagctgggcaagaaactgcacaccgggcgcagccgtaacgaccaggtcgccaccgatcttaaactgtggtgcaaagataccgttgtcgaactgctctcggcgaaccgccagctgcagagcgcgctggtggagaccgcccagcagaatcaggacgcggtaatgccggggtacacccacctgcagcgcgcccagccggtgacgttcgcgcactggtgtctggcctacgttgaaatgctggcgcgtgacgaaagccgtctgcaggacgcgctgaagcgcctcgacgtcagcccgctgggctgcggcgcgctggcggggacggcgtatgaaatcgaccgcgagcagctggccggctggctgggctttgcctccgccacccgcaacagcctcgacagcgtgtccgatcgcgatcatgtgctggagctgctttccgatgcggctatcggtatggtgcatctgtcgcgctttgcggaagatctgattttctttaactccggcgaggcgaacttcgtcgagctttccgaccgcgtgacctccggctcctcgctgatgccgcagaagaaaaacccggacgccctggagcttatccgtggcaaatgcggccgcgtgcagggtgcgctgatcggcatgatgatgacgctgaaaggactgccgctggcctacaacaaagacatgcaggaagataaagaggggcttttcgacgccctggatacctggctcgactgcctgcatatggcggccctggtgctggacggcattcaggtaaaacgcccgcgctgtgcggaagcggcgcagcagggctatgccaacgccactgagctggcggattatctggtggcgaaaggcgtaccgttccgcgaggcgcaccatattgtcggtgaagcggtagtggaagccattgcgcaagggaaaccgctggaagcgctgaccctggccgatctgcagaaattcagcccggtgattgcggacgatgtgtatccgatcctgtcgctgcagtcctgcctcgagaaacgcgcagcgaaaggcggcgtctcgccgcagcaggtagcccaggctatcaacgaggcgaaggctcgtttaagctaatccttagatatctgccctccctgacccggccaagcccagcgacgccgggttttttatgcaaaaaaaaagcggacgcaaggtccgcaaaagttcacgttggctttagttgttcgggtagagaaacagtgtgacgggtcagtgattttcacaggtagaccgtctttatgggcgtattattgaacagaaaacttgatagggataatcgttcgttgctatgctatctatcgccatggactatcgtggcgatggaggatgaataatgaatattcgcgatcttgaatacctggtagcgctcgccgaacaccgccacttccggcgggcggctgactcatgccatgtgagccaaccgacgctcagcggacagatccgcaagctggaggatgagcttggcgtcatgctgctggagcgcaccagccgtaaggttctgtttacccaggcggggctgttgctggtggatcaggcgcgtaccgtgttacgcgaagtaaaagtgctaaaggaaatggcaagccaacaaggggaaaccatgtccgggccgctgcatatcggcctgatcccgacaattggcccgtacctgctgccgcacatcattccgatgctgcatcagaccttcccgaagctggaaatgtatctgcacgaagcgcagacccatcagctgctggctcagctcgacagcggtaagctcgactgcgccatcctggcgctggtcaaagagagcgaggcctttatcgaggtgccgctgttcgatgagccgatgatgctggctagctatgaagatcatccgtgggcgaaccgcgatcgggtgccgatgtcggatctggccggtgaaaagctgctgatgcgggaggatggccactgtctgcgcgatcaggcgatgggcttctgctttgaagcgggggcggatgaggatacccacttccgcgcgaccagcctggaaacgctgcgcaatatggtggcggcaggcagcggcattaccctgctgccggcgctggcggtgccgcaggagagaaaacgcgatggcgtagtgtacctgccgtgcattaagccagagccaagacgcaccatcggtctggtttatcgtccgggctccccgctgcgcagccgctatgaacatctggcggaggccatccgcggtacgatggatggccatttcgacaaggcgttaaaacaggcggtttaagccgttcagcgcggcaacccggtacgcttccgccatggtcgggtagttaaaggtggtgttgacgaagtactcaatggtgttgccaccgcctttctgctccatgatcgcctggccgatatgaataatttcggccgcgcgctcgccaaagcagtgaatgccaaggatctccttggtttcacgatggaacaggatcttcagcgtaccaacgctcataccgacgatttgcgcccgcgccaggtgtttaaactgggcgcggcccacctcatacggcactttcatcgccgtcagctgctgctcggttttcccgacggagctgatttccggaatggtatagatcccggtcggaatatcttcaatcagatgcgctgaggcttcgcctttcaccagcgcctgggcggcaatgcgtccttgatcgtaagcggcagaagccaggcttggatagccgatgacatcgccaaccgcatagatgtgcgggagggcggtctgatacatgctgttgaccttcagctgaccgcggctgtcggtctgcagaccgatattttccagcgccagggtgtcggtgttgccggtgcggccgttagcgtacagcaggcaatcggccttcagctttttgccggacttcaggtgcatgatcaccccgtcatccaccccttcaattttctcatactcctcgttgtggcgaataaccacgccgctgttccagaagtgataagagagcgagtctgacatctcctgatcgaggaaggccagcagacgatcgcgggtgttgatcagatcgaccttcacctccatgccgcggaagatcgacgcatattcacaaccgatcaccccggcgccgtaaatgatcacatggcgcggctcatgctgcaggctgagaatcgaatcgctgtcatagatgcgcgggtggtggaaatcgacatccgccggatggtagggacgcgatccgcaggcgataacgaatttctccgcggtcacagtctcgaccgtgccgtcatggcactccagcgccagagtatgctcatccacgaagtgggcattgccctgcagaatttcacagtggttgcgctcatagaatccctggcgcatatgagtctgctggttgatgacgctgtcggcatggttaaggatgtcggcgaaagaagagcgaagaaggcgggagtggtcgctgtagagggggttttggttaaactcgataatacggctgacggcatggcggagggctttcgacgggatggtgccccagtgggtgcaaccgccgccgacattatggtagcgctcgatgacggcaacgcgtgctccctgtttcaccagtcccatggcggcgccttccccgccaggaccggaaccaatcactattgcatcataatcccaagagtgtgacatggcattactcacctgttttatacataaaataaacacgatgataacattcgctgcgctttaacccaattatcgttgtgcttttttgcagcataaaagcagaaacggctcgtaaacaatcattcacaatccagggcaaaccgattagttttaatctctggtatagtgccagcagggctattggaaggattcatacatcgtgatgggcgtaagagcacaacaaaaagaaaaaacccgccgttcgctggtggaagcggcattcagtcaacttagcgctgagcggagtttcgccagcctgagcttgcgtgaagtggcccgggaagcagggatcgcgccgacgtccttttatcgtcattttcgcgacgtcgatgagctgggcctgacgatggtcgatgagagcggactgatgctgcgccagctgatgcgccaggcgcgccagcggatagccaaaggcggcagcgtgatccgcacctcggtctccacctttatggaatttatcggtaacaacccgaacgccttccgcctgctgctgcgcgagcgctcgggaacttctgcggcgtttcgcgccgccgtcgcacgcgagatccagcactttattgcggaactcgccgactatttagaactcgaaaaccatatgccgcgcgcctttaccgaagcgcaggctgaagctatggtcaccatcgtttttagcgctggcgcggaagcgctggatgtcggccctgagcagcgccggcagctggaggaacggttggtactgcagcttcgaatgatctcgaaaggcgcgtattactggtatcgccgtgaacaagaaaaaatgtcacatcattccgaataacgtgaaggacgagcaatgaaacactcagttcaagataaaggtacgctgctgctggcgctgattgccgggttatccattaatggcgcctttgcggcgctgttcagttcgatagttccgttttccgtcttccccattttatccctgctgctgacggtctactgtctgcatcagcgctatcagaatcgcagtatgcccgttgggctaccgggcctggccgccgccttttttattctcggggtgctgttgtacagcaccgtcgtgcgtgcggagtacccggatatcggttctaacttcttcccggccgttctgtccgtcgcgatggtcttctggatcggctacaagatgcgtaaccgcaaagataccgcagccgagtaagccgcaagcggtaaaaaaaccggcaatatgacgttgccggtttttttgggcctatttgcgggtcagcaggacgccgcactccatgtgatgggtatacgggaactggtcgaacagcgccagccgggtaacgttgtgcgtctggcttagcgtttccagattgcgacacagcgtttccgggttgcacgaaatgtacaaaatacgcggataggcctgcaccattttttccgtctcgctgtccagcccgctgcgcggtggatcgacgaagatggtttcgcactgatagctatgcagatcgataccctgcagccggttgaactgccgcaccccgttcatcgcctgagtaaactcttccgccgccatgcggataatctgcacgttgtcgatatggttagcggcgatgttgtactgcgccgccgccaccgacggtttggcgatttcggtggccaatacgcgatcgaaattacgtgccagcgccagcgagaagttaccgttgccgcagtacaattccagcaggtcgccagtcgcccctttggtgacatccagtgcccactccagcatctgaatgttcatggccgcgttcggttgggtaaagctgttttccacctgacggtagatcatctcccgcccgccaaccggcaggcgttcatctatataatcctgatcgagctcgattttagttttggtcgcccgcccaatcagatgcacattgagcccctgggctcgcagggcgtcacgcagcgcctccgcttgctctcgccaggcatcgtccagctttttatgatacagcagcgaaacgaccgcctggttgctgagggtggtcagatagtcaatctggaacagcttctggcgtagcacgggattgttgcgtacgccctccagcatggcggtcatcagctgattgatcagcgcgctggcggccgggaagctgtcaacgcgaatccgcgaccgggtctgctgatcgaaaataatatggtacagatcgtcgccatcgtgccacagacggaactcggcgcgcatacggtagtggctgaccggcgaacgaaacacttccggaaccggcgcggcaaaaggcgccatcatggtttgcaaacggacgactttttctgccagctgcgcttcgtattgttcggtaggaaggtgttcgggggtcatgatgtatcctgaataaaataagtacgcggggattgtagggaaagcgccggggatgtccagcctcgaatgccgcgggaaatataattagcagtctggacatctatatggttctgattgtagcattcgcctaccggtcctgtgagttaaaagggaacccagtggaaatctggggctgacgcgcagcggtaaggaaggtgagaaatgagcgcactcggtgcagacactgcggctagccgtgggaagtcattatttcttgaaacagcctccaagcccgaagacctgccggaatacgtcgcactgggttttatcgtcgcgagcaactgataaaacctgcggcatcctttttctgtttcggatgcttttacaatgattaaaaaagcttcgctgatgacggccttatccgtcacggcattttccggctgggcgcaggatagcaattcagatacgttggtggtgacagcaaaccgttttcaacagccggtcaataccgtgctggcgccgaccgacattgtgacgcgcgatgacatcgaccgctggcagtccaaagatttaaacgatgtcatgcgtcgtcttcccggggtcgatattgcccgcaacggcggcatggggcagagcgcttcgctgtatgttcgggggacggaggctcgtcacgtgctggtgctggtcgacggtgtgccgatggcgcgtccggggatctccaacggcgtagatatcagtcagatccctatctcactggtccagcgggtggaatacatccgcggcccgcgctccgcggtgtacggctccggagcgatcggcggggtggtgaacatcatcaccatgaccgacgctgagcgttcgcagatcaacgccggcgcgggtacgaacggctatcagtcctatgacggcgcctttaacaagcggtttggcgatacgttggttaccgctgctggcgcctatcagaccaccaaagggtttaacgtccagccgaattcctcttacagcggcgacagcgatcgcgacggctaccgcaataaaatgctgtggggcggggtacagcatcagttcgatgacaacttctcggggttcttccgcggctatggttattccgccaacgctgactatgaccagggtaactggggctacgcaggtggaaacgatgaagatcaatcctatacccaatcctgggataccggtctgcactaccactccggaatttactcctcccagctgattgctaactatcagcgcatcaaagattacaactacagcagcgacgctggccgctatgccgcgggcaccaccctggatgatatggaacagcgctatatccagtggggaaataatgttgtggtaggccatggggcagtgagcggcggcgttgactggaaacaagagaagctgaaatccagcggaacgaccagtaccgacgtgtataagcgtgacaccaccggtctttatctgacgggacagcagcagattgacagcgtgacgctggaagcttccggccgtgaggatcatgacgagcagtttggctggcacggtacctggcagacggccgcaggctgggaatttatcgacggttatcggacaacgctctcgtacggcacaggattcctcgccccctccctcgggcagcagtacggtgcagaacgctttggcatcgcctctaacccgaatctgaagccagaggagtcgaagcaatgggaagcgggccttgaaggggtaacggggccggtcgactggcgcctctccgcatatcgctatgagattcaaaacctcatcgattacgacaacaacgcctattacaacgtcaagtcggcgacgattaaggggctggagtggacggggaatataaccaccgggccggtggagcaccatctgacgctgcagtatgttgaccctcgcgatgatgaaaccaataagatcctctatcgccgggcgaagcagcaggtgaaatacgagctgaacggccaggtctacgatctggggtgggatgtgacgtatcactacatcggcaagcgttacgattatgactacgacaactcgcgtaccgtcaatatgggtgggttgagcctctgggatgtcggtttatcgtatcccgtcacctcacacctgacagttcgtggtaaaatagccaacctgttcgataaagattacgagacagtttatggctaccaatctgcaggacgggaatacaccttgtctggcagctacaccttctgatccacgtcccaccgtgctggtgtttgattccggcgtcggtgggttgtcggtttataatgagattcggcagctgctgccgaatctgcattacatctatgctttcgataacgttgccttcccctatggcgagaagagcgaggagtttatcgttgagcgcgttgtggaaatcgtcaccgctgtccagcagcgttatcccctggcgctggcggtgatcgcctgcaataccgccagtaccgtctccctgcctgccctgcgtgaaaagttcgctttccccgtcgttggcgtggtgccggcgatcaagcccgccgcccgtttaacggcgaacggcattgttggcctgctggcgacgcgcggtaccgtaaagcgtccttatacccgtgagctgatcgaccgctttgccaatgaatgtcggattgaaatgctggggtcggcggagctggtggagctggcggaagcgaagctgcacggcgagcctgtgccgttagaagagctgcgccgtatcctgcgcccatggctgcggatgcaggagccgccggatacggtggtgctgggctgcacccactttcctcttttacaggaggagctgcagcgcgttctgccggaaggcacacggctgatcgattccggcgcggcgattgcccgacgcaccgcctggctgttagagcatgaagcgccggatgcgaagtccagcgacgagaataaagcattctgcatggcgctgacggcagaaacagaacagcttttacccgttctgcgtcgctatggcttctcgacgctggaaaaattaccgctctaagggcgttttgcacaaaaaagagacggttgaataattttttgaaaacagggcttgtcaacgtctcagaactccctataatgcgcctccactgacacggaacaacggcaagcaagccgccgggtcagcagggttttagcggtgaagttcagcgctaaaaactgacagagaaaagcaaaataagggcttgactctgaatgaggaaaacgtattatacgggacctcgcaacggtgagctgaaagccgcgttgcaactgctctttaacaatttatcagacaatctgtgtgggcactcaaagtgacatggattcttaacgtcctcggacgaaaaatgaataccaagtctcaagagtgaacacgtaattcattacgaagtttaattctttgagcatcaaacttaaattgaagagtttgatcatggctcagattgaacgctggcggcaggccta

SEQ ID NO: 139 - DNA, 99561 bp, Unknown
  source: /note="Description of Unknown: MKP2_2161_1 Mutant Bacteria sequence"
cccggcgcgggccggggcggcccgggccctcggcgagatcgctggggtccggcccgtcctcttcgtggttccgccgccgccggggggatagctgccacccgcccctgccgtcctggcccggtaggcctcatcaagatcaagcgcataggcgatacgcagcgccagacacatcgcgatgccgttgcgcaatgcgtaccgccactgcggccgggtggctttaacccaggggagtgcgcgccacgacagggtctgcaggttcattactgcccgccaattgagacagtgcaggtggtgccggagaccagggtgacatcggccggcagcgtatcaaaggcaattcgcaccggaacgcgttgggcgagacgaacccaggggatatttggtttgatgttggccaccagcccggttccctgttccacgctctggtcgacaatcgcgcggccgatgctcgcgacatggccctttagcgtctgctgattgctatagagaataatttgtgccggatcgccgatgcgaatgtggcgcagtttggtttcttcgaagtagcccagcacgtaaaacgagtggctgtccaccagggcaaagaccggatggccggtggtagcgtaatcaccgacgcgggtggaaaggttagtcacccagccatccaccggcgctttgacaaccgtctggctgagctgccactgcgcatgtttcagcgccgcttcggttacgccgacccccgctctggcggcagccagggtggtggtggcggtattcagggcggtattgacgttctcaagatcttcagccgagatggcattttgcgacaggcttcggcgacggcgagcctcgctggcggccttgctttgctccgcctgcgctttcgccacctccgcctgggctttcgccagctgcgcctgggcgttcagcaccgcgatgcgatagggggtgtcgtcgatggtaaacaatacttccccggctttgacccgttggttatcggttacgttcaactgcagaatactgccggagacctgaggggtgatcccaacctgctcggcgcgcactttgccgtcgcgggtccagggtgactgagtgtagaaattccataacaaccatgcggcaatcagggcgacggccgcgaccagcagcgttgacagatattttaatcttttcataacagggagatcaccaggcaatgagcaataccagggccagacagaccgagagcgcgaacagggagagatccattagtagcgggtgccagatgtcgcccgcatacatccagtcacgcagctggcgatgtaaaaacaaccagataaagaaacccaacaagacggctttgaacagcggagggaaatagacggatgcgccgaacaccaggtcctgcagcggcaatccggatgtgttaagactcagtttcacaagcaaaaatcctttgccattacaggggtaacctcaggacgtgctactctttaacagtgtaaatcattgttttggtttttgttgaatcaagtaattcatttgttttgataattcaaatgctgcacactattctaaaatcagtataataacttagcaagctaattataaggagatgaaattggaatcgccacttggttctgatctggcacgtttagttcgcgtttggcgcgcgctaatcgaccatcgcctgaaacctctggagttaacgcagacccactgggtcacgctgcataacatccaccagctgccgcctgagcagtcgcagatccagctggcgaaagctatcggtattgaacagccgtcgctggtgcgtacgctcgatcagctggaggagaaagggctcatttctcgccagacctgcgcaagcgatcggcgggccaaacgcatcaagctgacggaaaaagccgaaccgctgatcaacgagatggaagaggtgataggtaagacccgtgatgaaatcctctcaggggtctcgaagcaggaagtggaaaccttgctccacttaatccgtaaacttgaacaaaatatcctcgatctccaggctaaagattaattctttgcggcccgggctaatccgggccttttttcaccctccctgccgatgccagacgatcacctggttacgtccgttattctttgcttcatacatggcttcgtccgcgcgctgaacgcacgcttccgctgtcacgctattgtcgtaggtggtatacacccccatgctgatggtcattcgctccggtaaatggctctccccggcactgaccgccaggcggatacgctcggcgatcgcttgcgcttctttttcaccggtgttgaccagcagcagagcaaattcctcaccgccgatgcgtgcggcggcgtcatctacccgcgaatggctttccagcaccgaggcggcgaactggatcactttgtcgccggcgacatggccgtagctatcgttgatgcgtttgaaatggtcgaggtcgctgatgagcaccgacagcggatgctgggcattcaccttcgccagctgttggttaagagtgtcgtagaaaaagctgcggttgtagaggcgggtcaacgggtcgcggatcgaattctgatacgaatggacatatttgtggttagactcgcgatagaggataaagacgtcaaccagtagcaccagaatcaggaacaaggtgcatagcgtttcgaaaaaacgcgcctggtaccaggtctgatccagctcccctgcggtggagagcagctggaaaagcgtgaacaaataagcgctgcaaaaaaaagcgccgctgaaccaaaaaatattacgcagtttactcaagctaattaataaaatcagcgtgatgaaccaaactgccatcagcagccagccgataatactttgccacaacggggtaaaggtatggctcagatcgtcgataaaattgacgctcagccacggcgaatggctggagtatagccatgataaaacaataatggtcaacgtaaaaagtatacatgctgtaaatgtaagaacgtgtgctttccacgaatgcatgatgcgctggcgaaaatagtacaaaataatagatgacatgaataacacagccatcattatattgcggaagaaataatagataacggcgtcattttgattaacgaccggggccggattgcaggtaagccagtccggatagctgctgagcgtgccaagcatcagcagcgctgagcaggcaaacccgaaagagaccggtgtaaggtagagacgccgcttgctgctccagtatttcatgcccataaaacaggcaatggtaatatgaaaaaccatcaggaaactggtcagcagcggaaataatattgaggaagtactactgaagctggtatgaaaaaacgcagtcatcccggaaatgccaatcccggccagtaaacaaatgcaaatataaaggattagacgtttgacgatatgatgcacatgttcgggcataggcaatattccacataaaaggcaacggcagcgacgatgagtcaccagggctaatttacgttcttgagggtaataggggcgggcagataagatattgcgcaggcgcaatgattcatggaatattaaagtaaagatgtctgatggttactacgaatttattacggcgaaataaacgtggctgaaaaatacgatgcggcgcaaccggccgcatcgtaagggaaattatcgcggagagacggtgacctggctgccgctgccggcaatggccacgcgctgaccaacggagaacggagtgctgccctgtttctgcactaccataatggtattgccatcgtccttacggatttccagttcaacgccctgcgttttattcatcgcgccctgaacgccctgaccggctacgccgcccgcgaccgcacctgccgccgtagccagagagcgtccggtaccgccgccgatggtgtttccaaggaacccgcccagtaccgcaccgccaatggccccgatggcattgctatcgtcgccgctctggatctgtacggcgcgcgtatgcacgatagtaccgtaagtcacgctctgcacctgtttggcttcagatgcggaataaacgtcgccggacaggccgctgctgctcacgcagcctgcgagcgtaaaaccaatcatcgatacagccaaaacacgtaaaatcatttatgaatctcctgttcaccgaaggtgttcaattgaacgtccatacggttaattatatggcatttagtcgtcggcgggcataggttctccctggactatacaaaaaataataaacactggtgcttcaacctcaactaaacgccggttctttacgatgttctctgatttgtcgctctattgttaaaaagtattagtacaacatagcattaaccgacactttatgatggagtgaagggcatacaagggtcatggaatgaaggaaaacgtatgagatcgggtcgctttattggcgttatgtctggtaccagcctggatggtatcgatgtcgttttggccaccattactgaaaacatggtggcgcagcaggctagtctcacctggcccattccacacgcgataaaagaagagattctggcgatttcccaggggcagtcgctgaccctttcgcagctaggtcgtctggacacccgtctgggacggctgtttgccgatgccgtactggcgctgatgagccaggaaagtctcaaacccaccgacgtcatcgccatcggctgccatggacagaccgtatggcatgaaccgcagggagaggctccgcataccctgcaaattggtgacaacaaccagatcgccgcccacaccgggataaccgtagtgggggattttcgtcgccgggatatggcgctaggcgggcagggagcgccgctggtgccggcttttcatcatgcgctgctggcccaccccgttgagcgacgtatggtgctcaatatcggcgggatcgctaatgtgtcgctgctggcgccagggcagccggtgcgcggctatgataccgggccgggaaatatgttgctggacgcctggatctggcgccagaagggcaaaccgtacgacaaggacgcccaatgggctagcgaaggtaaagtgctgctgccgctgctgcaggacatgctgagcgatccgtggtttgccttgccggcgccgaaaagcaccggtcgggaatatttcaattacggctggctggagcagcatatggcccgctatccggggctacgcggggaggatgttcaggctacgcttgcggaattgaccgccgtcaccatcagtgagcaggtattgttaagcggcggctgcgagcgtttgttagtgtgcggcggcggcgcgcgtaaccccttgttaatggcgcgcctggcggcgctgctgccgggaaccgaggtctccaccaccgatgaggcggggatcagcggcgatgatatggaagcgctggcctttgcctggctggcctggcgaacgctggctggactgccgggcaatctgccctccgtgaccggcgccagcgaagcctcggtgctgggcgccatttttccggctaacccgccgcagaatcggagttaactgaaatcttaaatacgatgcgaccggtaaactggacaagttaagcggagggcggagtgcccgccgtgaccgggaaagtcgaaggcaaacgaatgaaaaaaattcttatcgcagttgtaccttttatgctggcgggctgtagctactacaaccagtttgtcgagcggatgcagacggacacgctggagtatcaatgcgaccagaaaccattgacggtccatcgcaataacgcacgccagcaggtcagttttatctatgataatcagcaactgaacctgtctgaggggctgtcggcttccggggcgcgctacaccgacggcgtctatgtgttctggtcaaaaggcgataccgccaccgtctataagcgcgaccgcatcgtccttgataactgtcagctgcagacggccaaacgttgagatttctgtccggggggcgcacaataacgccaccttatgactacatcctcaatggccatgtctgataacgacgaactccagcaaattgcgcatttgcgccgtgaatacacccgtggcggtttgcgtcgccacgatcttcctgctgaacccctgccgctgtttgaacgctggctgcgtcaggcctgcgatgcgaaacttgccgacccgacggccatggtggttgccaccgtcgatgagcgcggccagccctaccagcgcattgtgttgctgaagcactacgacgaaaaagggttggtgttttataccaacctcggcagccgcaaagcgcatcaaattgaaaacaacccgcaggtcagcctgcttttcccgtggcatatgctggagcgccaggtgatggtaatcggcaaagcggagcgtctgtcgacgctggaagtggtcaaatatttccacagccgtccgcgcgacagccagattggcgcctgggtctcgaagcagtcgagccggatctcagcccgcggcatcctcgaaagcaaattcctcgagctgaagcagaagttccagcagggtgaagtgccgttgccgagcttctggggcggattccgcgtcagcattgagcagatggagttctggcaggggggagaacaccgtctgcacgatcgctttttataccagcgcgagagcggcgcctggaaaatagaccgtctggcgccgtaaacgccgaaattagttatcgaagcgctggcgctgaaagggccggcgctttattctatgtacttttcgcatctggcgaaaggtcgtgtaccggcagaggtgcagtcgtttatacatggagaatttgatggcaagcagtaacttgattaaacaattgcaagagcgggggctggtagcccaggtgacggacgaggaagcgttagcagagcgactggcgcaaggcccgatcgcgctctattgcggcttcgatcctaccgctgacagcttgcatttggggcatcttgttccattgttatgcctgaaacgcttccagcaggcaggtcataaacctgtggcgctggtgggcggcgcaaccggtctgattggcgacccaagcttcaaagccgctgagcgtaaactaaacaccgaggataccgtgcaggagtgggtggataaaatccgcaaacaggtggctccgttccttgattttgactgcggcgacaactcggcgatcgcggcgaataactatgactggtttggcagcatgaacgtgctgaccttcctgcgcgatatcggtaaacacttctctgttaaccagatgatcaacaaagaagcggtgaagcagcgtctgaatcgtgacgatcagggtatctcctttaccgagttctcttacaatctgctgcagggttacgactttgcctgcctgaacaagctgcacggcgtggcgctgcagatcggcggttctgaccagtggggcaacatcacctccggcatcgatctgacccgtcgtctgcatcagaaccaggtgtttggcctgaccgtaccgctgatcaccaaagcggacggcaccaaattcggtaaaaccgaaggcggcgccgtgtggctggatccgaagaaaaccagtccgtacaaattctaccagttctggatcaacaccgcggatgctgatgtctatcgcttcctcaaattcttcacctttatggacattgcggagatcaatgccctggaagaagaagacaaaaacagcggtaaagcgccgcgcgcccagtacgtgctggcagagcaggtgacgcgccttgtccacggcgaagaaggcctggaagcggcgaagcgcattaccgaaagcctgttcaacggtaacctgagcgacctgagcgaagcagacttcgaacagctggcccaggatggcgtgccgatgatcgaaatggaaaaaggcgccgatctgctgcaggcgctggttgattccgagctgcagccgtcccgcggtcaggcgcgtaaaaccgttgcctctaacgcggtgaccatcaacggcgaaaaacaggccgacccggaatatgtattcagtgacagcgatcgcctgtttggccgctacaccttgctgcgtcgcggtaagaaaaattactgcctggtctgctggaaataaaaaaatactgccagggcgtgggaaaccacgccctttttctttttagggttgtggtaagaaaatgaagaacatcctcgccattcagtctcacgttgtgtttggccatgccggcaacagtgccgccgaatttccgatgcgccgtctgggcgccaatgtctggcccctgaataccgtacagttctctaaccatacgcagtacggcaaatggaccggctgcgtcatgccgccttcgcatttgacggagatcgttcaggggattgccgatatcgacaagctccagacctgcgatgcggtactgagcggctatcttggctccgctgagcagggagagcatatcctcggtatcgtgcgtcaggttaaggcggccaatccggcggcgaaatatttttgcgatccggtgatgggtcacccggagaagggctgcatcgtcgcgccgggcgtggcggagttccacgtgcgctatgcgctgccggccagcgatattattgcgccgaatctggttgagctggagatcctgtgcggtcatccggtcgccagcgtcagcgaggcagtggccgccgcgcgggagctgattgcccagggcccggaagtggtattagttaagcatcttgcccgtgcgggtctgagtatggatcgttttgagatgctgctggtgacggccgaagaagcctggcatattagtcggccgctggtggatttcggcctgcgtcagccggtgggcgtcggcgatgtgaccagcggtctgctgttggttaaattgctgcagggggcaagtctgcgcgatgcgctggaacacgtcaccgccgcggtgtacgagattatgctcgccaccaaaaatatgcaggaatacgaactacaggtagtagcggcgcaggatcgcatcgccgtaccggagcactgcttcagcgccacccggctgtaactcccagggcctgcccgacggtccgccgggcaggttcaggccttattttaagccttcagccgccagtgcggccgccaccgccggacgcgctgccacctgcgtcatccagctgccgatatgaccataggcagccatatccagttttatagcataggcccagcgcagcaccgtaaacagataaccatcggcaatggtgaagcgatggccggtcagccactgtttgtctgccagcgctgcatcaacgtattgcagctttttctcaagcagcccccgcgcgacaggcttatagtcctccggggtatccgggcggaacagcggagtaaagcttttatgcagctcggtggccacatagttcagccattcgagagtctgatagcgcgcaatcgagcccaccggcgccagcagatgacgatccggcacctggtctgcgatgtactgcatgatggctacgccctcagtgagcaggatatcatcatccagcagcagcgccggcacctgacctttcgggttgatcagcagatagtcttccccgttttccagccgtttttgggccagatccacgctctgcagggtaaaatccagaccgctttcgcgcagggcaatatgcgaggcaagggaacaggcgccgggtttgtagaacagtttcatgcgtgactcctcgtggctgcagttttctgtatgttagtcctgccaggggtaaaaaaaaagccgctaaactaacgttagcggcttaaaaataattagttttccctgcggcgtcaggcagccgcggtttcgcgtgctttaatgtccgcgctgtcgtcctgagtcatacgattcagtttcggcgcggtcagcagcatcagggcggcgataaccgcggtgacgataccaatctgcaggaatacgtgaccgtacacttccagcgacaccagcggatcggtgacattctccgggactgccatcaggttagcgattttcccggcgatgatcgccgcgcctgccgtggtgaggaaccagctgcccatgatgaagcccatcagacgctgaggaaccagctgagcgaccatcgccaggccgaggccggaaatcatcagttcaccgatagactgcagcgcgtagctcagaatcagccagttgaccgagacgataccggcgtcgctggcgaacttcgcccctaaaggcaggacgaggaatgcgccagagcacagtaccataccgatagcaaatttgtgcggcatcggcaggcggtcacccatcttgttgtagatggcggccagaatcgggctaccaatcatgatccagaacgggttcagcgcctgatactgttccggttcaaaggcgagaccgaggatcgagtgctccacgttacggatggcgaagaagttcagcgaggtcggcatctggctgtacaacacgaagaagacaatcgcttctaccatcagcaggaaagcgacgatcattttacgacgcggagcgcctttcaggcctatggtttctttggcgaaaatcacgacgatacccagtgcgacgacgcccagcaccatacgtgcgataccctggttatgcagcagccgggtggcgatagcgaccagcaccaccacgccagcgatggtcgccagcagtttacccatgtgtaccggggcaaagtccggtttagagccgtactgtttaacccatttctgacagaaggcgaagttaataatggtgatcaccatccccaccacgctgagggcaaacgctacgctccagccaaaacgtgcggccagccacggggttgccagcatagagaagaacgaaccgatgttgatggacatgtagtacatggtaaatgcaccgtccagacgtgggtcgtttttgtcatagcaggtagaaagcagggaggacgggttggctttaaacaggccgttaccgacggcgatggtcgccatacccatatagacgatagcggcgtcatggccggaccaggccaccagcgcatagccaatcgccagcacgatagcgcccagcatgatgacacgcttggtacccagcactttatcacccagccagccgccaatggcgacgaggccataaaccagcgcgctaaaggaggagaacagagtaatggaatccgcttccgacatacccagctgttttaccaggtaaacggccatgatcccttgcaggccgtagtaaccaaaacgctcccacaactcgatcgagaaaatgagatagaacgcgcgtggttgtttgaaagcgttcagactcacgctttctgctggtttattgtttgcagtagacacatatacctctttttttacatcccatatttactggggggtgttcggggcgcaatctcgttggaccgccgcctttatagttattcttggagggaaaacggcaagtaatgttcactatcctggcgcatcaggcaaggcttttgtaataatctgttacacataatcagggtggtataatgctccagacatatgaatgttatacagcgttaaattttaccgtttcgatatcgttggtatttttatctttcgggttcgccggtttgccgtgaaaaggcgatatattctactgatctggcgtaagcatagtgatatggtccattatcttaaaaaatcatgggtcattatcctgacaatctttactcatccgttgtattgcctgacatttatttccattccagtaacattcaatcaacataaagttgcgagcatgatctggatcacaaatgcatagaaattttgcgctgataaaaaatgaatgaactagttgtttgttatataaccggataatcatccataatcatgatgattatgtggtgttaatggccggtgaaatagatgaatgcgggccataacccagagttaagctatgaccgcaatagagacgagacagtcaggcgtagactttatctttgtattcgcaaagatcttcaatcaggcaggagccgcagcgcggcttgcgggcaatacaggtataacgcccatgcaggatcagccagtgatggcagtcgaccttaaactcggcggggaccaccttcagaagcttctcttcaacctgttcgacgtttttcccgggagcgaattgcgtccgattgcagacgcggaagatgtgcgtgtccacggcgatggtcggccagccaaaggcggtattcagcaccacgttggcggttttacggcccacgccgggcagcgcctccagcgccgctctgtcttccggcacctcgccattgtgctgctccaacaggatgcggcaggttttgatgacgttttccgctttgctgttaaacaggccgatagtcttgatatacgatttcaccccatccacccccatggccagcatcgctgcgggcgtattggccaccggatagagtttggctgtcgctttgttgacgcttacgtcggtggcctgcgcagaaagcaggacggcaatcagcagctcgaatggcgaactgaaatgcagttcggtggtggggtggggatcgttttcccgcagcctggtaaggatcgccaggcgtttggctttgttcatattatgctttccctgtcacgtcggacggggcgacagagacggcccgggccgcttgcgccttccgctgtttgctacgttcatcgataaggtatttaatcgccagcatcatgccgaggccaataaaggcgcctggcggcagcatagccagcaggaaaggggtgtccgtatggaaaacctcgatgcgcagcacctttgcccagctgccaagcaggctgtcggcgccgtcaaacagcgtgccattgccaaggatctcgcgtagggagcccagcacgaacatcgcgccggtggcccccataccgatagagaaaccgtccagcgccgacagcgccggcccttttttggcggcaaaggcttctgcacggcctaccacgatgcagttggtgacgataagcgggataaatatccccagcgactgatacagaccgaacgcataagcgttgattagcatctgcaccacgctcactaccgaggcgatgatcatcacgtaaatcgggatgcggatctccgccggggtccagcggcgcaggctggagatggtcaggttggtcagggtcagcaccagggtggtggccaaacccagcccgagggcgttggtggcggtcgaggtgaccgccagcagaggacacatacctaacagctgaaccagggcggagttatttttccacaggccctggacgatgacgtctttaacttcgctcatggttattctccacaggcggtgaattcaggaagttgcgcaggcagcgtttgtgcatataagcctgcgcgcttaacggcattgaccaccgcccggggggtgatggtggcgccggtgaactggtcaaaatcgccgccatcctttttgaccgcccagtggctatcgccctggccgtggatgactttcccggcaaaatgggtaatccagtccgacaggcgaagttcgattttatcccccaggcccggcgtttcatgatgctcagttacgcgggtgccgaggaccgtgccgctaaaatcggcggcaaccagcagctgtattgctccggagtagccgtccggcgcagtggcttccatcaccgcgccgatcggtcgatcgttatttttggcgatccacactttatgctggcctttgcccagcgccggggcgctgaccagatagcagctcttaagcagatcgttattatagcggtcggcaggtaaaacctggtcgaataacgccttttgctgcagggccgcctgctggtcgatggtgcttttggtcagctcattgatcgccgccgtcagcccggtggaaccggcggcaaacagcgccagcgtgacgccgtgtttacgcatcgtttttaacatcattgctctctcaacggtggccatatacgcgcgggcgcgtgtagtaatcgatcagcggcacggtaatattcgccagcagaacggcaaacgccacgccgtccggataaccaccgaagctgcggatgagccagaccagcaggccagcgagggcgccaaagatcagacggccgcggttggttgttgaggccgtcaccggatcggtcaggataaagaaggcgccaagcatggtcgccccggagagcaaatgcatctgcggtgaggccaggctctgcggcgaaaaaacccagccgagggtggcgcacaggccgaggctaacaaggaagctgaccgggatatgccagcggatcgccttctgccacagcaggaaaaggccgcctgccagccaggcgatattcacccactgccagcccagacctgccagcacgccgccgtagaccggcaattgcagcacctgctgaacgctatgtccggcatgcagggaggttttaaaggtatccagcggggtggcctggctgacgccgtcgatacccagccgcagactggccatgtcgcctccggcggcggtatggctggtgaagatcatctgcagcgcgtcgctgaatgccgggatatgggcggctatctcataggaaggcagccaggaggtcatctgcaccgggaacgaaatcagcagcacgacatagccgatcattgccgggttgaaggggttatggcccaggcctccgtacaactgcttggcaatgactacggcaaaggcagtgccgagcaccaccatccaccacggggccagtggcggaatactcaccgccagcagcaggccggtgagcagggcggaattatctttcagcgtggcagcaacaggctgtttacgcagtttgagaatagcggcttcggtcgcccaggccgtcagggcggcgaggacaatctgcagtacggtgccccagccgaaaaaccaggtctggaccacaatgccaggcacagcggcgagcagcaccagcagcataatacgcgaggtctgccgctggttatgggtatagggggagcttgcgattctgaaaaccatttattcctcgttaactgcctgctgtgttgctttacgcgcctgaacgcgggcgatagccgcggcgacggccgctttgcgcgggtcgtcattggctgcggctgacgcgagatcctgttgtgtggcctgctgttcggctttacgcgctttggcgcgggcgatggcggcttccaccgccgccttgcgcgggtcgaccggttcggcggccggggcttccaccggcgcggcctgctgctgcgctttacgcgcccgggcctcagccttacgcgcttcgcgggcggcaatcgcctcgctgttgtcaggtttggcgccggcctggatcacgatcggctgcgcggcatcgcgctgtttatcccgtacccgggccagggcggcgctaatcgcctcctgatctttggcggcaggctgaacggcggcttttttatgccgctcggcgcgcgcggctttctcacgctccaggcgcgcctgtcgggcctcgaatcgggctttggcttccgcagcgcgctgctcttcctgacgaatcgccgctatctcggccttttcctgacggaagtactgcaccagcggaatattacttggacatacccacgcgcaggcgccgcactcgatgcagtccgccagattatgggcagtggctttatcgtgctgctgacctttgctgaaccagtacagctgctgcggcagcagatcggccgggcaggcgtcagcgcaggcgctgcagcgaatgcagcctttctcttcctgcggttcgcccatctcgctggcggaaggcgccagcaaacagttggtgatcttcaccaccgggacgtcgagccacggcagggtaaagcccatcagcgggccgcccatgatcaccattggctcggcgctggggcagaagccggcatcgttcaatagatggcgcaccggcgtgccaagacgcgcccagacattgcccggtctggttaccgcttcgccggtgagggtgaccacgcgctcggttaacggctcaccgtcaaccaccgcgcgtttcaccgcataagccgtaccgacgttctgcatcagcacgccaatgtccgatgaacgaccgccgtgcggtacctgtttgccggtgagaatttgggtgagctgcttggcgccaccggagggatatttggtggggatcacgcgcagcgaaatgccatgggcgtcgcagagcaccgcccgcagcattgagatggcctgcggcttattgtcttcaatgccgatcagcacttcttcaggctgcagtatatgagcgaggatgcggataccctcgacaatctgcgccgcgcagtcctgcatcaggcggtcatccgccgtgatatagggctcgcactcggcggcgttaatgatcagcgttttaattttatctccgccaccgcgcagtttactgccggtggggaagcctgcgccgccgaggccagcaacgccaaactggtggatacgctcgatcagcgcttcacgcgtgcgggtctgatagtcgctccagccatcgcgctcgatccagcggtcttcgccgtcggcgtcaatgatcacgctcatctccgccagagccgacgggtgcgcggtagtgtgcggagcgatggcggcaatggtgccggaagtcggggcgtgaacgggcagcattcttccccagccgcgggtcagcggctggccgcgcagcacccggtcgcccactttaacgcacagttcgccctcggcgccaatgtgctgcttcaacgggataacaaagcgctgcggcagggaaacctgacgcagcggggtgccgttagactgggttttcatttcaggcgggtgaataccgccgttgaaatcccagaccttgtcttttcggaaagcggaaaatagcttaaacatgttgttccacaggaatatttcgcaccgggatcgtatgcagatcccatttccaggtctccggggtggtggccaccggaacgagtgaaatgcactgggtcgggcagggggcgacgcacaaattgcagccggtgcacaggtcgctcatcacggtatgcatggcgcgggtcgccccaacgatggcatccaccggacaggcctggatacacttggtacagccaatgcagttcggctcgtcaattaccgcgagcatgcgggccggctccgcttcctgtgcgtcgccgtcgacaggctgcgggtcgacgttcagcaaggcggcgatttttaacatcaccgcttcgccacccggcgcgcagcggtttattttctcaccctgtacgccgactgcttccgcataggggcgacacccagggtacccgcactgcccacactggctctgcggcaatagctcatcaattttttccaccaccgggtcgtcctgcaccgcgaaacgacgcgaggcgtatcccagtattaagccgaaaatcagccctaacaggctgatggcgatcacggctatccagactgcgctcattacaacttcaccaaaccactaaagcccatgaaggccagagacattaaaccggcggtaatcagcgcgatggcattaccgcgaaacggcgcggggacatcggccaccaccaggcgttcacggatcgccgcgaacagcaccattaccagcgagaagccgacggcggcggcaaagccgtacagcgccgactgcaggaaattgtggcccagattaatattcagcagcgctaccccgagtacggcacagttggtggtgatcagcggtagaaagatccccagcaggcgatagagcgccgggctggttttacgcaccaccatctcagtaaactgaaccaccacggcgataaccagaataaaggccagggtacgcaaataaaccaaatttagcgggataaggatccaggtatcaatcagccaggcgcaaatagaggccagggtcatcacgaaggtggtagcgagccccatccccattgcggtttccagctttttggaaacccccataaacgggcacagaccaagaaacttcaccagaacgaagttattgaccaggactgtaccaataaagagcagtaaataatcagccatcatgcgacctgaaacgaaaaaaagccgcttattatcgaataaaacgataccagcgacaacaggttaagtgtgggggtattacggattaacaaaagtccgttttacccgctgcgaacggcgaaaatagggcgccagcagcgcagcggccagcagcggaaacagcagctgacgcagggcaagcacatccgagaccggcgagaaggcaaaagcctttatcgccagcagcagggtgatgagcagccagataatatagtgtttcggcaccaccgagcgccgcttgaaaaaggcgatagtcagccagagcgtgtaataccacatggcgagtgcaaacagcagcgaggcgacccacagcgccatatggcccgcgctcatggcgcgcagtagggtataggtctgcggcgacatcagcgcattagcaaaaaacagcagcgataacgaggcgctcagcagcgccaccagcaaccaggccagcggagccagcagccatccgccgatgcgctctgcagattgagacgtcatgtttctcccctattcaacgccagtgaataaaatcaggccgggaagtataagcaactggcgtgaaggatgacagccttactgcacgaatcgccaaacggatttaggaacctggcccacatcgaacaatttaccaccggagaccagctctgcgcgacgatgatcggcggcgcgatacatattcacgatctcctgggtgtcagtcagggagtagttaaggtgatcaaatagtttttcaaggctttccagcgaactgattttgcgaaattttaataagtagtccagcacggtcattttcgtatccattttataatcggaattattgcgttgaatattatcagcattcactaaacctactctcaaccaacggcgccttctgctggggccgcgtggaatgaatcaggttatataaacccatgacaaggggcaaagccagccttgaagagcagggagaagtttaagaatattctaaaatcagaccgggcgccgaatggcgcccgcaagagaagattaacgctgttcgccgtgactggcaataacagatttgtaccaataaaaactcttctttcgtttccgcgccagattttgctggtgatcgacatagacaaaaccatattgcttttgatagccgttgagccagctcagcagatcgataaatgaccaggggtaatagccgcgcacatctgcccccagcgccagcgctttttcgagggcgctaatatggctgctgagataatcaatccgcgggtcgtcgaccacttccccgtcaataatcgggtccttcgcgccgaggccattctcggtgatatatatcggaatatcgccatagcgcgccttaatcatcataatgccgtcagttagcccctgcggccagatttcccagccccattcggtatatgtactctggggattacgcacgaaatagaataatccctccacgccaggctcgccgccggtagcgatctcaggcggctgggcagataccgtttcccggcgatagtaattcagaccgataaagtcgcagcggttgtcacggagcagcgcgtcgtcgcctggagcaaagcgaggtaccccccacagcgcctgggtctgcgccagcaggtcggcaggataggtgcctttcagcaccggatcgtacagccagtgagtatggatggcgtcagccagttcggtggccttaatgtccgcctcgctgtcggtgagcggggtatgcggttgcagtacgttgacgaagccaatctcgccggccacagccatctcgcgaaaggccttcaccgccagcgcatgggcgacaaacacgtggtggcaggcctgaatggcacgcgccggatcgcggaccgccgggggatggaggccgttaatgtagccgtgcccaatgaagacaatggtttcgttgaaggtagcccacagcttcacccgtgaaccaaagcgcgcatagcacaggcgggcgtactcggcgaaggcctcggcggtagtgcgcgcttcccagccgccctcatcctgcagggcctgcggcagatcccagtgatagagggtgatcatcggctcaatattgtgcgccagcagttcgtcgatcagatcgctgtaaaactggactcccgcttcattcaccttaccgcgcccggcgggcagcaggcggggccaggagatggagaatcgatagctttgcaggcccatctcggccattaacgccacgtcttcgcgaaaacggtgatagtggtcgacggcaatatcgccggtggtgccttcaaaggtggtacccggcagatgagagtagatatcccagattgacggtcctttaccgtcggcgtcgtgtcctccctcaacctgatacgctgcggtagcggcaccccataagaaattgtgcggaaaagcggccatgaaaaagctccctgtctgatgataaagggagtgtaataaaaccgcgaacatatgtgcaaccggtttctgaaaccggttgcacagttgcgaggcgggtcactgttttaacgcggagctacttcgtgtgcaccacatccgctggcggtggggactgatagttatctatatggtgtgcgataaccaaaagcagtgccgaaataccaaaaacaatccagccaataagttctacaatacgggtaaaaacagttgtcataacacttcaatatcctttgaacacagcgtgaaatgttactcgatggtcagcagatcacaaggggtatctgtctgatttctcacacttgcatgtaagtcgcaaagtaaggaatgataagttttgctcacggtttgtaaaattattctcattaacctggtgttgatatcagttgcataagcgaggcggtaagatgagcgatgcgatccgggtggggctggtggggttcggttacgccagcaaaacgtttcatgcgccgttgatcggcggcacgccgggtatggcgctgaaggcggtcgccagcagcgacgccgataaggtccatgccgattggcctggcgtgaaggtaatgagtgcgccgggggatctgctggacgacccggatatcgatctggtggtcatcgccaccccgaacgacacccactttccgctggcgaaagcggcgctggaggcgggaaagcatgttgtggtggataagccctttaccgtgacactgtcacaagctcgcgagctggaaagcctggcgaagcactgcggtcggatactttcggtgtttcataaccggcgctgggacagcgatttcttaacggtcagcgcgttaatcaacgaaggtcagctgggggaggtgtgttacttcgagtcgcatttcgatcgcttccgaccacaggtgcgccagcgctggcgtgagcaggcgggtcctggcagcggcatatggtatgacctcgcgccgcatctgctcgaccaggtcgtggtgctgtttggcctgccggtaagcatcacggtggacctcgcgcagcttcggcccggcgcgcaatccaccgactattttcacgccgtgctggcctatccgcagcggcgggtagtactgcatggtacgttactcgccgccgcggagagcgcgcgctttatcgtccacggctcgcgggccagctatattaagtacggtcttgacccgcaggaggagcggctaaaaaacggtgaacggctgccgcaggaggactggggatatgatatgcgcgacggtaccctgacccgcgccgaaggggatgaacgtagtcaggagaaatggctgacgctaccgggtaattatcccgcctactatgccgctatccgcgacgcccttaacggcgtaggggaaaacccggtcccggccagcgaggcgattcagataatgaccctgattgagttgggtatcgagtcggccagacatcgcgccacgctcagcctggtctgaggaggagcccggcagcacggctgccgggccggttatcagcctttggcaacccgctgaatgagggcggctttttcctgttcgccgaggaacgccagggtcaggccgttgatctgcgcctgacggatctgctcccggctcagccctgccgccggcgccgccacggtatactcgtgaatgatgtccacaccctggaccgccggatcgtcagtgttgaggctcgccagcacgccgtgctcaaggaactgcttcagcggatgctgggccagggaggccacggtgctggtttgcacgttcgaggtcaggcaggattcaatcccgatgcggtgctcggccaggtagtccatcagggctggatcctctaccgctttaaccccatggccgatgcgctccgcgcccagctcacgaatggcctgccagatactttccgggccggccgcttcgcccgcgtggacggtgatatgccacccggcgtcgcgagcctggttaaaatggttgcggaacagcgtacccgggaagccgagctcatcgccggcgaggtcgagggcagtgatgccctcgcggtgggcgagcagcgccgccagctcttcctgacaggcggcttcgccgaaggtgcggctcagaataccgatcagccgggcgtcgacctggaaatcgcggcatccctcttgaaccccggcaattaccgcctctaccacgccgtcgaccggcagccggtgggtcatcgccatatagcggggagagaagcgcagctcaacgtagtgcaggccatttcgcgccgcgtcttcgacgttctcatacgccacgcggcgacaggcttccagcgaggccaggacctttaccccccagtcgagcttggcgaggaaactaaccagatcgggctcaaggctggtgacctggacatgaggacgcagcgtgtcgagggtggttgcgggaagagcgatattaaattcgcggccaagatcgaggatggtttgggcccggatgttaccgtcaagatgacgatgaatgtcggttaatggcaatgaggaatcaatcatggtcgcactctttttttagttaaagtgcacgtcattatacaacatgaacataactgtttaaaagcattgaaaaaatgtatgcgatacaaatagctggcagcaatcaggtcagcattacggtctttttgactggcccctttaaaacgcagaacgaatatcatgattgacgcgatcctgaccagatcagaaatgcacacgcgctgaccgcggcgcccgcaaggcagaccgcctgccatccccagtgggaataaagctgtgtggcaacgatagcccctgtcgcgctgcccagcgaataaaaacacatgtaagccccaaccaggcggcttgccgctgcaggcctggcggcaatgatcaggctctggctggagacatgaacggcctgtaccgcaaagtccagcgcaatgacgccagctatcagccaaagcagagaggtttcggcatagccgataggaagccatgagatggtcagcagcgccagcgccaggccggtagtgcgctgagcccatccctggtcagcccacttgcccgctctggcggcggccagcatgccagcgaagccggctaagccaaacatccccgtctgggtgtgcgagagggaaagggcggtgagcggcatgaccatggtcgtccatagcatgctgaaagcggcgaagataaatagcgccaggatcccgcgctttctcagttgcggctcggtgaggtacagctgaaacacggacttcaataaggaaaggtaagtcggcttttgcggctgcggctgctgcgggggcgaaggcatgattttccagacgacccctgcaatcaccaacatcagacaggcagccgtgagatacacggctcgccagccggcgatatcggctatcgcgcctgagataaaccgagataacaggatacctgaaacaatgccgctggtcagggtacccaccgcctggcctcgtttctgcggcgtcgccagtactgccacccaggccaccagcacctgcaccaccacggccatcaggccgacgatcagcatggcgccaagcagcgttgctatattgggggataaccctgccgcgactaacgccgctactgaaagcaacagttgactcatcaccacgtatttacggttcaacccgtccccgagcggaaccaggaacagcaagccaatggcatagcccgcctgcgtagcggtgatgacgctgccaatcatgcctggcgacaccttcaggctgaccgccatcgagtcgagtaaaggctgtgctgaataaacattggctactgccagcgcgcaggttagtgaaaacaacgccgttatccctgtggtcagcatcgtgtcagggactgacgcagtttggatcctttggccggtacatctacttgccttacatttcataagagaccctctgtctggttgctttttaaaactagtgtacctatagaattagccttgctggtttttttttgcaactggtaaaggtgaggattaagctagatcagtagataaattgataaggagcgcgcagatggcaaagcaggaatcacttagaaccagtgagtgtccggtggcgagaacgttggaatcaattggtgaacgctggtgcctgatgattatccgcgaagcatttgacgatgtgcggagattcagcgagtttcaaaaaaatttggggctggccaaaaatatccttgcctcgcggctgaagcatctggttgatatcggtattttcgagattttaccggcatcggatggcagcgcatacaaggaatatgtcctgactgaaaaggggcgctccgtgtttcccattgttgtggcgctgcggcaatggggagagcgttatatgtttgagcaaggggaaacctattcggtcctgctggataacgcgcacggccagccccttcagtatctggatgtgcgttccgctcagggggataaactgcaaccaggcgactgtcatcgccggcgcattgtgtcagatacccgcgccgaataatggcgtgaagaatttgcaggataccagcgagaatacgagcgtaccgctaaagggtcatggaacaatcctgacgtgtttttttgcgaactgcttttgatgccaaagctccggacgcgtgaaagtgacccaccgccaaccgcaggaggcggtgcataaccatttacaattatattttatttgaatgtattcatgttacatattaaattctgcttactttatcgacgatgaggcaaggatgcggatgtggagagcgtaatccataacaatattgagggttttctgctgttgttattaagcatgtggccgattctgctggtggtattcattggcgtcgcaatttcattctataccatgctgttacgcaagacggcgctggcctgcctgcttttcgccctcgccatcggcgccgcaggctggagtctcgcttagccgctggcctcagggtttatccagcaggctcatactggaggtggcggcgccatcattcagattggcgggcgaaggccagtcgcgacccgccagcgcactgtcgctctgtccgctgccgacgccttgctgcgtcgacagctatgaaccttccagtgcttcatccgcccctgaccgatcgggcagggaactggtatagccgccattattcgagtacgtatccatgccgttgacttcgttaggcaccgtgtcggtagtcgtaccgtcatcgttaatgcaaaaagagccgccaatgccgtttggctgacagtctgcagcaaaagccggactggccagcgcggtcagtagcaataacggtaagccgatttccttcattcttatctcccagggccgtgtggtctgccagacattctgtactatagcggcggcagtagcgcggtaagtaacaaaactgtgtaattttgtaatgaccggtggacggtttgtcgttcggccaggaaagagcgtgcgttaagcgtggcatagcggctcggcagaaagcggtaatcaattgttaattctacgtaaaggttaatgaaaatttaagggaacgccgctatgttggcagcatcatactttccataaaggatatgccatgcgcgataaatattccggcctgcagattgggattcactggctggtttttttgctggtagtagtagcctatgcggcgatggagctgcgcgggttttttccccgcagtgagcggccattgattaatatggtgcatgtttcctgcgggatcaccattttcgtgctgatggtggcgcgtctgctggtgcggctgaaatcgccggcgccgccgatcgtaccgaaaccatcgccgatgatgaccggtttcgcccatcttggtcacctggcgatctatttgctgttcattgccttgccgttgatcggcatggtgatgatgtactggcgcggtaacccctggtatgcctttggtctgaccatgccgtatgccccgcagagcgattttgagcgggtggataccctgaaggcgatccatgaatggttggccaatgccgggtactttgtgattggcctgcatgctctcgccgcgctgctccatcattactggtggaaggataatactctgctgcgaatgatgcctcgtaagcgctaaatcatcctctttcacttcctgaccccgtcccgcgacggggtttttttttgccttcaccgttaatagaatatagtatacccccctatatgatacggaggcgtaatcgtgccacattcacctgaagataaaaaacgggcgctcagccgcgtaagacgcatccgcggccaggtcgaagcccttgagcgcgcgctggagtccggcgagccctgtatgactattctgcagcagatcgcctcgattcgcggggcggcgaacggcctgatgggcgaaatggtggagatccacctgcaggacgagctggtcagcggcgacaccacccctgagcagcgggccgcgagaatggcagaggtcggtcatctgctacgatcctatttaaaataacatcacgacgaggaagagacagttatgaaatcacgcgcagcagtggccttcggccccggtcagccgttaaaaatcgttgagatcgacgtcgcgccgccgaaaaaaggcgaagttctggtgaaaatcacccacaccggggtgtgtcataccgatgccttcaccctctccggtgacgatccggaaggtgtcttcccggcggtgctgggccatgagggcggcgggattgtcgtggaagtaggcgagggcgtcaccagccttaagccgggcgatcacgtcattccgctgtataccgccgaatggggcgagtgcaaattctgtaagtcgggtaaaaccaacctctgtcaggcggtgcgtgccacccagggtaaaggactgatgccggacggcaccactcgtttctcgtacaatggcgaaccgatctatcactatatgggcaccagcactttcagcgaatatacggtttgcgccgagatttcgctggcgaaagtcaatccgcaggcgcctttggataaagtgtgcctgctgggctgcggcgtaaccaccggtatcggcgcggtgcataacacggcgaaggtcaaggccggggatagcgtcgcggtctttggtctgggcggcattggtctggcggtgatccagggcgcggtgcaggcgcaggccgggcgcattctggcggttgataccaacccggataaattcactctcgctaaagagatgggcgcgaccgattttatcaatccgaacgactacgataagccgattcaggatgtgattgttgagctgaccgacggcggggtggatttcagcttcgagtgcatcggcaatgtaaatgtgatgcgcgcggcgctggagtgctgccataaaggctggggtgagagcgtgatcatcggtgtagccggcgccgggcaggagatcaagacccgtccgttccagctggtgaccggccgcgtgtggcgcggttccgccttcggcggcgtaaaagggcgcagtcagctgccgggcatggtggaagacgccatggcgggtaaaattcgcctcgatccgtttattacccatcgcctgccgctggagcagattaacgaggcctttgatctgatgcatgaaggtaaatcgattcgcaccgtgatccactttggcgaccagtaatcgccgacgctgaaggcgaatcgtcacccataaaaaagggcccggatgggcccttttgtgtatgtcgatcagtgatggtctgggagcgcgtaggcgatgatgtaatcgccgcgatccggtgactggcgggcgccgccggcattgataatgatgtactgcttaccggttttcggtgagacgtaggtcatcgggccggactggctgccgaccggcagacgcgatttccagatctctttgccgttcgcggtatcaaaggcgcgcaggtagaaatcctgggtgccggcgaagaacagcagtccggactgcgttgccagcgatgcgccaagggtcggcatgccgattggaattggcatgtgcatacgtatgcccagcggcccggtgtcttctacggtgccaactggcacctgccacaccagtttcccggttttcagatctaccgcggacatggtgccgaacggcggcttctggcacggaatgcccagcggcgacaggaaacgttcgcgcatcgcgccaaacggcgtgccctccatcggcacgatgcccatctcgatcccgctggcgtctttcgccaccttcgcgcgcggcaccatatagttggccaggcccagacgcatatcgttgacaaacatcaggctgttgtttggatccagcgaaacactgccccagttcatgccgccgagcgagcccgggaactgcagggaacgatcttcacctggcggggtaaagacgccctgatggcgcatctctttgaactgaatacggcacagcagcaggtcgatcggtgtcgctccccacatatcggactcggtcaacgtctggttgccgatcatcggcatccctaccgagtaaggttgcgtcggcgagtagcgttcacctttgacgttgcccgccggcaccggacgctcttccactttggccaccggctcgccggtctcgcggttgagcataaagatcatgccctgcttgctggtctgcaccagcaccggggtggtgccgcccttgccgtcaggcagatcgtacagcagcggctgagacggcaggtcaaagtcccacagatcgtggtgtgtggtctggaagtgccagcgcacctggccggtggtggcatccacggccacgatagaggagctgtatttatcgtccagcgcggtacgttcgccgccaaagaaatctggcgtggcgttgccggtgggcagatagatcagattcagcttcgcgtcataggacatcgccgaccagacgtttggcgtaccgcgcgtgtaggtctggccttccggcggaacaccggtcagcgctggattgcccggatcccacgcccacgccagtttgccggtgtggacatcaaacgcgcggaccacgcccggcggttcgccggtggagtagttatccgcgacgcggccgcccaccaccaccacattgcccgccaccagcggggtggaggtctgctgatagtaacccgctttcacttcacccatgccgacgctgaggtcgacaataccgcgatcgccgaagctttcgcacagtttgccggtatcggcatcaatggcgatcaggcgggcgtcgatggtcggcaggaacagacgacgggaacaggcggccggctgcgtgcctgacgcttgcgcggtttgcgcctggctatctgcgtaataccctaagccgcggcagcgctgccagttgggtgaagaggatttggagtcatagcgccatttctcttttccgctgtccacatccagcgccagcactttactgtaaggggtacagacatagagagtatcgccaatctgcagcggggtgttctgatcttccgcgccggagccgttgctctgcgggatatcgccagtatgcgctacccaggcaacctgcagctggttgacgttttgtttgttgatttggtcgagggcggcgaaacggtcgccgtgggtggtgttaccccagtgcgcccagtttttctgctgttcgcctggcgcgacgggcttgactggtaccgcttcagtcgcgctgaccagcggtgcggatttgaacatccagccaaagctcaccgccagcgccacggcgagaacggcggcgacgccataggccgggccttttttcgccggtgggctggcgaggaaaggccagaccagggcggccaggaaggccagtacgccgagcgcaaacaggcgcgagaagagcggccagtagttccagccagcgtcactaatcgcccagatcaccgaggcgataaacgccacggcgtataacagaataccgccgcggcggttgcggaaaatcaacaccgccgcgatgaccatgaccacgcccatcagcgcgaagtacagtgtaccgccgacgagggccagttttgccccaagaatacccacagccagaccgatgatgagcatcagtccggcgagaagccactgcaggatccgggggaatccgcgcggcgcgttgccagttgccatgtaatctccttaaccacaccagccacctcactgtgaaccaaatgaaacatgttgcttttgaatcatttttgaatgaagtggttttaaccttcataaaactgtatttgttgcttgattagatttcgagtgaaccatttggtgaaatcgagacatgatagatctgttaaagaagtttgcgcaaatgttaataaataatttcgcactaaatgattattttgccgaatatgtctaacgtcatggggagcggcgtcggcgcgtttgcaggttccccggccgctgcgggccggggagaaaggggggtcaggcaggcatggacttacggatagcgctgagcagcgtctgcgtacccggggtcagtgtcgcatcgacgcgggttaaaatgccgatgggctctccggcgccctgggtggcgatcggcagggcggttagcacgccacggcgaagatcgtcttttaccgccccggaagggacaaaccagacatagtcaaaatccaccgtcagctggcgcgacagggaggcggagagggtctcgatgcagccggcgggcatcttacagccctggctctggagcagcgcttcggcgttttgccgcggcacggtgcctttaggtgagaccaccaccggccactccatcacccgactaagggtcaccgtctcctgaagcaggggatgtcccgggcgaaccaccagcttcagggattcaaggaacaacagttcgtaatgcagcccgctcatcagctccgggtcggacatacgtccaatgccgatgtcgatctccccggattttaagccggcgagcagcatggtgttgttcatagtggcgacctgcagcgtgatatctttttgctgcttgtgaaactggccgatcaccgtcggcaggatccccagcgcggcggtgggcagcgcgccgatgcgcacgatatcgttattcaggccctctttgcggttcagcgcctggccggccgaattaagggcgtcaagcaccttaacggcatgcgtcagaaactgttcgccgaccagggttagctgcgccccaagacgaccccgctcgaacagccgggtaccggtcagctgttctagctcgttaagcgttttcgagagtgctggctggctcagatttaatgtttcagccgcgcgccccagcgttccctgttgagcgacggccacgaaggtgtgtagatggcgcaagcgaatgcgctgactgaagagaccatttttttccatagtaagatgatgttaaaaacacagcggtgaaagagacaagcggacttgtttaaatttgataaccagatagcaaaatattattaacatttgggttggttacatgacaagatctttccctgtggttgaaaacgccttcgccccgcagaaacggggcgaaggtggtggtcaccgcgacggctaaatatcgaaaaagacggtttcgttctcgccctgcagatgaatgtcaaaacgatagaccacttccgtaccgcgaacctcgcgctcggcgattaaggttttgcgtctcacctcccactcgatgagattcagcaccgggtcgctggcgttggcctcgtgttcatcggcaaagtacatccgcgtattaaggccaatattgatcccccgcgccaccacccacaggttgacgtgcggcgccatcagccggccatcccgaccgaccaccgggcccggcttgatggtttcaaagcgccaaatgccggaggtgaaatcagagcaggtacgcccccagccgcggaaggccgggtcgacggctttctgctgttgacgatcgtcaggatggttatagcgacccgcggcgttggcctgccagatctccagcagcacatcgcggaccggcgtcccggagccgtcgataacccggccttcaatggtgatgcgctccccggcggtatcggcggtagtgaggaccgggccaaaatttttctcaaaaatatgaaagcctgcggcgtccggcgccaggccgatatgaacatagggtcccgccgtctgcgaggcggtttcaggcagatactctttcatcgggcggccccctgagtgcgattttcaaacagcgtggcgcggtggccgcgcagaacaaggtcgaagcggtaggccagacaatccagcggtacggcggcgtgcatgtccagctcggcgatcagcgtgcgcacggcgtcgtcattattaatagtcctgacgatcgggcactgcttaatcaacgggtcgccttcaaaatacatctgggtgatcaggcgctgggcccaggcgtcgcccgagagagaaaaatggatatgcgccggacgccagtcgctggcctggttgcgccaggggtaggggccgggtttgatggtgcgaaaacagtaatagccgttttcatcggtaagcacccggccgcaaccgccaaaattcgggtcaatcggcgccagatactgatcttttttatgccggtagcgaccgccagcattggcttgccagacttccaccagcgtatttttcatcggtcggccgaatccatcgcgcacgtaaccgtggacgatgatccgctcgccgataggcaggccttctttggcatagttcaggattaggtcattatccagagggcccaggtcgtcgcggctaaataccgggccggtgatctctgacagcgagttctgcagagagatgagggcgttttttggcgagcgcaggacgctggttttatagcccggcgcgtaagcgggcgggtggctactgtaatcgcgatggacaacctcacgtggggaccatttgtcgttcatagggtactccgtgtagacggtagaggggcatattgttgtaatgtcgccagaagcagtgtgtgtaaatgtattgttaatttaaagtgaaattacagggtgtttttcataactatgggttatgttttgcgcaatgacctggaccggcggcaggttatcgccatcacagtttgtaaattcttccccccgccgcgaggcagctttcctacactccaggaagtattcactggaggtaacacatcatggcgaacaccatcacggctgatgagattcgggagcacttttcgcaggccatgtcggccatgtaccagcaggaagttccgcagtacggaacgctgctggagctggtggctgacgtcaacctggcggtactggaaaataatccgcagctgcatgaacagctcgctaacgctgacgagctggcgcgcttaaacgtggagcgccacggcgcgattcgcgtgggcacagcggaagaactggcgacgctccgtcgcatgtttgccatcatggggatgtatcccgttagctattacgatctctcgcaggccggcgtgccggtccactccacggcgtttcgtcccatcgacgatgccgcgctggcgcgcaatccatttcggattttcacctcgctgctgcgcctggagctgattgaaaatcgcgccctgcgcgagcgggccgaggcgatcctcgcgcggcgcaaaatcttcaccccccgctgcctggcgctgattgcgcagtatgaagcagagggcgaattcacctctgccgacgcgcgcgagtttgtccaggaggcgctggagacgttccgctggcaccggcaagccaccgtcgatgaggagacttaccatgctctgcatcgcgagcaccgcctgattgccgatgtggtctgtttcccggggtgtcatatcaaccatctcacgccgcggacgctggatattgaccgcgtccagtccctgatgccggagtgcggtattgaacccaaagcgttgattgaagggccaccgcgccgggaggtcccgatcctcctgcggcagaccagctttaaggcgcttgaggagccggtgatgttcgccggagaacaccgaggcacccatagcgcccgctttggcgaaattgagcagcggggcgtggcgctgacgccgaaagggcgcgcgctgtacgatcggctgctgcaggcggcaggaaccgggaaagataatctcagccaccagcagcatctacaggaggtgtttagcgaatttcccgacagcgaatttctgctccgtcagcaggggctggcctggtttcgctaccgcctgacgcccacgggtgaggcacatcgccaggcgtttcgcccgggcgacgatccgcagccgctgattgagcgcgggtgggtggtcgcccagccgattatttatgaagattttttaccggtcagcgcggcgggcatttttcagtccaatctgggcaacgaaacccaggcgcgcagccacgggaacgccagtcgcgaggcgtttgaggcagctctgggctgcccggtgcaggatgagtttgaactataccgacaggcggaggagcgcagcaaacgacgttgcggtctgctgtaaaatcagtaccctgctggcatcagccttacagggagcaggttatgcaacatccgtcgaaaccgttggcgaaaacccgtcagggaacgcttgccgggagcgcagaacaggggattcatatctggcgcggcattccgtacgccgcgccgcccgtgggcccgctgcgctggcgcgcgccgcagccagccgcccgctggcagggggtacgtccagctgagaccttttccgccgccagctggcaggacattgactactgccgcgagctcggcggcggcgatcctggcgccttcagcgaagactgcttatatctcaacgtctgggccccggccagcgcagcgcagccgctgccggtgatggtctggctgcacggcggcgggtttaccatcggcgccggcagcctgccgccttacgatggcaaagcgcttgccagccgcgacgtggtggtggtgacagttaactaccggctgggccatctcggttttttcgcccatccggcgctggaacaagaggcgggcgaacgtctctataatttcgcgttgctcgatcagattgccgctctgcagtgggttcaggagaatatccacgccttcggcggggatgccgccaacgtcacgctgtttggcgaatccgccggggcgcgcagcgtgctgtcgctaatggcctccccgaaagcgaaagggctgtttcataaagcgattattcagagcgggtatacgctacccgatctgccgcgggaaaaagcgctggaaaaagggcgcctgctggcggaacacttcgccttaccgcaagccagcgctgaggaattgcgggcgatcccggcggaggccttctggtcgctcaccgcgccgctgaataccgggccagcgcctattgccggagacgcggtgctgccgcagccgatgctggagaccttctttgccggccgccagcatccgataccggtgatgatcggctccaatagcgatgaagccagcgtgatggccgtgttcggcgtcgatattgccgggcagatccagaagctgcgccgagagcgccgtctggggctggggctgatcaaactcctctatcccggcgtgaagggcgatgaagcgctggggcgggaagtatgccgcgacatggccttcaccacccttggttatgtagtgatgcaggcgcaacagcgcgtgggtcagccgtgctggcgctactggtttgattatgtcgcggaagcggagcatgacgcctacccgcatggggcctggcatggcaacgaggtgccctacgtgtttgataacctgcggttgaccgacccggtgcggcagtacgccagcgaagcggatctggccttcgccgctcaggtcgctgactactgggcgcagtttgcccgcctcgccagcggcgagcagacgctttccggcgcggtgcgctggccggcgtgcctgcgcgggcgggatcgcctgttgcgcattggcttgcataagcgcgccgggtttaaagtggagaaccgctttatgcgcgccagactggcgctgtttcgccgggtgatgaagcatcacgtgacgctggaataaatcccataatgcgcaactgtcgccaccgaccggtggcgacgttatctcacacgaccaccaccggcttgatcaccttgccggacgccgaatcggcgaaggcctggttgatatcggccaacggatagcgggcgataagcttatcgatagggaattttccctgtttatagagttgcaccaacagcggaataaacagcgccggcacggcgtcgccttcaatcaccccgaccagcgattttccctccgccatcaggtcgttctgcacgttaagggtgatatctccggtaaagcccacaatcgccaccgttcccagcggtttcaccgcgtgtacggcctgcagaacgatagcggagacgccggtcgtttccaccgcgtagtgggcgcctttaccggtgatttgtttaatcacggcgacggcatcctgttccttgccattgatctgatgggtggcgcccagttcgcgcgccagggcgaggcggctggcatggatatccaccgcgataatctgcgaacagccggttaatttcgctgccatgatggcgctgagccccaccgcgccgcagccaaacaccaccagcgattcgccgaccaccggtttcaggcggttgagcaccgtcccgctaccggtctggataccgcagcccagcgggccgagcagggtgagatcaacctccgggtcgaccacgaccgcgttgctggcgcgggtgaccacatactggctgaaagacgactggccaaagaacagggacagatcctggtctcccagccggtagggggtggtgccatcctcgcgtcggccgccaaaattaagcgtattaaaatcttcgcacgccgaagggtggttgcttaaacaattttcgcagtggtggcaggcggcgtagctgagcactacgtggtctcctactctgatgccgctaaccgcctcgccgacgctggcaacgatcccggcgccttcatggccgaggatcgccggcataggcaccaccccggggttgtcgcgcatcacggcgtcggtatggcagacgccggtggcgacaattttcactaatatctcgtccttccccggcggggcgacctcgacgtctttgatgacaaaaggctgctggtagcccagcgtaacggctgctttcacttgcatggcatgactcctgaatgaattccctggagagcgtggcgggacagcccgaacggctctcccctgttggccgctaacgtgaagaaagatagcggttatcggggaaaagttagcaccaggcgcgatgggaatttgcgcgaatcgtgcctaaaaaacgcgcgcggcgaggagcgatacatggggtgaatattcagcactggagaatagatttcccttgaatagtcaggggtaaaaagcggcaggcagcgtgtatgcccaggctacacgtcagaggaaatgaaaaaaacagtctgttcctctggacagggcttttttaccttttttctgctggcaacaattggattattaatcgtttttgtctagagtgggcggaaattatcacgcagcgtgatgacgcgttgcgaatcaattcacccgtgcagaaggacgctttctcaggcatgaaccgcagacgttttcttaaatcttccatggctgttgccgccgtatgcggaacgtcaggagtcgcttccttattcagtcaggccgcttttgccgaagacgcgggcattgccgacgggcaaacgcgtcgttttgattatgctgttctgcaggagatggctcacgatctggcgcgccagccgtggggcggcgccccgcgcgatctgccgccgacgctcgccaatctcaccccgcaggcctataacagcatccagtacgatgccaaccactcgctgtggaacaatattgaagagcgtaagctggacatccagtttttccacgtcgggatggggttccgtcgccgcgtgcggatgttctctttagacgccagcacccagcaggcgcgcgagatccacttccgtccggagctgtttaagtacaatgacgccggtgtggatacccgtcagctggaaggacagtctgacctcggcttcgccgggttccgggtgtttaaagcgccggagctggcgcgccgcgatatcgtggcgttcctcggcgccagctacttccgcgcggtagacagcacctatcagtatggcctgtcggcccgcggtctggcggtggatacctttaccgataccccggaagagtttcccgactttacgtcgttctggttcgaaacggtcaaaggggacgccacggtgtttaccgtttacgcgctgctggacagcccgagcatcactggcgcctacaagttcaccatccactgccaggatacccaggttatcatggacgtggaaaaccacctgtacgcccgcaaggatatcaaacagctgggtatcgcgccgatgaccagtatgttcagctgcggcaataatgagcggcggatgtgcgacaccatccatccgcaaatccacgactccgatcggctgtcaatgtggttgggcaacggggaatgggtctgccggccgctgaataacccgcagaagctgcagttcaatgccttccaggacaagaacccgcgcggctttggtctgttgcagctggaccgtgatttctcccactaccaggatgtgatgggctggtataacaagcgtcccagcctgtgggttgagccgcgtaaccagtggggcaaaggggcggtcagcctgatggagatcccaactaccggcgaaacgctggataatatcgtctgcttctggcagccggaaaaggcggtgaaggcgggcgacgaactggacttccgctaccgtctttactggagcgcgcagccgccggtgagcactccgctggcgcgcgttctggccacccgcaccgggatggggggcttccccgagggatgggcgccgggtgaacactacccggataagtgggcgcgtcgttttgccatcgactttgtcggcggcgatttgaaggcggccgcgccgcgcggtattgaaccggtgatcaccctctccagcggggaagcgaagcagattgagatcctctacgtcgagccgttcgatggctaccggatccttttcgactggtatccgaccaccgactcaaccgacccggtggagatgcgtctgttcctgcgctgtcagggagaagccatcagcgaaacctggctctatcagtatttcccgccggcagcagataaacgcaactacgttgacgaccggatcatgaaataaccctgagtcacccgacgcccgcaggcagtccctgcgggccagaagagagcgctatgaccgcagatatcccagcagtacctgagtcgatcccggtaaccgacgcgctgacgctaatcgccattgatgagcgctacgttagcgacctgcaccagctggtggtcaaaaaccagcgctggctacagcagtcgctcagttggcccgccgaggtgcgcagcgaagacgagacccgccgccatgtgcagggcaacgtgatgctgcatcagcgggattacgccaaaatgtttttgctgtttctcgataagcagctagtcggcgtcctgtcgttcaatcagatcgagccgcagaataaaacggcctatattggctactggatcgatgaagagcaccaggggcaagggctgctttcccgttcattacaggcctttatccgccattatgccgccagcgggctggtgcgccggtttgtgatcaaatgccgggtggcgaacacccgcagcaaccaggtagcgttgcgcaacgggtttgttctggaaggctgtctccgacaagccgagtatctgaacggtagctatgacgatcagaatatctacgcccgcattattgaccgcgatgaggcattaaagcgcgcctaacagcggcgtgcgggtgatgtgctgctggccgtcaagcgttttcgggccgcgcagatgaatggcctctccctcctgtgcggcaatctgcacctcgtcattgatggagacctggtgctcaacgatcacatcgccgatgatgactgtccgcccctggatcagcacatcgtcgtcgagcagaatcggaccacctcgcagctgcgcctcgccgccgaccatcgcccgatgcttcagcaggcagttgccttcaatcaccgcattctctgccacctgcgaactgtagcgcacggtgggaatggcatcctctccacgaccggcgatcagacgcgcgtgcccgtatacccgggcgttatcgcatacccagacgtcgttttcttcgttcccttcaagtcttgcctggtcaaacacttccgcccgatgttcgacaaacgcatgctcaacgaaggcatcgccgtagatttgcgcctggtggagaatgcgcgaggcgctgacggtggctcgctgatagatctgcaggactttgtcgcgatcggcggttaacccgcgcgcggcaatcacctggcagtgggggagaagacgcgcctcgtcggcaaggcgacaataaccgcgcacctggctctgcgtaaccgtgacgttgtcactgatctgcgcgtgatggctgatctgcgaggcgtgaatgcaggcctgtccgccgatggtggcctcatggctgaccacgcagaacccggttaagcgggcgtcgtcacggatgcgcgccccggcgaagaccacgctgttgacatcgtagatccagcactccccctgctggctgagagcgcattcctcatccacccagccgccttcgctgcccgctttaacgtcagcgaaatcaataagcgccacgatctggcgcagggtgacgctttgtttgccatgctcttcctcataacaatactgccgggtctgttcgctgagacggtatttacgcatggccgatccttattacttatggttaacataaacatagcaaagatcgccatagcgcgcgggataaggttcctttagaatgcaacttcaaattaaattgatatcatcaataaaatgaataaaacgcaaacgccgcggcaggtgctaaacctgccggcgggttattttggcatggtgctcggcaccatcggaatgggcttcgcctggcgttacgccagcaccctctggccggtcagccgcagcattggtgatgggctggtgacgctggcgatggcgatgtgggtcctgctcagcatggcgtttatcagccgggcgatccgctttccggcgagcgtgctgcgggagatgcgtcatccggtgagcagcagcttcgtcagcctgtttccggccaccacgctgttggtggcgattggtttggctccctggtgctggccgctggcgatcgggctgtttgtgccgggcgtggcgctgcagctcgcctatgccgcctggcaaagcggtgggctatggcgggggaaccatcctcgcgaggccaccacgccggggttgtatctgccgacagtagccaataattttatcagcgcgatggcctgcggcgcgctgggattttccgatgccggactggtgttcctcggcgccggggtcttctcctggctgagcctcgagccggcgatcctccagcgtctgcgcagcgcaggcgagctgccgacgccgctgcgcacctcgctggggatccagctggcgcctgcgctggtggcctgcagcgcctggctcagcgtcaacggcggggaggccgataccttcgctaagctgctgtttggttacggcctgctgcagctactgtttatgctccgtctgatgccctggtatcttcgtcagccgttcaatgcttctttctggagcttctcgttcggcatttccgcgctggccaccaccggtctgcatctcggccaggccaggggagacggcttttttcatcatctggcgatgccgctatttatttttagcaatctggttgtcggcctgctgctgctgcgtacagcgttgctgttggtcagcggaaaactgttgctccaggtcgaccgggaaacactcctgaataagaaggaaggatcatgacaatgcgtgacgcggattattttagtcaaaaatacagcctgacccgcacccattccgaggtgctgcatgccgcgacgattgtgccgccggggcgggcgctggatctgggctgcggcaacgggcgtaacagcctttatctggcggcgaacggcttcgcggtgacggcgtgggataaaaatccgatgagcgtcaacaatctggaaagtattcgcgctgccgagcgactggataatctgcaaacggcggtgaaagacctcaacagcctgagctttgacggcgagtatgacctgatcctctccaccgtagtgatgatgttcctcgagcctgacaccatcccgggcctgatcgccaatatgcagcgctgcaccgccgccggcggctataacctgattgtggcggcgatggataccgaagactatccctgcaccgtcggcttcccgtttgcctttaaacctgatgagcttcgtgattattaccagggctgggagctgctgaaatacaatgaggacgtcggcgagctgcatcgcaccgacgccaacggcaatcgcatcaaattgcgcttcgccaccctgttggcgcgcaagcctgcctgattcgccgcggcgtgggaagctgagcatggcccgcgccgcattccccgccagagcctgggcaagacagagacccgttgcggcgaaaatgagcctggaaaaccgcgcgataccccttttaagtgattatttattaacgtaatgttcaggcaatcaatatttataaatcttccttgacgaagccctttttttgtcacaaaactagtgggtcctatttgctataacgtctgccgaaaaaaactgcatttacagggatctctctatgcgtactcgcgttttactgaaagtcgccgctctggcgggaatattggcgttgaccggctgtgcggcgaaagtggcgcaaccggatcagtattcgggcttcttaaaagattattccagtttgaaagaaacgacctctgcctccggcaagccggagctgcgctggatcgatccgaacttcaatccggccaactatgacaatattgtttatcacccggtgacctactatccggtaccgaagccgaccacccaggtaggggagaaggcgctgcaggatattcttaactacaccaacaaagagctgaaacaggctatttccgagcgtaaaccgctggccactaccgccggcaagcgcagcctcatcttccgcggggcgatcaccggggtggactccagcaaagaggggctgcagttctatgaagtgatcccggttgctatgattgtcgccggcacccaggccgccaccggccatcgtaccatggacaccgatctgtactttgaggcggaggtcattgacgccagcaccaataagccggtcatcaaggtcgtacgtaaaggggaaggcaaaaccctggcgaatgagaatacaccgctgaccgtcgataccctgaagcaggttatcgatgatatggcggtcgacgccgttaaattcgatccctctcagcgttaatcgtgccagcgccgtctgacgacggcgctgtttttcttcagcctcctcaggccagccttcggcgcagcaatagctgttccggtttggcaaacatcaccatgttacccagcaggattagcgccagcccgatcacggcgctgctgtgccagacatacccttcatagacggtggaaatggataaggcgaccagcggaaacagcagcgtactgtaggcggctttgctggcgccgatgcgccccacgagagtgaaataggcgccaaaggcgatgaccgagccgaacagcgccaggtaaagcagggcgcccagatagctgacggtccattctggcataaaattatcgccgcgcagcagagcgatcgcccccatcaccagcgtgccgtagagcatcgcccagctgttggtggtcagcgtttccagcccgcggcgctggtggcgaatactgaacatattgccgagcgaaaaaccgtaggtacccagggcgctcagcccgatcccccacagcagcgaggcgttcagtccgttggccagcaggtcgtcccagaacaggatgacgataccggcgagacccagcgcggcggcggcccagaagcggcccggcggctgctggcggaaaaagagaaagctgttgatggcgttaaacagtaccgccatcgaaaagatcaccgattccagaccggtattgatccaggcggcggcggtataaaaacaccagaaattaaagcagaagacgcagcagccctgcagcaggcagcagagatgatctttcgcgcccagcggccgcaggcgtcgtgtgacgagcagaatcgccagcatcgtgacgctggctacggcgaaacgccagaaaatcgataccggcgcggccaccggtccctgttgtaaaaaaatcgcgatccacgttgtaccccagatcacgacaacgagtgcatagagtaatgcgttcaccctggttctcctctacctgttaatgggaggagtatgccggctgccgcctgctgcggctttcaccggtttgttgtcggcttgcaaattcttgcgcttatttgccatccgctggcggtgaggactggaaaccgcgccggagtctccctagactagggcttttacagacaatgtgtgaagacgatgggttacgggacatttgaaacattacggcgacagaacgcggtgctgaagggaaccgtggagctgaattccggtattcaactggccgcctggtataacaattgcgataccgtgacggtgcgcagcgaccatcataccttaagtctgtacgtggctgatggctacgaaagctatcaaaagacgccgcacggctggaaaaatggcggcggcccggaccgtttttgtctgatgccgaaaggcgatgaaagcgtatgggatatccgcggcgatctgtcgtttgtgcatctttactgtaccgatgcgcacctgcgtcgcgtcggcgaggaggtgtgggaccgcagcccggcgaacttcaccctgcaggaaaagaccttcgccagcgatgataaaatcaccgcggtatatcgtcagtttttgctggctaacgactggcggcagccggcgaaccagctgaccctcagcgccgccagcagcttgctgcttacccatctgatccagcactattccaccgtgcagtggcgtttgccgacggtcaccggcgggctggcgccaggcgtaaagcgtcacgtactggcctggatcgatgctcatctcgatcagcccttgaccctggccgacctggcgcagcaggcgggtctgagtgagtttcattttgctcgtatgtttcgtcagtcgctaaatatggctccgcatcagtacgtcatgcagcagcgaatggcgaaggcgcaaaacctgatctgccatagcgcgctgccgttaaccgagatagcgctggcctgtggttttagctcccccagccatttcagccatcgggtcaaagccgccaccggcctgacgccctcccagctacgggcggcgcaacgcggatagcacgccgtaactcaccccgccgagcaccacgccccagaaggcggagccaattcccgccagcgtcaccccgctggcggtgaccaggaaggttaacaccgccgcatcgcgttcactggcctgatgcactgcctgaaacagactcccgccgatggtgccgagcagcgccagacccgccagcatctggatccacgccggcggcagggccgacatcagggcggtgattgacccgccgaacagaccggccagcagataaaaaccgcccgcggctatggccgccagccagcgctggttcggatccgggtgcgcctccgggctctggcatatggcggcggtgatcgccgcgatgcagatggaataaaccccaaacggcgccagcagtagtgccaaccccccgcaaacgacgatcagtgcggagaccggtacggtatagcctgatgcctgcagggtggcgaaccccggagcgttctgcgaggccatggtgacgaggaagaacggcagaccgacgctgagcaaaagcgccggagtaaactgcggggcgacccattccggcgtcacaaatgccagcggcacgggggcgctagccacatccccggacgccgccgcaatcagcgctccaatcaccagcgcggccaccacggcgaagcggggccacagcgctttacacagcagccaggcggcgagcatcccgccgcacagcggcagatgatcctgtaagccggcgaaggcctgcaaaccaaaccgtagcaggatcccagccagcatcgcggcggccagcgaatggggaatgatctgcatcagccgggcaaacaggccggtggcgccgcagataacgatcagcgcgttggcgaaaataaagatccccacggcctcggcgagggtcaccccctgcaggccgctaactaacagcgcagcgcccggcgttgaccaggcggtgagcacaggaactttccgccaggcgctcagcgctagagtgctgatgcccatggcgaggccaagagccgtcatccagccggcgatctgcccgggggtagcgccggccgcggcggcggcctgccagatgatggcggaggagctggcgtaccccaccaacacggcgacgaagccagcaaacagagtgggaagcggaagactaaacgagcgcatcgatgattctcatgtgcgttataacatccattcactgtatcattgtgcgttataacgcacaagtggtggttcgcgcagctaccctgggagaaaaactcgccgccagcggcgtacgatgccgttaaacgtcctgaaaaaatcagacaaatggcggtatactttgcgcagtaaaaacaggaggaaggatgaatattgcgcaacatctggcggcaacgcttaaaaccctgcgccagcagcgaggctggagcctgtcgcgactggcggaagagaccggggtgtcgaaagccatgctcgggcagattgagcggaatgaatcaagtccaacggtggcgacgctgtggaagattgccaccgggctgaacgtaccgttttcggcgttcatcgtcccggacgccagcgccgcgccctccgcgtttgatccgcagcagcaggcgatggtggtgacgccagtattcccgtgggatcccgagctgcgctttgaccatttttcgataacccttgcccccggcgcgctgagcgaatcaacgccgcatgagaaaggggtgattgagcatgtggtagtgataagtggtacgctggatttgtgcttacaaggggagtggcactcgctgcaggcgggtgagggtaggcgtttcgccggcgacgcgacgcatgcgtatcgtaaccgcggcgcccaggcggcccatttccattctcttatccattatccaaaagaaaaaaccgcgagcgaacccgcggccagacaagatgactgatgataaccactcacaacgtgacgaggaaaatccggaatacgtgatgacagtactcttcgccgtgatttgagggaaatatcttttccgtcaatactttgttgaaaagtgaaaattcgtcgtcgcgcgaaggcggaaaaggttttcgtctgcgcccggttctgactacaatagccgccatttcgacccccttatactggataacaacacgcgtatgcgcctgcacaatcatcgtcttgaacttcttagtcctgcccgcgacgccggtatcgctcgcgaagcgatccttcacggcgccgatgccgtttacatcggtggacctggctttggcgcccgccacaacgccagcaacagtctgagcgatatcgccgggctggtgcctttcgctcatcgctttggcgcaaaggtatttgtgacgctgaacaccattctgcatgacgatgaactggagccggcgcagcggctgattaccgatctctacgacgcaggcgtcgatgcgcttatcgtgcaggatatggggatcatggagctggatctgccgccgattgagctgcacgccagcacccagtgcgatattcgcagtgtggaaaaagcgaagtttctctccgacgccggcttcagtcagatcgtgctggcgcgcgaactgaacctcagtcaaatcaaagccatttacgaccacactgacgccactatcgaattctttatccatggcgcgctgtgcgtggcctattccgggcagtgttacatttcgcacgcccagaccggacgcagcgccaaccgcggcgactgctcgcaggcttgccgcttgccgtataccctgaaggacgatcaggggcgggtggtggcctatgagaaacatctcctgtcgatgaaggataacgatcagaccgccaacctggcggcgctgatcgacgctggcgtacgctccttcaaaattgaaggccgttacaaagacatgagttatgtgaaaaacatcactgcgcactaccgtcaaatgctggatgccattatcgaagatcgcggcgacctggcgcgcgcctcggctggacgcaccgagcatttctttatcccgtccacggataaaaccttccaccggggcagcactgactactttgttaatgcccgcaaaggcgatatcggcgcctttgattcgccgaaatttatcggcctgccggtgggtgaagttctgaaggtaggcaaagaccacctcgacgttgaagtcagtgaaccgttaaccaacggcgatggtctcaacgtgatgattaagcgcgaagtggtgggcttccgtgctaataccgtggaaaaaaccggcgaaaaccgttatcgggtatggccgaacgagatgccagcggatctgcataaagtgcgcccccatcagccgctcaaccgcaacctcgatcataactggcaacaggcgctgctaaagacctccagcgaacgccgcatcgcggtagacgtgacgttgagcggctggcaggagcagctggttctcaccatgacctgtgaagatggcgttagcgtgacccacacccttgacggggagttcgccgaagctaaccaggcggagaaagcgctggccaacctgcgtgacggtgtcacaaaactggggcaaaccatctactatgcgcgcgatgttcaggttagtctgccgccgctgtttgtgcccaacagcctgctcaaccagctgcgtcgggaaactgcggagatgctggatgaagcgcgcctcaacgcctggcagcgcggcacccgcaagccggtctccgtaccgccgccggtctacccggagacccatctctccttcctcgccaacgtctataaccacaaggcgcgggcgttctaccagcgctatggcgtacagctgatcgacgccgcctatgaagcgcacgaagagaagggcgatgtgccggtgatgatcactaagcattgtctgcggttcgccttcaacctctgcccgaagcaggcgaaaggctccatcaagagctggaaggccacgccgatgcagctgatccatggcgatgaggtcctgaccctgaagtttgactgccgtccgtgcgaaatgcacgtggtcggcaagatcaaaaaccatatccttaaaatgccgcacccgggcagcattgtggcctccgtcagcccggacgatctgatgaagacgctgccgaagcgcaaaggggcctgattcgagtcgatgctattggcaggatgcccgcggtttacggtcgtcctgccagcggtgatgttcgcgcaggtctgcggcggcctcctcgtgctggctgcgaagctcatcgctatccgcttcgtgcagcagctgctgttcgagactttgcaccggaaagtactcgtgtccctgacgatgggccaacagatgcccggaaaataatgcgcacagcaacagcagggcgcttatgcttctctttaacataccttttctcgacggaacaatggcgtggacatactatgtcaggcgcaatgcaggctttttttcgggcatctcaaagaacggcaagagtttgtcaacgatggctgacgaaggatgaaaaaaggcctgacgcggaaggccaggccagagtgttacgctttcggcggcagcggtttcccgctgtgctcgctcccttttggcggctgcttgccgttgtgctgcggctgtttaccgtcgtgctgcggctgtttgccgtctcgttgtgactgtttgccgtctcgttgtggctgtttgctgttgtattgcgcttgcttgccatcgtgttggccgtttttcaccggcggtttaccctgatgctgcgcgcctttttccggcggcggcggcgggttgtcggcagcgaaagcccatgacgacattcccagcgtcattacggcggagagtatagctaacttcttcatagcaatatcctttcttcagatgtatcgccgtatttcatcaggcaaaagtgaagataagatggagaagtcccttttcggacctctctgcatccaccctcagacttttagccctgcggcggtcatcagcaggcgaaacagcaggcttatggcggccagcgtcagtacgctacctccccagagcgcgatcagccacagcagacgtttaggccaggcagtatgcatcagtgatatccctccccaggctgaactttgccgcggaacacgtaatagctccagcaggtgtagccaagaatgaccggaataatcagcagggcgcccaccagcataaagccctggctttgcgggggagcggcagcctgccacaacgtgatggccggcgggataatatgcggccagatgctgatccccagtccgctgaagccgagaaagaccaggcccagcgtcagcgtgaagggcgaaacatggcggtcgcgctgatgcagcgtgcgccacagccagccgctaacgaggatcaccagcagcggtaccggcagcaggaaatagagattcggcaggctgaaccagcgggcagcaatcgccgggtgcgccagcggagtccacaggctgatgacggcaaacaccgccagcagggcacccagcaactgccgcgatgcgctgcgcattctctgctgcagcgcaccttcacttttcatcaccagccaggtggcgccgagcagcgcataggccacgcacagtccgagtccgcagaacaggctgaacggggtcagccagtcaaacatgccgccactgaaggcgcgaccgctgacggtgaaaccgttgatcaccgccccgaccaccacgccctggctgaaggttgccagcagggagccgccaaaaaaggcgcgatcccagaatggccggtgcgacggcgtggcctggaagcgaaactcaaaggcgacgccgcgaaaaatcaggccgatcagcatcagggtcagggggatcgacagggcgtcgatgatcaccgcgtaggcgaggggaaaggcgccaaacaggccggcgccgccgagcaccagccaggtttcattgccatcccataccggcgcgacgctgttgaccattacgtcgcgatccccgccgccccgcaccgtgctgaacagcaggccgatgcccagatcaaagccatccatgacgatgtacatcagcgtggcaaagacgataatcacgaaccagatcaccgataattcgatacccattagcgggactccttctgcagataaccttcagtggcggcggacagcgggcgggctggcgtaccggttgtcgccgggagcatctcctgcggccccttgcggatcaggcgcagcatatagctgtagccgacgccgaagacggcgctgtacactacgataaaggtcaataaactgaccgacatatgcagatcgccatgagcggaaacggcatcggcggtgcgctgaacgccatacaccacccagggttggcggcccacctcggtggtcacccagccggcgagaatagcgatcaggccggatggccccatccacagggcaaaacgcagaaacggccgcgagtggtatagccggtcgccgcgacgcagccacagggccagcacgcccagcagcagcatcaacatgcccagcccggccatcaggcgaaatgaccagaacaccacagtagaattcgggcgctcctcaggagcgaactctttcaacgccggcacctgtttatcaagactgtgggtgaggatcagactgcccagggccggtatctcaagcccgtagcgggtgcgctgctggtccatatcgggccagccaaacagcagcaacggcgttggctcacccggcggattttcccagtgcccctcaatggcggcgattttcgccggctggtgcttcagggtattcaggccatgcatatcgccgatcagcgcctggacgggggcgaccagcagcgtcatccatagcgccattgagaacatcttacggatcgccggcgactgattgccgcgtagcagatgccaggccgccgaggcgccgacaaacagcgcgctactgagaaacgccgctactgtcatatgcaataatcggtaggggaacgacggattaaagatcaccgccagccagtcgacgggcacgacctggccatcaacgatctcaaacccctgcggggtctgcatccagctgttagaggcgaggatccagaaggtggagatgatagtacccagcgccaccatgcaggtggcgaaaaagtgtagccccggccccacgcggttccagccgaaaagcatcaccccgaggaagcccgcttccagaaaaaatgccgtcaggacttcataggtcagcagagggccggttatgctgcctgcaaactgtgagaaaccgctccagttggtgccgaactggtaggccatcaccagcccggaaacgacccccataccgaagttgacggcgaaaatcttcgaccagaaatggtacagcgagcgccagacgggattttttgtttttagccataagccttcgagcaccgccagatagctggccagtccgatggtaatggcggggaagataatatgaaatgagaccgtaaaagcgaattgaactcgcgccagatggaatgcatcaagaccgaacatgcaggactccacaacaaaattgattcagcgcaattttaggtggggtgacgactgaggggcagaggcagtcacgccattttttatcataacagttggccgctgttatgatttttcagctgttgccagggcgagaaaatatccttgcgcaaccttgattaatccctgcggaaggtgattaggcgtctattccgctgtctgtcatattattgctaacggctggctacgcggccctgccgccggtatggcgtagtcacctggtcggcataatatatccttaccacccgccgtagctcatattttggcttacgaaatccgccacggatttttactctgatttattgtcactcattagcatgagaataagtaaaaacgctgagccggttaatcgtaaattaaataataataaattgtcggctccgcggctaatttgtactgtatgagctcgggaataaataaaagggaatgccaatgtctgaaaaaggattacagagtctgtgcattacgcttggcgtaatgattatcttctggtttgttttaatctcgctattctgggtggtgatattttaaacccatcccgtgctatcacggcgacgcggccgccgctgcagatataacagttacaggaaactatgatttttttataactgatatatgataatgggacgttatcgtacggggacggccgcaatgaaaaagtatcaacagttggcgcagcaactgaccgagcagatcgcccttggcgtctggttgcctggcgatcggctgccgtcgctgcgcgagcaggtgatcagcagcggcatgagctttatgaccgtcagccatgcctatcagctgctggaaagccaggggcgcatcgtcgcccgtccgcagtcgggttattatgttgccccccagccggtgaagctccgccagccggcgccgcctgcccaggtcactcgcgatgaagccgtcgatatcaatacctatatctttgaggtgctccaggccagccgccaggcgtcgatgctgccctttgcctcggcctttccggacccgcgtctcttcccgctgcagcagctcaaccgctcgctggcgcaggtgagtaaaaccgccaccgccatgagcgtcattgagaatctgccgccgggtaatgcagaacttcggcatgccattgcccgtcgctatgccctgcaggggatgaacgtctcgccggacgagatcgtcatcaccgccggggcgctggaggcgcttaacctcagcctgcaggcggtgaccgagccgggagactgggtggtggtggaaaacccctgcttctacggcgccctgcaggcgctggagaggctgcgtttgaaagcattgtcggtggccactgacgtcagggaaggcattgatctgacggcgctggaggcggccctgcaaaactatccggtgaaggcctgctggctgatgaccaacggccagaatccgctcggcttcaccctcagcgctgaaaaaaaagcggcgctggtggcgctgctggcgcgctataacgtgatgttgatcgaagatgatgtctacagcgagctctattttggccgcgaaaagccgttaccggcgaagttctgggatcgccaggagatgacgctgcactgcagctcgttctcaaaatgtctggtacccggctttcgtatcggctgggtggcggccggcaaacaggcgcggcggatccagcagctccagctgatgagtacgctttccaccagttcgccgatgcagttagccctggtggattacctgtccaccaagcgctatgacgcccacctgcgccgtctacgtcgtcagctggcggagcgtaaacagcaggcctggcaggcgctgctgcgccatctgccgccggaggtcatcgtccaccacagcgacagcggctactttctgtggatcgaactaccggaaggggccgacgctagcgcacttagcgcccgggcgctggcgtcgcacatcagcattgccccagggaaaatgttctccacctccgacagctggacctcgtttttccgttttaataccgcctggggctggggggaacgcgaagagcagggggtgaagcgcctgggggagcttattcgcgaacagcttgcctgaccctgtcgtttatttttctcatcataaacattctgcgaaaataagcgaaagaggatttttatcgaggccggtcattattttaccggcgctcaccataggaaatatgcatacccctcctcattccctaactcgttgtctataatccataaagtcctgcttgtgttggcgatttttacgtaatgcgtcccgggtcacaacctgaataaattcccctgggggcgttaatccgctgactacccttatttcaggagatatttttacggcacggctgccgctaattcctttgtgacaggagtaacacctgatgagcaaaaaaattgcccgttgcagcctttatgtgctgggtatggcttgtttgaccgttcaggcggcagagccgctcacctcgctggataaaccggaagggcggctcgatattattgcctggccgggatatatcgaacgcggtcagaccgacaaacagtacgactgggtgagtcagttcgaaaaggacaccggttgccaggttaatgtcaaaaccgctgccacctctgacgagatggtcagtctgatggccaaaggcggctacgatctggtcaccgcctcgggtgatgcttcgctgcgcctgatcatgggcaaacgcgtgcagccgatcaacacggcgctgattgccggctggggctcccttgatccgcgtattgcgaagggggcgtggtttaacgtcggcggtaaagtctatggcacgccgtatcagtgggggccgaacctgctgatgtacaacacccgcgtattcccgacgccgccggacagctggcgcgtggtgttcgtcaagcaggatctaccggatggtaaaaccaaccaggggcgggtgcaggcctatgatggcccgatctatatcgccgacgccgcgctgtttgtcaaagccacccagccgcagctggggatcgaagacccctatcaactgaccgaaacccagtacaacgcggtgctgaaagtcctgcgcgaccagcaaccgctgatccatcgctactggcatgacgccaccgtacagatgaacgacttcaaaaacgaaggggtagccgcctccagttcgtggccctatcaagccaacggcctgaaggcggaaggccagccggtcgccaccgtgttcccgaaggagggggtaaccggctgggcggataccaccatgctgcacagcgaggcgaagcacccggtctgcgcctataaatggatgaactggtcgctcacgccgaaggtgcagggcgatgtggcggcctggttcggttcgctgccggtggtgcctgagggctgtaaagccagcgcgctgctcggtgataaaggctgtgagaccaacgggtatgagcagtttaaccgcattcacttctggaaaacgccggttgcggaaggcgggaaatacgtgccctatagccgctggactcaggactatattgcgataatgggcggccgctaaggatcggaggcaaacaatgacgtacgcggtcgagtttcagaatgtatcgcgcctgtatggcgatgtgcgggcggtggatggggttagcattggcatacgcgatggagaatttttctcgatgctgggtccgtccggctcgggtaaaaccacctgcctgcggctgattgccggttttgagcagctctccggcggaaccatccatatctttggtcaaccggccagcgaactgccgccctggcagcgggatgtgaataccgtgttccaggactacgcgctatttccccacatgtcgatccttgacaacgtcgcctacggcctgatggtcaaaggcatggcgaagaaagcgcgccatgcccgcgcccaggaggcgctggagaaggtggcccttggctttgctcatcatcgcaagccctcccagctctccggcggccagcggcagcgggtcgcgattgcccgggcgctggtgaaccagccgcgggtgctgctgctcgatgagccgctgggcgccctggatttgaaactacgcgagcagatgcaggtggagctgaaaaagctgcagcagtcgctggggatcaccttcatcttcgtgacccacgaccagagcgaagcgctgtcgatgtcggatcgcgtggcggtgtttaacaacgggcgcattgagcaggtggatgccccgcaggatctctatctgcaccccaggaccgcgtttgtggccggttttgtcggcaccgccaacgtttttgcagccgaggcggcccgacgattgtgcgggatggcgggcagctggtcgctgcgtccggagcatgttcgcctgcagggcggcggcgaggtgcaggtgcagggcgtggtgcaggcggtgcagtatcagggggcggcgacgcggatcgagctccgcctcgcggatggcgacaaactgctggtcagccaggccaacatcgatggcgcggcggcggccagcgttccgcgaaccgggcaaatagtacaggcgtcatggtcgcgctcggcgatgaccccgctggaaagcggaggctgagatgaccatggcaataactcctgcgcagaccgggcgcatatcggggatcttctggcgccgaccggcgctgggcctgtttttactgctgctcgggccgctgatgtggtttggcatcgtctatctgggatcgctgctgaccctgctgtggcagagcatttatacctttgacgacttcaccatgtcggtgaccagcgacttcacgctggctaacctgcgggcgctgttcaaccctgccaactacgacattattgtgcggaccctggtgatggcgctgtgcgtcacgctggccagcgcgctgctggcgctgccgatggcctggtatatggcgcgctataccagcggcaaaatgaaggccttcttttatatcgcggtcatgctgccaatgtgggccagctatatcgtcaaagcctatgcgtgggtgctgctgctggcgaaagatggcgtggcgcagtggttcctcggtcatcttggactggagggggcgctgaacgcgctgttgagcgtcccggcggttggcggcaataccttgtccacctccggccttggacgctttctggtgttcgtctacatctggctgccgtttatgatcctgccggtgcaggcggcgctggagcgtattccgggatcgttgctacaggcctcggccgatctgggcgcggccccgcggcagacctttcgctacgtggtgctgccgctggccattcccggcatcgccgctgggtcgatcttcaccttttcgctgacgctaggcgactttatcgtgccgcagctggtgggcccgccgggatactttatcggcaatatggtttactcgcagcagggggcgatcggcaatatgccgatggcggcggcgtttaccctggtgcctatcgtcttgattgccctctatctggcgttcgtgaaacgtctgggagccttcgatgcactctgaacgcgcgccctggtatctgcgactggcgacctggggcggggtgatattcctccactttccgctgctgattatcgccatctatgcttttaatacggaagatgcagcctttagctttccgccgcaggggctgacgctgcgctggttcagcgaggcggccgggcgcagcgacattctgcaggcagtgacactgtcacttaagatcgccgccctgtcgaccgccattgccttagtgcttggcacgctggctgcaggagccctgtggcgcagcgccttttttggcaaaaatgcggtgtcgctactgctgctgctgcctatcgccctgccggggatcattaccggcctggcactcctgacggcgttcaaagcggtcggccttgagcctggcctgctgacgatcgtggtggggcacgcgaccttctgcgtggtggtggtgtttaacaacgtcatcgcccgcttccgccggacttcgtggagtatggtggaagcctcgatggatttaggcgctaccggttggcagacctttcgttacgtagtgctgcccaatctggggtcggcgctgctggcggggggaatgctggcattcgctctgtcgtttgatgaaattatcgttaccacttttaccgcggggcatgaacgcaccttgccgctgtggttgctgaatcagctggggcggccgcgagatgtgcccgtcaccaacgttgtcgcgctgttggtgatgctggtaacgacgataccaatcttaggggcctggtggctcacccgcgacggcgataacgacgccggaaacgggaaataaaaccatgaaacaggataatgctatgcaacacaacctattgataaacggtaagttagtggcaggtgaaggcgagaaggttccggtatataaccctgcaaccggcgaagtgatcctggagattgccgaagcgacagcggcccaggtcgatgccgccgttgaggcggcggaccgggcattcgatgcctggagtcagacgacgccgaagacgcgtgcggaatgtctcctgaagctggcggacgccatctcggcgcaggctgaaaccctggcgcagctggagtcgctgaactgcggcaagccgctgcactgcgtgattaatgatgaaatgccggccatcgccgacgtcttccgcttcttcgccggcgccgctcgctgcctgccggggatggcggccggagagtatctcgaagggcatacctcaatgatccgccgcgatccggtgggcgtggtggcctccatcgcgccgtggaactatccgctgatgatggcggcctggaagctggccccggcgctggcggcgggcaactgcgtagtgataaaaccctcggagatcaccccgctgacggcgctgaagctggcggagctggcaaaagatatcttcccggagggggttatcaacgtgctgtttggccgcggtaaaacggtgggcgaccccttgaccgcccacgttaaagtgcgaatggtctccctgaccggatcgattgccaccggagcccatatcattggccataccgcctcgtcgattaaacgcacccacatggagctgggcggtaaggcgccagtgatcgtttttgacgatgcggacatcgatgcggtggtggatggggtgcggaccttcggtttttacaacgccggccaggactgcacggccgcctgccggatctacgcccagcagggtatctatgaccagctggtggagaaacttggggcggcggtggccagcctgaaaatgggggcgccggaggacgctgccaccgaactgggtccgctgagctcgctggcccatcttgagcgcgttagcgcggcggtggaagccgcaagggcgctgccgcacattaaagtggtcaccggcggcagtcgggctgacggcgcgggctattacttccagccgacgctgctcgccggcgcccggcaggaagacgctattgtccagcgcgaagtgtttggtccggtagtcagcgtgacgcctttcagcgatgaagcgcaggccctgagctgggcgaatgactctcagtatggcctggcctcctcggtatggacgaaagatgtcggtcgcgcccatcgtcttagcgccaggctgcagtacggctgcacctgggtcaatacccactttatgctggtcagcgaaatgccgcacggtggccagaagctgtcaggctacggcaaggacatgtcgatgtatggccttgaggattataccgtggtccgccatgtgatggttaagcatagctaaaggattgaccatttagcgccaggcgactattgcgcgatgggtgtgttaggccgctaatagtcacaatggcaaaaattgtcaaaactcaacccaggggatatgagattattctgatgccccttcaagagctaagccatcatgagtgccggagataagcgccggatggggtccgccagtcaccctgggcgcacagcgcccggcgggtggggcggcaacatcgcggttcgcgaccgaattgcggcccctgtctgtcggcaggggcttttttgtgctcgcagaagagcgaagagatgagccggccagtcgcgccggggtaacgagaataccgctttaactactttcagcgcttggtttttttgctgggcaggctggcgctgcgccggtcacgaatgtaggaaataagattatacaccgccgcgaccagcaggattagcgcgatgaccagcgtgatgattccggacatatccacctcgaaattcacagcgcgaactgcgctaaagcattaccaatggttatgaatgtaagtattatctgacgcgaaggcaaatgatatttgttgtcatttagcgctatttctggctcttatccgtgatgacggagatgaagaggttatgttacaacggcttgccatcgccatttatcttcttacgatgacggcccgcgcgatatattgcgcctgtggcgaaggcggcgatccttttccccttgccgacggcgaaatattttccttattagcgaaattaactcccctgaacagaaagtatttcacggctagagataagcttttaatatttacggttatcgcatgatatttgttctgaatattttatagccctgaggcagaggcaaataccggatgccgcccggcagcgcgccccgggtttgactttccgccgccgctcatgcgatcatttagggcatattaggttttgacgttgatgtcgctgtgaaaatttttgcttttattctgctggctatcggcgctgtggcgctgagctatggtaatgccccggcgaaacgaatccaaagctgtgagaagatgggcgtagggcaggccgtctgcgccgccgccgaatgggatagtgaaaaagtcaatgtactgccgcgctataaccccagtcttaataaggtaatagctgccgcgcagttagcccccgccgcccgacagcaagataacaactctgttgttcgcgcgtaaaaaagcagccttcggggctgcttttttaggtttcgttgctgaattaaatgattaaaaccagccaaatcttacggacagcaggctgataagcgcgaacgcggcgcagacattaatcataacgacggttttactggagacatccatagcgccaccctaatgagtaagtcctaaaggtatagtacggcgccagcggttgcgctatcagattaagacgaatcaggctttattctgaatattcagcccgtttctgattttgttatacaggtatctctgaatcacgacgtcatggcagataatcatcccaccatggaacgcccctcagggaaggaaaaagtaagaatgacgttatatcaaaaaatgttggtgttttacgccattatgggcgtgatatgcgccgtgattagctggtttttaaccaaagagagccggatgatccgcctgctggcggccctgctgatcggcgccacctggccgttcagcttcccgatggcgctgctcgtctcgctgttttaaccctcaggcgctagacggcagaaaagggtagcacaaaggatgaggttactgtataaaaaaccagtaaccttatcatggaggcatacaggtgaacggtttttattcgtccgtcgctggcgccacgctgcgctggcacgatttcccgggagatggccttccggtggtgtttatccacggccttggctgcgcgtcatcctacgattatccccgcattgccagcgatcctgcgctccgcgaacggcgcaaaatactcatcgatctgccgggcttcggctatagcgataaaccgcgcgcgtttagttacaacatacatgagcaggctttagttttggagcagttcctcagccacctgcgcctgcagcgcttcgcgctgttcgggcatagcatgggagggagcatcgccatcgaagcggcggggctactgggcgagcgggtgcccacgctgttggtctcggaacccaacctgttcgccggcggcggcgagtacagcaggcgcattgcggcgcagtcagagacagcctttgtcgctgacggctatgccaggctgctggcggaggagcgctcgccgtgggcgggttgtttacaaaacagcgccccctgggccgtctggcgggccgccagcagcctgatacgcggcagcgacacgccctggtttacccagctatgccagctgcgctgccagaaaatgctgatcgtcggagagcggtcgcttccttatgcggatagcgacctcgttcaggcacaagggatcccggtcggcatcgtgccccatgccggacactcgatggcgtgggaaaacccgcaggggctggcgcagcttatcgccagccatagttaagaggcgctgggcctcagaagggaagctcgcggggttgggtctggatcgttatccagcgcagctcggtgaattccgcgatcccggcccggccgccaaagcggccatagccggaggctttgcaaccgccaaacggcatttgcgcctcatcatgcaccgttgggccattgatatggcaaatcccggtatgcagacgttgcgctacgttccacgctctggcgctgtcgcggctgtagaccgcagcggaaagaccgtactcgctgtcgttggccaccgccagcgcctcctcttcgctatgaacgcgaataatcgctttcaccggaccgaaggactcttcacgccacaggcgcatctcgcgggtcacgccgtccagcagggtcgggctcatatgggtatcgttggctctaccaccggtcagcaggcgagcgcctttcgctaacgcatcgtcaatgagcgcgttgcagcgggcgatggtgttcatatcgacaaccgggcccgtgagggcggcaggcagggcggcggcgcgcctggccagcagcgggataaacgcctccgctacggcattgtcgacaataatgcgctcggtggacatgcagatctgcccggcgttggcgaaggcgccaaaaacagcgcccgccgccgcttgctcaatatcagcatcgtccagcaccagcaggggcgcttttccaccgagctcgagcaccgctggtttcagatactgtccgcaggtgcgggcgataatgcgccccaccggtgtggagccggtaaagttaacgcgccgcaccgccgggtgggcgatcagcgattccaccagcgccggcgcatcttcaggcgcacaggtaagatagttcaccacgcccggcgggaagcccgccgcgtcaagggcgtcgataatcagtccctgagtggcgggggaaagttcggcgcccttaaggatcaccgtgttgccacaggccagcggcgtcgccagggcccgggtggccagaatcagcggcgcgttccacggcgccatgcccagcaccactcccgccccctggcggacgcccatcgccaggttacccggcacgttggacggaattatttgcccttcaatctgggtggtcagcgccgccgcttcacgcagaatatctgccgccagatgaacgttaaatccggcccagtgcgcggtcgcgccggtctccgccgccatggcggcgataaatttcgcctcccgcaacagcatctgttccgccgcctcgagcagtaagcgacgtcgttccgccggcgcagtatcgcgccacagcggaaaggcgcaggccgcggcttcgacgcagcgtttgccgtcggcgaggctggcggcagcggccaccgaggctgcctcatcgtgggccgggtggcgtcgggtaaaggtgcggcggccttcggcatcgtgccactggccgtcaatgtacagattgcaggtgattgtcatggtggaaacctcttgttctgcggttcccccagtgtaccgggcggcactgacgggaagcgtgagccgggcggttatcgcacatttttttgcaggaattttgtgtggctcacaacatcccgaagccctctggcgtaaaaagcagcgcaacgtcgattaaaccagcaaattccacgcgttttgcataaggtgatagccattgattatttgccgccgtcaggcggctgtgctgttattactgttcttataatcaataatcaggacttataaccatgtctacagggaaaaccacgctggcgctgctgctgagcgcactgctgccggccggcgccgcctgggccgcaggcaatgacactctggtctactgctcagaagcctctccggagtccttcaatccgcagatcgccagctccggtccgtcgttcgtcgccagctcgcaggtactgtataaccgtctggtgagctttgacccggtgaaaaatacgccgatcccgtcgctggccaccgagtggcacgtctctgaggatggcaaaacctggacctttactctgcgtcagggggtgaagttcaacagcaacaaattcttcaaaccgacccgcgattttaacgccgacgacgtcctgttctccgtgctgcgccagatggatcctcagcatccttatcataaggtgtcgcaggggaactatgaatacttccacgacgtgggcctcgataagctgattaaatcggtgaaaaaggtggatgattaccatgtccagttcgagctcaacgagccgaacgcggcgtttcttgccgactggggcatggacttcgcctctattctgtcggcagagtatggtgaggcgatgctgaagaaaggaacgccggaaaacgttgataactggcctgtcggtaccgggccgtatgcgctgcagcagtataaagtggattcgcaaatccgctatattgccaatccccactactgggaaggcgaggtaccgaccaagcacttaatcttctccattacgccgaacgtcgagactcgtctggcgaaactgcagaccaacgagtgccagattattcccgcgccgtcgccggtacagttcccggtgattaagggcaataaagatctggcgctgcatgcggttgaggcgctaaacgtcggctatctggcgtttaacaccgagaaaaaaccgtttgataatgtgctggtgcgccaggcattaaactacgctaccgacaagcaggcgatcgtcaaggcggtattcctcgattccggcagcgtggcgaaatcaccgatcccgtcgacgatgctcgggtataagaaagatctcccggactatgcctacgatccgcagaaagccaaagcgctgctcaagcaggctggtctggagcaaggcgcggaagtgaccctgtggtcaatgccggtccagcgcccctacaacccaaactcaaaacgcattgccgaaatgatccaaaacgactgggcgaaagtgggggtgaaagccaaaattgtcagctatgaatggggcgaataccttgccggtatgcgtaaaggggagcacgacagcgccctgtatggctggatgtcggacaacggcgatccggacaactttgctggcacattgctcagctgtgataatatccagactggctccaacgccgcccgctggtgtgataaatcctatgacgcgctggtaaagaaagcgctgttggtgagcgatccgcaggcgcgggccaaactctacgaacaggcgcaggagattttttatcagcaggcgccatggatcaccctggcgaccgggaaaaccttctatgcgacgcgcagcaacgtcagcggctacaccgtcagcatgatggggagcgatttttccaaagcgaagctgaattaagcgaaaggagaacaggatggcacatctggatgaggttatcgtcaaagtcgatgacaccctggccgagggcgttatcgcgcatatgaatgagctgctaatcgccctgagtgatgatgcgcaactcagtcgtgaggaacgctatatccaacagcagcgtctgcgcaccgccatcgcccatcatgggcgacagcatcaggaagagcaggacgcgcgccgcgagcagttgaccaaaggcggcgcgatcctctgaagatgcgctcagaactggcgtctggccaccagccaggcgcccaccaccagcatcaccgccccgcataacggtccgatcagcgcccgcaccggcacgccgtgggcgcgaactaaatccatgatcaacccgcccaccagctggctggccaccagtaccgcaatggtcgtcgccgcgccaacgttttgataaccgctgatgctggcgaagacgaaaaaggaccccagcaggccggggatcagcgtccaccatttcacgctcagggccagctcctgaaagccggcgacgccctggcgcagcagtaacatcgtcacgaagataacgatcccgaccagcgaattgagcagcatagcgataaggatcgtcgacgccgactgggtgatgcgcaccatcagagtgttctgcactaccaggccaacgccggcggcgatcaggcaggcgagagtgagcgacgcgttcatgctttgccgtccgggtcctgacgcgcatccagctgcagctgcataaaggtcagatccagccagcggccaaatttggtgcccacctgcggcatctgcccggtggtgataaagcccagcgtttcatgcagatgcagcgaagcgtgattctgcgactcgatgccggcgaccatcacatgtttattcagccgtcgcgcttcggcgatcaaggcgaccagcagcttgcggcccagccctttcccctgatgttcgggatgaacgtacaccgaatgctcaacggtatggcgaaagccgtcaaacgcccgccagtcgccaaacgaggaataaccggtaatgacgccgtcttcctcgctcaccagtaccggaaatccagccagctggcgggcttcaaaccaggcgatgcggttatcggtatccacagttttatcattccagatggcggcggtatggacgacggcatggttatagatctcggcgatcgccgcgcagtcgtctttaatggcagggcgaatggacatagcaaacctcaatttttcgtacactatagtagtacaatattattacaataatgaacgtcacgctgtcatccgttttcagcataattttaacggctaacccgggaataacgcgtctcggtggatggttgtgtaatgggggggcgcacactatagtgttacgttatgaatactatagaagacaacctcaatcagcgcatcagcgcgcgcatccgcatcgagcgcgagtcccgcggctggtcgctgaacgacctcgccgaacgggccggcgcctcgcgggcgatgatccataaaatcgagcgcggcgaaagcagcccgaccgcctcgatgctgggccgcctttccggcgccttcggcatcagtatgtcgaccctgatcgcccgcgcggaaatgcaggagggcaagctgctgcgctttgccagccagccggtatggcgcgacccgcaaagccactatctccgccgccacgtttcgccgcgcagcgatttgccgatcgatctggtgcagattgagctgccgcccggtagcgatgtgccgatgcccgccgcgtcctatgcgcttgcccgccagctaatctggctgcaacagggcgagctggtgtttgtcgaaggcaatacccgccatgagatgcaggcgggggattgtctggagcttggcccgcccaacgattgtcgctttattaatgaatccgcagagacctgcgtctatctggtggttcgccttaatcaatcgccatccggctcttaatggtaaagcacgttgcgcataaagcagctagcctcagtacagtctgctaacaagaggagtttgctatgacagatcaaccgcaacgccatcgccgctgggtactggcttcccgcccccatggtgaaccgacggcagagaatttccgcctggaagagagcgaagtgccgacgccaggcccgggtcaagtgctgctgcgtaccgtttatttatcactcgacccgtatatgcgcgggcgcatgagcgacgcgccgtcctattcgccgccggtggccattggcgcggtgatggtgggagggaccgtgagtcgcgtggtcagctcaaatcatgccgattatcaacccggcgactgggtgctgggctacagcggctggcaggattatgaactctccgacggcagcggactggtgaagctgggtgacaatccgcaacacccgtcctggtcgctgggagttctggggatgcccggcttcaccgcctacatgggtttgctggacatcggccagccaaaggcgggcgaaacgctggtggtcgccgcggcgaccgggccggttggcgccacggttggacagatcggcaaaattaagggctgccgcaccgtcggcatcgctggcggcgcggaaaaatgccgctatgcggttgagaagttaggctttgatctctgccttgaccatcgtgcggatgattttgccgaacagctggcccaggcctgcccgcagggtattgacgtttattatgaaaacgtcggcggcaaggtttttgacgcggtgctgccgctgttgaataccgcagcgcgggtacccgtctgcgggctggtgagcggctataacgccaccgggctgccggacgggccagatcgtctgccgctgctgatggcgaccatcctcaaaaagcgcatccggatgcagggctttattatcggccaggattacgggcatcggatcgccgagttccagcagcagatggggcgctgggtgcaggaggggaaaattaaatatcgcgaacagctgatcgacggtctggaccaggcgccgcaggcgctgatcggcctgttaaaaggtgagaacttcggtaaggtagtgatccgcgtcgcggcggacgactaacctggcgggcttcgacttaacaggcccctttttccgccagggtaaaggggcctggcatagaggtcaggcgtagaaggctaaccgctgggcgagcagatcgacaaaggcttcgcggtccacatccagcatcagggtggtattgggccgattaccggtcagatggtagtaatcgaccaccgtcattccctgggtatatttgccttccgtttctacgccaacccagcgttcgatcgtggtaaagatctccggcttgaggagccaggcgatggtgcagggatcgtgcagcggcgcgccgtcgaagccccacttttcatctttgtggtaggccataaagaagtcgagcagttcggcgacgatggtcgacaccgggttgccaatctggcggaatcgctcgatatcggcgggaaggatttgcgccttatgggtgacgtcaaggcccgccatcaccaccgggatcccggactgaaagaccatttccgcggcctgcggatcaacgtagatattaaactccgccgccggctgccagttgcccagccccatggcgccccccatgatcacgatgcgggcgatcttcgcgtgcagctccggatggctggcgagcagcaacgccacgttagtctgcggcccggtggccaccagggtcaccggctcctggctttcccgcagcacgctggccatcagctcgacggcggtgcagttctgcggcgcaaaggccggctcaggcaggctcgggccatccagtccgctctcgccgtgcacgttatcggcgatgatcagatcgcgcatcaacggcttccacgcgccgccggcaaccggaatgtccggccggttcagcagcgtcaacatacgcagcacgttgcgcagggtcttctccggggtctggttgcccgcggaagcggtgacggctttcacctccagctccggcgaggcgagggcgaggaccagggcgatcgcgtcatcatgtcccggatcgcaatcaatcataatcggcagtgccatagcagctccttgttggcgatgttctgtgaccagactaacgctgcgagtcggggcagacgagatggtgtgcagaatagtgtgatggagaccacgattgctgcgaggcaacgcgtatcgttacgcgaccgtccgtaaacatggtgccacgttttgcggtggcgcaagatggcgcccggcgcgacgcgatataatagaaaaattgctaatccttacggatattaatggtttgcttttcggtgggcgggttcttatccttaagaaaactcaagaggttattacgatgaaagatgtagtagataaatgcagcaccaaaggctgcgccattgatgtcgggacgatcattgataacgaggactgcgtctaccgggccgagaaggtgttcccaaaccgcgaagaagcggaatccaccgtagccgccgtgcgcgaacgtgctgccgccgcagcgccggccagtgaaccgccgcatgtcgattacaccatcgtcgccgctggcgacgcagtgaaactcgacctctccatcgccttctcctgccaggcagaaaagatcattttcgagttatccctgcgaaatctgctttaattcgctcctgtagcggaagcgcgatgctctggcgggcagacgccttccgctgatgctgcacgctgcccgcccggcgacctgagccgggtgagcgcggttagtcttgaaagacgacgtttccgccaaccatggtcatcaccacgcggctggcgccaatctcctcatgggctacggcgaagatatcgcggtccagcacctgaaaatcagcgactttgccgacctctatcgatccgcgtaccgcttctttcccttcctgataggccgcattgatggtgtacatccgcacgccgtccgccacgctaattgccagttccgggcgaataacgttgccgctggaagatgatttgcgggtgaccgctgcctgaaccattttgcgccagttcaccagcgccataatgccatctgacccgccggcgacgatgaccccaaggtcgatgatatcccgtagccctttgcagatttcccccttgatgccacagtagcgggcgcgctgttcatagtcatatgccgggccgccgggtgagggttgttcggaaagcagaatgccgtattttgccgccatcacgaaatcttgccgatcgcccattgagccgtgcagcacataatgccgtcggctctcccccggatagcgctgaatcgcctgcacgaagctgttaatcgtgacttttaccgccttatcgccgaccgcatggactgccacctgaaaaccgcgctggtgagccagcggaatcatctgctttagcgcctcaacttgtgcttcctcggtcgcctcggggccaccaaacaccgagcgtccgcgatatcccggccggtcggcgtaatcctgattcatccacgctgtgtgcgatgtgggaacgccatcgcagaacagttttatggtccgacagtccagccagtcccggtcggtgaactgggagaaatcaaagctatccagatcgcgcttcagggtggcgcaggactgaacgccccgctcggcggagtaaaaggcgatggatacccgggcggtgagttttccttcatcctgcagttcacggtaggcggcgatggcgcgatcccccgcagcgcccacctcgcgcgtgttttcccccggacccatggcgccgtccgtgtagctggcatacccttcgctgttcatcaggcgctgggctgccagaaggttctctttgagggccgctacggtcagacggggcatcgtgccggatgcgagatgcagggcgggcaggtcgatgaaattgccgtccagttcgccactggccgttcgccccagatgtccgccgaggggatcaggggtgctggcgtcaagaccggagagggccagcgcccggctgttgacgatgcaggagtgaccgtcccacagggcgagcagggtgggatgatcggccgtgacgtcgtcaatatcccagcgcgtcagagagcgctgctcggccgcacactccttgattgcgtttggatccagaccgcagacacgaatccatgccccggcgggagtgcgggctgcctggtcgcgcagtctttcccgcagtactgccagggaacgcacgtcctggcagttcaggcaatgccagctgtcagcgagccagccgatatggatatgtgagtcatgtgcggcgggtaaaatgagtttgcccttaaggtcaatgacctgcgtctggggaccaatatgctgctgaatatcctggtcttcaccaacgttaataatccatccctgcttcacggcgatggcgcgcttaaaactaaaatgtgcgtccaccgtggcgaccttgccgttaatcaatacgcagtccgcataaacgacattatccatttatccctccctggctgataaaagtgccgatcaatataaatagtaaccatggtgattatgttgtggctatatgactacgaagggggtggagtgtcaagcgcgggtcgttggcgggtgtccgcctggcggtggaatagacggtaaggaaaagcgcttcgcccgccgatcgcgagaggcatcggcggggaaggggcgtgttattcgaagcgccaggcgaggttcaggccgatgccgtagttacgtcccggggcaggctcgtagtaacgtccgttagactcgttaacgatgacagacccgacgtactcccggtcgaacaggttgtcgatgcgaccgaacagatccatatccatcctgccgtagctccatttatagccagtcgtcaggccaaccaccgtccaggagggcgctttggcggtgttttcgtcattggccatgatatcgctcatatagcgaatatcgctcccggcgtaccaaccttgctccggctgatagccaaaggaggcgtagcccatattgcgcgcgatccccggaatgcgattgccattgcagctggcgtcgtcgcagacgttagtgcgataggtcgcgtccagccaggtccaggccgccttcagacgccagctctcgccaaactgctgatccagccccagctccatcccctgacggcgggtcttgccggcgtttttataactggtgcgcccgccgctgctgctgtcgaccacaatctcattatcggtattggtctggaacagggcggcggtgaacagcccattgccgatccgcgtcttgctgccgatctccaccgtgtcgttggtggagggtttcaggccgaagttgaggccgctctggttatcggagcggtaggagagttcgttaatggttggcgtctcgaagccgcggccggcggaaagatagacgttccacgcgtcggtcagggcatatttcagcgagcccgccggcagccatttgtgatagctggcatcaccgctgtcatcgccattgcctggggtgatgtagtagtcgttcgagtcgaaccataccgagctgtagcgaaccccggcatcgagcgagagtttgtcagtgagctgccactgggtctgcaggtaggggtcgacgttccacatcaggttgcgttcgttacggcgcagcgcgccctgttcgccatactgcggcgcgccgttgaccatcacaaagttttcataccctttgcgccgctcgctcatgttttcgtagtcgagaccggcggtgagcgtgacgggcaccagcagctctccgcgatgggtcagccgggtatcgatcccctggtagtgacgggtaaggtcgatcaccccgccggcatggctcggcttcagctgcggcgcgcgcgggatcgactggaactgagtggtttcacgttctccagcgtacatcataacgctgagatcgtcctgggcactgagctggcgctcatagcgcaggccggcctgggtctgtcgggtattcttgcgggtattatactggtcgccgcgcggcgactggcgcgggttatcgcgccattcatcggcggtcaggccaccggcgtcattggctttgatatccacgctattcagcagcagagtcagcttactgacgtcgttgatgcgcacccccagccgggcgttcgccagatttttgcgcgcgccgctgtgatcgcgatagccatgggtggtgaagcgattggttgagaccgtgtaatccacatcgcctgcgtggctgccgtcgccaacggcgccagtggctttcatcccgtagtgccaggtgccgaagctgccatagtagctgctggcttccacggtgggcggctgggtgccggtctggctggtgacgttgatcaccccgccggacgagttaccgtacagggcagagaaggggccgcgcagcacctcaatggtgtcaacgctgccgatatcaatatttgaggtctgcccctggccgtcgggcatggtggccggaatgccatccacatagatgcgcagtccgcgcacgccataggttgagcgcgagccaaagccgcgaatcgacagctgcagatcctgggcatagttttgccggttctgcacctgcaggcccggcacggcgcccagcgattcagagagattgacgcgcggcgcggcctggcgcatctcatccccattcaccacgctgacggcggcgggggtatccagttcagaaaccggggttggcgcggcggtcaccaccatggtttgttcatcagcggcctgggctgcggcaatgagcggcaagagcagggccgggagggcggcgtgacgcacggacaggattttcatcgataatactcaaagacgaaccaaatggaacatatgtatatatgttacctcgtttgtaaaatatttgaaaattattaactgctgctggttaacggatagtgctcgccaagcatgaatttaccgcacaacaacaattaacgctccactttgatataaataatgattactattcgcattcaaaaataagggtaaagccaggactttaccgccggaagcgatgtcgggtcagcacatactggtttatcaaagggagtcgtcatgtcattacgtcattttgccgcgccgcgtctgcgccattcactgctcgtcacttctctgctgctggcaggcagctttagcgcccacgccgcggaagagatgctgcgcaaggccgtcggaaaaggggcctacgaaatggcctacagccagcaggagaatgcgctgtgggtcgccacatcacagagtcgttcgctggacaaaggcggggtggtttaccgtcttgaccccacaaccctcgacgtgacgcagattattcacaacgatctgaagccgttcggcgccactatcaaccatgccaccggcacgctgtggtttggcaataccgtcgacagcactgtcaccgctattgacgccaaaaccggcgccgtgaaggggcgcctggtgctggacgagcgtcagcgcagcgaaaccgtgcgtccgctgcagccgcgcgagctggcggtcaatgagcagaccaacacggtctacattaccggtctgggcaaagagagcgtgatttgggtggtagatggcgcaaccctgaagctgaaaacgaccattaccggcaccggggcaatggcgacgggtctggcgatcgatccgcaggctaagcgtctgtataccaccaacgccgatggcgaactgctgaccatcgacagcgagagcaacacgattgcgtcgcgcaaaaaattgcaggatgacggcaaagcgcatttctatcttaacctgagtctcgataccgccggccatcgtgcctttattaccgacagcaagcagccggaagtgctggtggtcgatacccgcgacggcaaggtgctggagaaaatcgccgcgccggagtcgctggcggtactgtttaacccggcgcgcaacgaagcctatgtgacgcatcgtaaggccggggaagtcagcgttatcgacggcaagagctacaaggtggtgaagacctttaaaacgccgactcaccccaacagcctggcgctctccgaggacggaaaaacgctgtacgttagcgtgaaacaggcttccagccgtgagaaagaagccaccgcgccggacgatgtgatccgcatcgccctgtaagacctcagcgcgacgaaaccggaaaacggtggtcgcgctccgcatgccgccgggccaggcccggcgactcaccctctgttacaaacgcctattggcctgacaaaccagatggttatacacttaaccctttcccgccacgtgcgggcagtggtaatcagtggagataaaatgaaaaagccattcatggtgatttgcgccggcgcgatgctggcgctgctggcaggttgttcgtcaaactacgttatgaccacgaagagcggtcaaactatcgttacccacggcaagccgcagctggataaagaaacggggatgaccagctatatcgatgagtcaggtaataagcgggaaattaacagcagcgatgtgtcgcagctggttgaagataattaagttctgacctcccggtttgcccgcgatggacaaaccgggagtcctgccagttacttcctcagcgtcggcgccgtgctgtgaatctcatgcacgcgtttacgcacaccaaaccagccagccaccagcaataccgccagcagcggaattgatcctatggtgtaggtaccgttcggataatcgaaggccatcagcaccagcacgctgaacaggaacagcagcgtcagccaggaggtgaacggcgcccccggcattctgaagctgacctttgccgctttcccttccttgatcgctttgcgcagacgcatctgacacaccacgataaagccccaggaggcaatgatccccagcgaggcgacgttgagtacgatctcaaatacctgagatggcaccagatagttgaggaaaaccccgactacatatacccccagcgtcgccaggatcccggcgtaagggacgtggtgacggctcatcttcgacataaacttcggcgcggagcctcccatcgacatcgagcgcagaatacgcccggtactgtagagacccgagttaaggctggagagggccgcggttaacaccacgatgttcatcacgctgccgatatatggcacgcccagctttgagaagaaggtaacgaacgggctctgtccggcctggtaggcgttccacggcagaagcagcaccagcaacaccaccgaaccgacatagaacagaccgatacgccagatcacgctgttgatggccttcggcaccattgtctccggatccttacactctccggccgcggtccccaccagctcgatggaggcgaaggcgaagaccaccccctgcaccagcaccagcgccggcaggaggccgtgcgggaagaagccgccgttatcggtgatcagatggaagccggtggcattgccgtccagcggcttaccggagccgaggaaaatggtgccgaccacgagaaaggcgacgatcgccagcaccttaaccagcgcgaaccagaactccatttcggcgaaccacttcacgccgatcatattcatggtgccgacgatagccagcgcgccgagggcgaagacccactgcggcacatcgccaaacgcgccccagtagtgcatatacagcgccacggcggtgatatcgacaatcccggtcatcgcccagttaacgaagtacatccagccggccacgtaagcggctttttcaccgaggaactcccttgcataagagacgaagctgccgctcgaggggcggtggaggaccagttcgccgagggcgcgaagaataaagaaggagaagatgccgcagaccagatagaccagggcgagcgctggccctgccatttgtaaacgtgccccggcaccgaggaacaaaccggtaccgatggcgccgccgatggcgatcatctgtacctgacggttgcccatcgctttgtgataacccgcttcatgtgagttaagccagtggcgttttgcagcatgatgctccgctgcattttcgtgtttcgtattcattgatgtatcagtttcctgtcaatgcccatgtttgcagccggaatggaggacggctggcacattatgctggctttctcatcattctgacgtaggagataagctcagacatggcgctgaatcctacacgtaacctaatagttacgcacctaaaacatttaccgagagcatttgacagatttatcaatgagatcagcgtcgcagagtttccagtaacagcgtgaaagcgctggtatgctggcgccggctggggtaatagagatggtagccggggaaggcgggggtccactccgccagcacccgcaccagccggccgctggctaaggcctccgccacgcagtcatccggaacgtaggccagcccaaggcccgcctccgccgcgtcgatgcgctgcggcaggctgttgaggatcagctgtccctccacccgcacctgaatctcccggtcatcgcgggcaaattcccaggcgtaaagtccccctcgtgtcggcaggcgcagattgatgcagcgatgttgggcaagatcccagggcgtttgcggcgtaccggcccgctgcagataggccggcgaacccaccaccgccatccgcatatccggggcgatgcgcacggcaatcatgtcttttgccacctgttcgccgagacgcaccccggcgtcgaagcggtcacccacgatatccgtgagcccattatcaacagtgatttcgatgttaatatcaggatattgcagcataaatggctttagcgccggccagagtaccgcgctggcggcatgctccccggcggtaatgcgcaggttgcccgccgggcgttctcgggtgtcgcgcaatgcagccagggcctgctcgatctcttccagatgcggaccgaggcgctgaatcagtcgctcgcccgcttcggtcggcaccacgctgcgggtggtgcgggtcaacagccggacatcgagccgcgtttcgagatggcgcatggcatggctgagcgccgactgcgacacgccaagctgggccgccgcgcgggtaaagctgcgttcacgcgccaccaccataaaggagagcagatcgtttacgttctcttttagcataatctttccggattgatgaatactgctcacaggtacgcagagtgtatgcccggcctgaggattgtgccagcctgatggccggacgcagtggagcagaatggttatggcggatgatttattcctctgtgcagggcaggtattgtaataggcccaaaaaacgccagcgccaggtgaaccgacattcgctggcgcggcatgaccggggggacggcagcccgaaagatgatcaagagtatcgccaggcagagtctggtaaccgggagaaacagagatgaatatcaacgtggtcggcaccagcggctcaggcaaatccactttggcccggcgcctggcgcaccggctggaattaccctggatcgagctcgatcgcctgtactggcggccgaactggcagggcgcgccggatgaggcatttttcgccgccattgccgccgcgacggccacgccgggctgggtgctggatggcaattacaatcgcagccgcagcgttaaatggcgtgcggtggatttggtgatctgggtagattatggtttctggcgcacgctgcgccaggcggtgtggcgggcgacgagccgggcgtggcggcatcaggagctgtggccgggcacgggcaaccgcgagagctttcgccgttcgttctgcagccgggaatccattatcctctggacgctgaaaacctggcggcagaatcgccgacgctatctggccgatatgcaggatccgcaatatcgtcatattcgcttcgtccgggtgcgcagtccgcggcaggctgaggcgctgctccgcgagctggaagcgcagcggccaggcgggcatatctaattttcagcagtacacatgtgaattaattgtttctcaatagttagctgagattttaataatgcaggcacgtactttcatatgagcctgcgaaatgtcttatcgaatcagtatcctggataaaagtccgcttgccgccggggaaaccgccgcgcaggcgctggcgcgtacattaacgctggcgcaacacgccgaagcctggggctaccaccgcttctgggtcgccgaacaccacaataccgatcagctggcgagcccctcgccggagctggttatcgcctggctgctgggccacacccggcgcattcgtcttgggtccggcggcgtcatgctccagcactatagcccctataaggtcgcggaaaactttaacctgctggccgccctcgcgccgggtcgcatcgatctcggcgtcggcaaagcgcctggcggactgccgctttccacccgcgccctgcagcagggcctgcatcaggaggagaaagggacctttgccgaccagctggcgcagctggataactggctgtcgctgactgagcccggtggagaggagagcctgcgcgccacgccgatcccgccgcgtcgggccgacggtttcctgctcggcgccagcctggagagtgctgaactggccgcccgtcttgactggaacttcgtgtttgcggcccatctcaatggcgacagcgcgctgcgccgcacggtgatcaaccgctggcgcgagctcagcccgcgtgaggcgattgtcgccgtgcaggtggtggtggccgacgatccggccaccgccgccgcgctggcgcagcaggtcgaggtgtggggcgtcgagctggagaacggccagcgggtgaccgtcggcagtgaggcgcaggccgtcgcctttgcccgccaggctggcagccggccgacacgcatccaccgccgcgaatcttcactgatctccggtactcccgaacaggttaaagcccggcttgacgcgctgcaggcggaagaacagttggatgaactcatcattgatacccccattagcgacgggccagcgcgcctgcactccctgcgcctgctggcgcaggctcactacggcaaggaggtgctgaatgtcctttgaacaacaactgattagctggcggcgcgagctgcaccagaacccggagctctccctgcaggaggtagccaccaccgcgcggatccgcgactggctgcagagcggcgggctgactctgctgcccttcgatctgaaaaccgggctggtcgccgaagtcggcagcggcgacaaggtgattgccctgcgggcggacatcgacgcgttgcccatcgaggaggcgaccggtctgccttaccgctcgcaaaatgaaggggtgatgcatgcctgcggccatgatattcacaccagcgtgatgctgggggcggcgctgctgctgaaggagcgggaagcggaactcccggggcgggtgcggatcctgtttcagccggcggaggaaaattttggcggcgcgaaaaccctgatccgcgccggggcgctggaggacgtgtcggcgatctttggcatgcacaatgagcccggcctgccggtgggcgaatttgccacccgcggcggcgcgttctacgccaacgtcgaccgcttcgtcttcaaagtgaccgggaagggggcgcatgccgcccgtccacatgaaggaaaggatgcgatcctgctggccagccagctggtgacggtgctgcagagcgtggccagccgggaagtgaacaccctcgactcggtggtgctcagcgtgacgcggatccagggaggcaatacctggaacgtgctgccggagagcgtcgagctggaagggacgctgcgcactcacagcagtgaagtgcagcagcgggtcaaggcccgggtcagcgagattgccgccggtttcgccagcgcctttggcgcgcagattgacgtcttctggtacgccggcccgacggcgctggtcaacgacgcccgctgggccgatttcgccagcgaggtggcagcccaggccgggtatcgcacccaccatgccgatctgcatctcggtggcgaagattttgcggtctatcttcagcatattcccggggcgttcgtcagcatcggcagcgccagcgaatatggtttgcaccatccggcatttaatccggatgaacggctgattgcgcccgcggcgcactatttcgcccgtctcgcggaagaagcgttacaacacatttaacgaatgacaggggaaggggtagctatgtctgaaaatcgacaattgcgtctgggaaccatattgcatggcgcatcgggaaatatgtccgcctggcgtcatccggcggcccaggcggacgccagtattaattttgatttcgtcacgcagacggcgctaaaagcagaagcggggaagctggattttatttttgtcgccgacggtttatatattaacgaaaaatcgattccccattttttaaatcgcttcgaacccttaacggtactttccgcgctggccgcgatcacccggcgactggggctggtggggaccttatcgacttcctacagcgagccgtttactaccgcccgccagttcgccagccttgaccatttaagccagggacgggcggggtggaacgtggtcacttccccgctggaggggtcggcgaaaaacttctcccgggcccaacatccggatcatgcgctgcgctatcgcattgccgatgaatatctgcaggtggtgaaaggcttatgggattcatgggaagaagacgcctttgtgcgcaataaggagactggccagttttttgataaaaataaactgcatacgctcgatcaccacggcgatttctttaaagtcgccgggccgctgaatattgcccgcacgccgcagggccgaccgattattttccaggccggcgcatcggacgacggcaagaaattagccgcacgccacgccgatgccatttttacccatcaggactcgctggccgaggcgcaggcattttatcgggatgtcaaaagccaactcgccgcatatcagcgcagtccggaccaactgcatattttccagggcgtcagcgtcatcgtcggggatgacgccgaggatgcggagcggcagtaccagaccaccgcggcgctggtctccatcgaggatgcgctgaattatctcgggcgctatttcgaacaccacgatttctcgcagtacccgctcgacgaacctttcccggatattggcgacctgggacaaaacagtttccgcagtacaaccgacgagattaaacgtcacgcccgcgagcggggattaaccctgcgccaggtggctctggaggcagccagcccgcgtccgcgctttaccggcaccgccagcgatgtcgctgatggcctgcaactgtggttcgagcagcatgcggcggacggcttcattattcagggtggcacgccggaaaccttcccgcgctttgtggatgaggtggttccgctgttacaggcgcgcggactgttccgtcgcgactatccgggcaccaccctgcgggaaagtctgggtctggcgctacccgctaatcaattccaaaaataataaaagagaatcacgctatgcagaaaacaacactcttgctggccgtcgcgttggcatttagcgcctcatcgtggggtcaggacgtcaagatcaatggcaccggagtgagcctggaggccaacaaaacgccgattcacacagcgaaaaatccgcaggccattgccctgttgccgcaagatctgcatctggcggtgccggggaaattcaccgtcgcggtggcggccctgaactctccgccgctgacggtctttgccgatgacaacaaaaccctgctcggcagcgaggcggatatcgcccggctggtggcggagagcctcgggctggaagtaaacgtggttcccacttcatgggaagactggccgctgggggtcacctccggcaaatatgatgccgcgatcagcaatattaccgtcaccaaagagcggaaagagaagttcgatttcgccacctaccgcaaagactcgctgggcttctacgtcaaaagcaccagtccgctgagcaagattgacaaagcggaagatatcgccgggctaaagattattgtcggctccggcaccaaccaggaggcgatcctgctggcgtggaacgcggagaacgtcaagaaggggctggagccgtttatcccggtctacaccaaggatgatgccgcccagacgctggccctgcagaccggacgagccgacgccttcttcggccccaacgtgattggcgcgtggaaggcggcgctgaccggcaaaaccaaactggtgggtagcgtcgatggcggctggccgaaagcggcgcatatcgcggtaacgctgaaaaaagacagcgggctggtgaatgccgtccaggcggcgctgaacggggctatcgccagcggggactacgccaaagtgcttaaccgctggggcgaaggggtggaaagcattccgcaatcggaaatcaatccgcccggactgggcgactgacaggaggcgcgatgagcgaagcattccgcgatatttctccggaggctccggagctgcagccgattattagcgggctgtttgccgaatatgccgcccgctacggcgactatttttcccgcgatgcggaagtggagttaagtgagtggtatgtgccaccgcaggggctgtttattgtccttgagcgtgagggcgaaattatcgccaccggcgcgtataagccgaaggatcgccacaccgcggagatcaaacgtatctggacgcaccgccgtctgcgccagcaggggctggcggcgaaggtggtccaggagctggagcgacgggcggtgctggccgggtacagccatatctacctgaccaccggtttccgtcagccggaggcggtaaagctctatctcagccaggggtatgaggcgcagtttgacctcacgagagacccggaagagtacagtcagccgccgtacgatggccggctgcggttcactaaagcgctggcggtgagcgcctacagccacagcgcctgaggaggcattatgcattcatctgaaacgatcaaagtggtgccggcgcgctatccgctgcgggtggtcggggctctggtcgccctgctggtgctggcggtggtgatccagtcggtggcctttaacccgcgctgggagtggggcgtcttcgcccgctggttcttcgacccggtgatcctcgaggggctggggcaaaccctgctcctgaccctgctcggcacggtgctaagcgtgatcttcggcggcctgctggcgctggcccgtttgtcctcatcgtggctgctcagcagtctcgcctggggctatatctggctgtttcgctcgctgccgctgattgtggtgctgatcattctctataacttttcctatctctacgacaccctgtcgctggggatcccgtttaccggcgtgacctgggccagctatcagaccattaacgtgctggggcaattctccacggcggtggtgggcctgaccctggtgcagagcgcctataccgcggagattattcgcggcggctttctcggcgtcgaccacgggcagtatgaagccgccgccgcgctggggctacccgcctggcggcgcacgctgcgcattattctgccgcaggcgctgcgcaccatcctgccatccggcttcaacgagatcatcagtctggccaagggaacggcgatggtgtatgtcctggcgatgccggaactgttctacaccatccagatgatctacaaccgtacccaggaggtgatcccgctgttgatggtcggcgccgcctggtatctggcgatcaccagcgtcctctccgccattcagtatctggtggaacggggcctggcgcgcagcgagcgccgctcggcggtaaacagcgcccgcagcagccgtctggatcaacccgcacgtcaaccacagccgcaggaggccgctcatgcccagctctcataatggccatatctctatcaccggagtcagcaaatactatggccgccacaaggcgctggacgatgtgtcgctggagatccccccgggcacggtgacggtgatcctcggcccttccggttcgggcaagtccacgctgctgcgcaccataaatcacctcgaacgggtcgatgagggatttattcagattgacggcgactatatcggctatcgccgcaaaggcgacaagctgtatgagatgaaagaaaaggaaattcttcgccagcggatcaacgtcggctacgtgttccagaactttaacctgtttccgcacctgacggtgctggagaacctgattgaggcgccgatcgcccaccagcaggtcacgcgcaaagaggccattgcccgcgcctatgagctactggacgtcgtcggactgcgcaataaagccgacgcctggtcgcggcatctctccggcggccagcagcagcgtatcgccattgcccgggcgctggcgctgaacccgcgggtgatcctgtttgatgaacccacctcggcgctggatcccgagctggtgggcgaggtgctggatgtcatcaagaagctggcgcgatcgggcaccaccctggtggtggtcacccatgagattggctttgcccgcgaggtggccgaccaggtggtgtttatggtcgacggcaggatcgtcgagcagggcagcagcgacgaggtgctcaaccatccgcagcatccgcgtacccggcagtttttatccagggtgctgccgtcatgaacagagcgctaatgacccttgttctcagcgcttttgccatgagcgcttacgcggcgctggatctgcgcgccaatgagcagccattgccggtcacccgcgacccgcaggcgatagcgaaaattccgccgggctatcgcttcgtcgagccggggacgctaacggtggcgatctcggcgctcaattcgccgccgctggccctgctggccagcgacaaccgcacgcggatcggtagcgacccggatatagcccgcctgctggccggaagccttggcctgaagctcaggctggtgcccaccgcgtgggaggactggccgctgggcatcgcctccggccgctacgatgtggcgctgatcaatatcgcggtaaccgagaagcgcaaagagaagttcgattttgcgacttaccgggtggactccctggccttctcggtgaaatccaccagcgacatcgccgcggtaaacggacccgccgatctcgcggggcgcaaagtgatcgtcgggtccggcaccaatcaggagcggatcctgctgggctggaacgaggacaaccgcgccgccggacggccgcaggcccagccggtctacctgaccgatgatgcctccggcaatctctatatccagtccgggcgggcggatatctttttcggcccgcagtcggtggcagcctataaagcggcgcttaacggccagacccgggtggtgggcctggggccgaaaaaagcgtgggtggcgacaaccaccaaaaaaggcaacggtctggtctatgccctgcaggcggctctcgacggggcgattgcccgcggtgaatatcagcaggtgctggcgcgttggggggagcagggcgaagcggtggcgcagtcggtggtcaacccgccggggataacctactaacccccagtggcatggtgtgccgggtaggtgagcggcgtttttctgcctacacttaggctttaccctggaggccgaccatgataaccgtttatggcgtgccgggatggggctcgacgattagcgagctgatgctctccctggccgatattccctacgaggtggttgacgtggagggctttgatcagcccggtccggcgcgcgagcgtctgcggcagattaatccgctgtgccaggtgcccaccctgaggctggccgacgggagcatcatgaccgaaaccgccgccatcgcgctgatgatcctcgaccagcgtcccgatctggcccccgcgccggggacgccacagcgtccgcagtttcagcgcctgctggtctggctggtggccaatgtctatcctacctttacctatgccgattacccggaacgctgggcgcccgccgccgcggagcagctggtggagaattgtcgccagtaccggaaaaatctctatctctggttcgaacagcagctggccgccgggccgtgggcgctgggcgcgtcgataacgttgctggattgctatatcgcggcgatgtacagctggggaccccgccaggcgtggtttgacgaccacgcgccaaaattcgccgccatcgcccgggcggtctgtcagcgaccggagctggccgcggcgctacgccgtaacaagctgatttaacgcacgcgatgccaaccagaacggccattctgtggtagcgttatggctctgatcacaaggagtctttgctatgccgcatgttgatattaaatgttttccccgtgaactgactgatgaacaaaaaaccgcgctggccgccgacatcactgaggtgctgatccgccatctgaacagcaaagagagcgccgtcagcgtcgcactcactcaggttgagccggacgcgtggcaggcggtgtgggacagtgagatcgccccgcagatggcgcagttgattaagaagccgggttatagcatgtaacccgacacccggaggcgatgctgcgcatttgtccaacggcaagcggctttgcgccgcctccggcaggtgtttctctggcgaagtgctgattgatgaattttgtcatgggtgaattttttaaaatgtaccgggtacataaactccttgattagtgtaccctgtacatgtatgttatttggtaagtcgtcaggacatcagggaatgagatgttgacttttattgaactacaaggtttcagtaagcgacgccaggtgctgttgcaggatgatgaatttcgggcctttcaggaaatccttataaacgatcccgaggctggggacacaatttcgggaaccggtggttttcgtaaaattcgctggagtcgtcccgggatggggaagcgcggcggtgtacgagtgatttactataatgtaacgaaaaagggaagaatttacctggcgctcatctatcctaaaaatgaacaggatgagttaaatcaggagcaaaaaaagatgttgagacaagtggctgatttaataaactagcatataaacataaagtaaggctgagctattaatgatggaaaagtcgatagcgccagagagccaactgaggtgtatatgaaagacgaattgtttgccgatctgctggcgagtgcagaagaaatggtcaggatcgagaaaggtgaacaaatgccgatggagcagcacgttcataccttcagcgaaattgacgtgaaagcgatacgtgaagccacaggtttaaaacagcaggactttgcagcggccgttggcgttagctacgagttggttaaaagctgggaaacgaaacgacgtcagccaaccggtgcagccagaaaactgcttttattgcttcagggtaatccattgattatcaacttgttgaaggttgtttgaaaggttattcttcgcaaggaaaatggcagagtttgccccctttcgtaaccggggtctttaaaaaggagtgcattacgtatggaaaccaacgattctattttgaaagaaatcaagaaatacagcgctcatattgataggtttagagcgcgagcaaacactcatggtatctggttgtttattgctacccttggatgctggggggtaactgagcccagtattcggatattagcattcgttatgcttttctttatttttttgtttcttctacacggtagctttccaggtgaaaagcgaacgtttaaaaagattcacgatgatataaaaaataaaatagttgataatttaacaccagaacaacagcaagaaaggttccatgatcttctcatcgttgagaaaaaacgaaagtcacttgttggaattataaaaacaacctttatctttttagcctgttatggtttttattttatgagtttatattacttcatacagcactggcatagtgacaaagtaacagcgtgtatttaaatcaacccgtcctggcatttgagccggacgggccgtttgattaaaaccaaatctccgtctgcacgccgaagttccatgtcccaccggcggtaaagcctttgctgccgaaatcgtcatttatcgcgtagcgatccagcgctttatcccagttcatccaggtggcaaagaagcggatttccggccgcgccttgatatccagcacatcacccactttaaaggtgggggcgaaggtcagcttgtagaaatcaccgcgcaccgcctgatactgataaacgttgtcattatagcgatagctgcgcccgttcggattgagatccatatactgccacgaggcctcatacagcagggcgaagtgagcggagatcccctgtgatacccgcaggttaaacgtcgcccagtcgtagcggtcgccgtcgcgatagcggtcttcgctatgctgggctatcaccgacggcgccagctgccagtttttccccaacggcaggatgccatacgacgcaaagcgcagggaggccgcgttctcggtcagatcgccatcgctccccggctgacgcgcttcggcgcccagcccgacgccgtattgcagggcgctttcagacacccccggcgccaggccgtagaactgctgtttgtcgtgcagggccagcatcgcgtagtagccgtttatggcggtgttatcgctgcgcagggcatagctcccggtggtcgaggtattatctttcagatcatcgttgccctgggcggtcatcaccgtggtcatcagttgccagttgccgtaaaaatggttggcggtgaacagcagattctggatgtcattatccgcgtaattatcgctgccaaggtcgccgaagttacgtgcatacaccgaatagtcgccgcgcaggccgcttccccagtcgacatcattgatcccgccgccggtaccgccgaggaacatgatgtcgctatcggtaaagtggatatcgaagttatcccgatcaaagcgcttgccggcccaaattgaggcgcgttttaacggaccggtgaattcggcaaagttacccatctcgacgtacagctgacgaatgttcagatggtggctgtcgttatcctgaacccacggatccgggttggtggccccgtcggcgagcatggtcttaaagcgcgcccatgaaccatcgttgaaggtgagctttttgccaaagctcagctcagcgtaattatctttttcgttaccgagacgaccgacatgggcatcgccgttgagcgaactggccggggagacgcccggcccgccgcgggcgcctttaccatggctgttgactaacatcccggaacgggcgtaggcgttaaaggtaaacccatcgtccggggcgcgcttcgccagctgctcgctcagttgctgattagtggcctgctgtttttgttcgcgagccgtggtctgctggctgagcgcctgcacctgctgctccgccgccgcggcgcgctgctcggcggcggcagtttgctgttctgcccgctgcgcgcggcggctggcctcgctggcctgctgttcagcgagattgaggcgcgcttccagctgcgccagccgttgctccacgctcaagccggcggcgctgacgctgatgagcggaaaaagggcgcagcaaaccgctgcgctaatcacagagatacgcataaaaatccttaatttatccagaggttaaatcagcgggggcgccttacatggcgggggattctccggcggtcggggccggggctggcgaggcgccgcgtccggcatcaaggtcggcacgaatctgctcatactgatcgtcgaggcggtagaagcggcccatccacagcatcgaggcgaggatcaatagcgccggaatgtatagatagcaggccttgatggccaacagggcgctgtcgctctgcgtgtggttggcgatatagccgctggaggagagcagcacgccggtgatagccccggcaccagccatcgccaccttgccgagaaaaccgtttatcgaggtcaggatccctgcggtattaatcccggttttccacacgccgtaatccaccgggtcggcctgcatcgagaaatagatagccgtgcgttggccggcgccgagggagaggatcacggccccgacgatcagtcccagaacgtgggcgccagacaccatcataatccccatcccgagcagattgaccgcgctggccaccagatagacatgacgttttttcatgcgtcgggccagcagcgggacggtgagggtgccgagcaggggaacgaaggtggagatcccggcgataaccgccgtcagctcggtattcccgacgtaataatggaagaagtacaccagggccccggtctgaaagaaaaaggcaccccacatcagaaagatattgctggcgaagacccaccacggacgattggcgcgcagactaatccaggcgcgtttcagggtcatgcgctccccggtaagggtgatcttttcttcgacgttgcgaaagctcaccagcaggaaaaaggccgccagtacgccaaaaatcaccgcggtatagaggaatccctgctgctggttgcctttgcctagcatgccgaccagcggcagcgtagccacggcgacgatggtggcgccaagggagcccagcaaaatgcgcaccgccgacagcgtggtgcgttctgcggaatcactggttaaaaacggcagcatggcgcagaacggaatattcaccagggtgtagaggaacgacagacacagataggtgacaaaggcgtacagcagtttgccggtggtgccgaaatccggcacataaaaggccagaatacacagcaggccaaaaggcagggcgccgatcagcagccaggggcggcagcgcccccagcgggtggtggtattgtcgatcaccagccccatcagcacgtcggccacgccgtctaccagccgggtgaccaggaacatcaggccgacataataggccgggagacccatgacgtcggtgtaaaagaacatcagatacagagagatcatctgccacacaaggttgcaggagagatcggcaatgccatagccaaggcgctgccgccacagggtaaacgttgtttctgccataaatcactcgcttatcgttgttgttaaagtccgtactggcgaataaaccaggccggggtacagctccacgcatggcagtaactgttgataagcttactgccatacggggaaaagtcaggatgttgggggtcgaaaatttcccagaaggtgtcggcgccgtaggtgaccatcgccccccagtaggctttgatctccgccaccgcctcctcgcgcaggccggactgtagcagggcaacaatgtgatgatgacgcaggtacggggtgttcatggcaatggcgggcggctgctgctgcaggcggcgcatcagcgcctgacgctgcccggcggtgccaacttccgccagcaccagccagatctgcgacgcccatgagacctgacgcacggcgccgctgataaacacctgccgctcgttgtcccacagatggtggagggcggcctccttcagctgccagagcgtggcagtgtagtcgggtacccgctgcggttcaaaacgctgcgccagccagagggcgcgctgcagacagtagatgagcaccccctgcgccgaggcctgtttattcagctccgcctgccagtcgataaatacccaccagtcatcgctgtcgcgcaccagcccctgcgaatcgcagcgggtcagcgccagctcgatttgccgccgcgccgtgggccacagctcaccgacggtttccgtgtcgccggtgctttgcaggtagttataaagcacgtcgacaaaaaacaatgagtaatcaaacagaaaggtgtcatcggcgcgtacctctggctgaacaaagacattggcggaaaccatgccatcttcccgggtatgggcggcaaagagatacaggcagcggcggaccagatcgtggtggccgaaggtcacgtcattcacctgcgcctgcaggcgcaggtcgcccagccacagccgacggtcgcgtttcggcccatcttcaaacacctcctgcatgcagtttttcagggtacgaacggcaacgtcatcaatggctttcaactgcggatcggcgatgaccgccgggtgcgggctgccggcagaggtgacggtttccagagcgatctcatcgaactgcagacgaaacttgcgcgacagcgctttgacctccaccttcaggtagcgcaggcaatagcgacgtggcagagcgacccgggcgggcaggacgtcaagccacagatcctgctgctgcaaccagctgctgctcagccatccctggtattcgctgaacggctcacagacttcgctcagcgtctcgccgaaggtgaagtgcagatgggccggggcatcgggcgggctgccgacgctgcggcagctgaactgcaggtagccaacaaaatggctgccaaaatcaataatgatgctgtcgccgacgttgagcggttgctgataaaactgctccggcgtgcagacggtattcccccgccagccgttcagcgctcctggttcagcgacggcctcgacgatggcctgcggcgtctggcgcaggcgttgcagcgcgggcgtcaggtcggccgcacgctgtaaaaagcgcgggtgacggatcatcgccacgctggaattgtattgaattgcttgtgacatactgcgtcctctccgttaggttaggcgcagcacaggccgtcgtccggcgcggctaccactctggcaatgccaaaccgtcagtgaaaatggcaggaataatgaggtgggggcgctggcgatcacaaatccgcacatcgggcgcgtgccgagggctggaatagattatcgtgcccctgcgccataggttgttcaggatttgctgtaatgatgacactgaccgttgagtattatttcacccatccccaggataagctcggcatatacgccagtgacccggaggataatagccaggagcatggccatgaatttgccgaactggtgatcgtcgaggaggggcatgggttacacgttattaatggtcgcccgctgtatatccaacagggagacgtattttacgtccagcctggcgatgtgcattattatgatgagctggggacgctgaagctgattaatgtcttaattaatccggcggtggcctttggctatttacagcagatggagggattgctgcagcaattatccgcgcagcgcgccgcctgctatggctggctggcgccggagactcgcagctattgccgggaactagtggaaaagatattttccccggcgctgagggcggcggataataccccgctacgggagtctctctttttccagctggtgaccaccattctcacagccgagtcggaagccgaatatagcagcactcgctataaactgcataaattactcacctggcttcaggagcactgtttcgaagaacataactggcagcagctggcggagcaatttcatctcaccacccgcaccgcgtttcgccatattaaagaggccaccggattaaccccggataattatctgaaacgtctgcggctggtctccgcgcgggtcaaattacgcgaaacggagatgaccattaccgaagtggcttatctgtgcggcttcgccaacagcaaccactttaccaccctgtataaaaaagtgtttggcctgacccccagcgccgatcgccgccgcccaccgggttaaaagggggccgcaggccgggcaggggaaaaaccggccgcccgcggcaagtcacgcttattcgtcgagggagtttgcccgcacatgacggccgctggcgacaaaattgccggtgccaagatgatgcagggtattaagcttatcgtcgtcgaattgccagcgtccggtgacgaacgcgcgctcatcggcggcggcagagaccacctccccgaacagggtatcgtactgggtctgggccgccgtcgccggcagcaaccggcactccatccatgccagacatttctcctcgatcagcggcagccccagctccgggccggtcactaccgggatcccccaggcattgaatttgtcctcatcgcggccgctgacgctgccgacggcgtaggtccagctggcggctgcgacgccgggaaccacaatgccgaaggtgccattgcgctcgatgatctcccgcgtccaggtgcttttatccaccacgatagccacccgcggcggggcgaattccaccggcattgaccaggcggcggccataacgttgcgccggtcggacggggcatcgtagctggtgatcaaaatggttgggccgtggttgagcaggcggctggcgtactgcagttcaacgtggcgaaagcggctcataggcgttccttgaataatgggtcggttggcaggtaacacgttaagccgcaatgaaaatgtaatcaatacgtcatctcgtctgactatagtcgccagcactaagtcccaaagaggatcacaatatgttggctcccctgatgctatcccaggtgagcgtgccccgtcggatgtcgaccgccgggctggtctcgctgtcccgaaagggagggcgatgatgcgcacgctgacccctatcaccctgcaggaggtctctttcgccttcgcagagacccctattcttgaccgcttcacgttgcatatcgaacccggccgcatcgtggcgctactgggcccttccggctgcggcaaaagcacactgctgcgtctgctggccgggctgagcgtgccggccagcggcgaaatccgctttggcgacaggctggtcgcccgcgcaggatggggattgcccccggagcagcgcgatatcggcatggtttttcaggattacgccctctggccgcatatgagcgtggcgcagaacgtcgcctttccgctgcgcatgcgcggcgtctcccgcagcgaacgcgagcgccgggtcagcgaggcgctggcgcgggtaggcctcaacggctttgccgaacgtaagccttcaggcctctccggcggtcagcagcagcgggtggcgctggcgcgggcgatcgtcgccgcgccgcgggtgctgctgtttgatgaaccgctctccaacctggacagcgaactacgcgaatcgctgtgtggcgaaatgagccgcctgctgcgacagctcggcatcaccgccctgtatgtcacccatgaccgacgtgaagccgagctgttagccgaccagattgtctatttatccgcgggccgcgtggccgctgtccgcgccgttacgccaacctcaggggaagttgcatgaacaccgttatgaccgttaagaaaggagtggtactcgcgatggctctttccgccatgatgctctccagcgcccatgcgctgaccgtttacaccgccggacccggctcgctggcgaaaagcctggccagcggttttgaacaacagaccggggtgaaggtgaccgtttttcaggccaccaccggcaaagtgatggcccgactggaggccgagcaggccaacccgcaggcggatgtgctgatctccgcctcgtgggataccgccgaagatctgcaccagcggggctggttgctgccttttgcgagcgccaacgccgaccaggtaccggcgaacctgaaatcggcggactatatcgcccagggcgtctccgccctgggtattgtctggaacagtaaaagcggcaccccggaaccgaaagagtggcgggatctcacccagccggcgtttaaagacaaggtgacaacccccgacccggcgctctccggcgcgtcgctggatttgctgatcgggctgcaaaacagcatgggcgaccaggcctggcaactgtttgacgatctgaaaaagaacggcatggtagtcagcggacccaacgcccaggcggtgacgccggtgatgcagggagcgaaagcggcggtgtttggcgcggtggattatgtctcctacggcaacattcagcagggcgagtcgctgaaggtgatcttcccggccagcggaacggtgattgccccgcgcccgatgatgatcctcaaaaccagccagcatcccggcgaggccaaagcctttatcgattacgtgctgtcgccggaaggtcaggcgaaggtcgccgacgcctggctgatgcccgcccgccgcgacgtggcggctaaacgtccgttactggacgcgctgaaggtgctgcccaccaccagcgagggcagcagcgagcggggcgccgtgctcgcccgcttcagtcagctgtacgcgcagtaattgatcccgtttctccggcgctggccgccggaggaccctcagcttcaggaaccggttgtgaaacaaacattcctttccggcgcgacccttgccgccctggtgatgctggtcgcgttaccgttagtgtttattgtgctgcaggcgatttttccccattttagcgccggttcgctcggggacgcctttggcggcatcccggcgctgctggccgatcctcagctgccggcgatgctcggcggtacgctatggatcgccgccggcgtggcgctggtcagcgtaatgattggcctgccgctcggcatcctgcgcggtatgttttcgctgccgctgccccggctgtgggatctcctgtttttgatcccctttcttacgccgccctatatctcggcgctctcctggatgctggccctgcaaagccagggctatctgcagcagctgaccggctggcagctgaacgatctgctgttcagccgcagcgggatcgtgctggtgatgacctttaacatatttccggtggtctactttgccgtctcccgcagcctgctggcgagcgggacccggctggcggtggtcgcccgcgtccatggcgccagcgcctggcgcgccttctggcacgtgacgctaccgatgctctccccggcgctggcggcgggcacgctgctggcgtttaccctcgctatcgaggagtttggcgtaccggcggcgctgggcagccgggcgggagtggtgatgctgacggtcggtattgagaaaaagctggccgactggccggtggatctccctggcgccgcgctattg

SEQ ID NO: 140 - DNA, 98735 bp, Unknown
  source: /note="Description of Unknown: MKP2_2161_1 Mutant Bacteria sequence"
gcggtgcaattcgcgacctaccgcactttttaagacgatttaatttctagatctggcgagagaaaatcctgatgaaaaactggaaaacaacagcagaagcaatcctcacctccggtccggttgtcccggttatcgtagtgaaaaagctggagcacgcggtaccgatggcgaaagcgctggtggcgggcggcgttcgcgtgctggaagttaccctgcgcaccgagtgcgccctggaggcgatccgcgcgattgccaaagaagttccggacgcgattgtcggcgcgggcacggttaccaacgttgagcagttgaaagcggtaacggaagccggcgcgcagttcgctatcagcccgggtcttaccgaatccctgctgaaagcggcgaccgaagacggcaccatcccgctgatcccggggatcagcacggtatctgagctgatgctgggtatgcagtatggcctgaaagagtttaaattcttcccggcggaagccaacggcggcgtgaaagccctgcaggcgattgcgggtccgttcggccacattcgtttctgcccgaccggcggtatctctccggccaactaccgtgactacctggcgctgaacagcgtactgtgcatcggcggttcctggctggtgccagccgacgccctcgaagccggcgactacgatcgcatcaccaccctcgcgcgagaagcggtggaaggcgcgaaataaaccacgcctccaggtcaacaacccggtctgcggcaacgcgaccgggtttttttgtctttacccttcgacgatgaccgccgcggcggcggctttagcccgcgccacggcctcctcaaccgaatcggcgacggcgagggttacccccaggcggcgggtaccgtcaatctccggcttgccgaacagacgcagctgcaggccagccccgacggccgactgcagctggccaaagctgacgttctggctggacaactgcggaaggatcaccgcggaggcggccgggccatactggcggatagcgccgacgggtagcccgaggaaggcgcgaacgtgcagggcgaattccgagagatcctgggagataagcgtcaccatcccggtgtcgtgtggtcgcggggagacttcgctgaagatcacctcgtcgccgcatacgaacagctccacgccaaacagaccataacctcccagcgccagcaccaccttgcgggcgatggtctgggcacgctcgagggccaggtcgctcatctgctgcggctgccaggactcacggtaatcgccgtcttcctggcgatggccaaccggagcgcagaaatgcacgccgtcgacggcgctgacggtgagcagggtgatttcgaaatcgaagttcaccaccccctcgacgatcacccgtccggcgccagcgcggccgccctgctgcgcatagcgccaggcttcgctgagctggtcagccgagcggataaagctctggcctttgccggaggagctcatcaccggtttaacgatgcatggcaaatcgatctcggtaaccgccgcgcggaagccttcttcgctgtcggcaaaacgatagcgggaggtgggaagctgcagctcttccgccgccaggcggcgaatgccttcgcggttcatggtgagctttgccgcccgcgccgtggggaccactttctgcccggcctgttccagttcgaccagggtgtcggtagcgatagcttcgatctccggcacgatataatcaggtttttcctgttcaatcagggcgcgcaggctctcgccatgcagcatattgatgacatgggcgcggtgggcgacctgcatcgccggggcatcggggtagcggtctacggcgatggtttcaatgcccagacgctgacattcaatagcgacttctttacccaactcgccggaacctaacagcataactttggtggctgccgggcgcagcgcggtgcctaatacagtcataactctcatccgcagtaaaaaaagatggcagcgattataaacgaaaacgtttgcgtatgtctttacgcgcgtaacgcgcgtgagttgagtccgggagggaaatttgctatactgtataaaaatacagtgttgagaggctgcagtatggcggttgaaattaaatatgtggtgatccgcgaaggtgaggaaaaaatgtcttttgccagcaaaaaagaggccgacgcttacgacaaaatgctcgatctggcagaggtgctgaatgactggctggtgacatcgccgctggagatggatgacgtccagcgcgataccatggcgatgtggctggcggagcgtaaagaagcgctgcagcatatcctgcgagttggccgactgccggagcaagagacgcccgcacaggacgcctccgcgccgtcggctaccgccgagacttctccggcgggtgatgacgccgtgccggcggccaaagcgcgcaaagccaaggcagcctgaacgctggcggtcagtcactggtcggtcggccccgatgctgccgtcgcacgtacctttgcgcatctttagccatatctaacatttcctgacatcgcgtcgtttaggctgataacagtgtttgtcacctgagaggaaaaccatggctaactggctacatcaactgcagtcgctgctcgggcagcagggtgcgtcaccgtccggcgagtcgtcaaaagggagcggcctgctgcccggcgccatcggtgggctggccggattgctggtggccagcaaatcgtcacgcaaattattggcgaaatatggcactagcgcgctgctggcaggcggcggggcggtggcgggcacggtgttatggaacaagtatcagcagaaaatgcgcgcgcagaatacatccgcccaggcgcctgagacggcagcggcggaggtcgatccgcgtagcgtgcggctgatcacggccctggtatttgccgcgaaaagcgacggtcatattgatgaccacgagcgggcgaatattgaaactcagctgcgggcggccaatattgacgttcaggcccgggtgctaattgaccaggcgctagcccagccgctggatccgcagcgtctcgccgagggcatcatcgacccgcaggaggcgctggagatctactacgtcagctgcgcggtgattgatatcgaccattttatggagcgtagctaccttaatgcgctgggagacgccctggcgctgccgaaagatgtccgggccgatatagaacaggatatccagtcacaaaaacaagcgctaagcgtctaaatcatcacgtttcgcttgcatcgctcgcgtcttttgccacccttatagacacgtcatcattcaggcgccaccctgcggcctgaatgctcttgtgtcacgataaagcagcagaagaataacatgccacctaaagctaaacggatccctcacgccatgaccttgcatggcgatacacgcatcgataattattactggctgcgcgacgatgagcgcgcgcgacctgacgtgctggagtatctgcacgcggagaacgcgtacggcaagcaagtgatggattcgcagctcagcctgcaggagcgtctgctgaaggagattatcgaccgcattccgcagcgggaagtctctgccccctacagtaaaaacggctttcgctaccgtcaggtgtatgagccgggctgcgaatacgctatctaccagcggcagtcggtgctgaaagaagagtgggatgagtgggagatcctgctcgatgccaaccagcgggcggcgaagagcgagttctacaccctgggcggactgggcattgcgcccaacaaccagctaatggcggtggcggaagattacctttcccgccgccagtacggcctgcgcttttgcgacctcagcaacggcgagtggtacccggaaatcctcgaaaatgtcacctccggctttgcctggagcaacgattcacgctttgtttggtatgtgcgtaaacatcccaccacgctgctcccttatcaggtctggcgccacaccgtcgggacaccggcgcagagcgacgcgctggtctacgaggaaaaagatgagaccttctacgtcagcgtgcataaaaccacctcccagcagttcgtggtaatttatctctccagcgccaccaccagcgaagtgctgctgctcaacgccgaactgccagacgccgagccggtctgctttctgccacggcgtaaagatcatgaatacagtcttgatcactatcagcacgctttctatcttcgttccaaccgggaggggaagaatttcggcctctaccgtaccgtgctacgtgatgaagaacagtggaccacgctgatcccgccgcgtcacgacgtgatgctcgaaggatttaccctgtttaccgactggctggttgtggaagagcgtcagcgtggcctgaccagtctgcggcaaattaaccgcaagacccgggaggtggtggggatcgcttttgacgatccggcctatgtcacctggcttgcctataatccggagcccgaaacgtcgcgactgcgctacggctattcctccatgactacgccggatacgctgtttgaactggatatggataccggcgaacgaagagtgatcaaacagcaggaggtaaaggggctggatacgagctgctaccagagcgaacacctgtgggtgaccgcccgcgatggcgtcgaagtcccggtctctctggtctaccatcgcgaacattttcgcaaagggagcaacccgctgctggtctatggctatggctcatatggcgagagtatcgatgccgatttcagcgccagccggctgagcctgctcaaccgcggctttgtctacgccatcgcccacgtccgcggcggcggcgagctgggtcagcaatggtatgaagacggtaaattcctgtgtaagaaaaataccttcaacgactatctggacgtctgtgacgcgctgcttgcccaggggtacggcgatccgcggctctgctacggcatggggggcagcgccggcggaatgctgatgggcgtggccgtgaatgaacggccagagctgttccatggcgtgatagcccaggtgccgttcgtcgatgtggtgaccaccatgctggatgaaactattccgctgaccaccggtgaatttgaagagtggggaaatccgcaggatgaaacctattatcattatatgaaaagctacagtccctatgacggcgtgagggcgcaggcgtatccccacatgctggtgactaccggtctgcatgattcccaggtgcaatactgggagccggctaaatgggtggcgaaactgcgggaactgaaaaccgacgataacctgctgctgctctgcaccgatatggattccggacacggcggaaaatccgggcgctttaaaagctatgaaggggtggcgctggagtacgcctttttcatcgccctggcgcaggggacactgccgggaaaagcggcagtgtaggggctattccccgaggtaatgcctgagcgtcaggcgcagttcggggctcatgcggtcgagattgttgaataaccagcgcagatagcctggatcgttttcagcaatctcggcgacggccttaccccggtatttgccgaaggtaaaagtagtcagcagcgccggccgaccggtgatatcggccatttcgtcaggggtccagccggaaacattgatgatatccagcagcagcgcggcggtgatatagcagtcatacagcgcccggtggtgatgcagtcccggcggcgtagtcacgttcagcttacgtgacttatataaccccatattgctgtatttgattcccggccacaggcgtcgggccagcttcatcgtacagatccactcgccgtgcatctccggcaacacccggcgatcgaagctggcgttatgcgcgacgtaccacgggctgccatgatagtgcggaataatctcctcaatccacggcttatcggcgaccatctcttccgtgatccggtggatagccatcgcctgcgggctgatgggccgatcgggacgcaccagatggctcatgggattggtaatttgcccgtcgactatatcgaccgaggcgatttcaacgatgcccccctgcaggccgcaggtttcggtatcaatgacgcgcagcatggctcgctccagagcaaaacaataagcgtaatggaattggccgggcttgccaaccgacggggaggaggcgagcgcgcattatttctgtttcggctcccacggtagtcgcgaaagggagacggaggccagccgatgggcgatcagtcgttcatggaaccagtcgcgcagatgtgcaggctgttcacgctcgactaaatcagcgaccaccggcatattgtaccgttccttaaaagcaacgccggcggcggcgagatcgacattgactttatccatctcatcttgcgaaattttggccagatttctttccatcatccactccactctgcttataaatccggtcagggccagatgcctggctcgactctggcattatacagggttattctctgtgctacagacataacaaaagggaatgacgaatatgcgacttcttgctggacgcgcgttgcgtctctccgttgcgcttgccgggatgttaaccgcggcgggcgccttcgcccacgctcacctgcagcagcagatcccgaccgccggggcgcagctttcagcttccccacagacgttgacgctcagtttttccgaaggtattgaacccgcattcagcggcgtgaccgtcaccggtccgcagcagcatgcggtggctaccggaaaactgacccgcagcgccgataatccggccgaggtcacgttacctttggcggaagccttgccgccgggagagtacaccgtggcatggcatgtggtctcggtggatggtcataaaaccaaagggcaatatacctttagcgtgaagtaagcgatgctgaccgggctctatattaccctgcgctttgggcactttatctccctgatgctggcttttggctgcgtgctatatggcgcctggtgggcgccggtaccgctgagacgcgtgctgatgctgcgcttttatccactactgcgcccgctgctgctgatcggcgcgatctctacgctggcgctgtatctcctgcagggaggaatgatgggcgagggctggacggatgtctggcgacccgccgtctggcaggcggtggccgggacccgctttggtggagtgtggatctggcagatcctactggcgtggatcgcgcttgcggtagtgtggatccgtccccgtcacggcgcccgccagctggtggccctgctggcggcacagctgctgctttccgccggggtagggcacgccgctatgcacgatggtctcaccggcgtgctgcagcggacaaaccacgctgtgcatctcttctgcgtcgccagctggtttggcggtctgttgccctttatctattgcctgcgcctggcgcaggggcgctggcggccggccgcggtctataccatggcgcgcttttcacgttacgggcatctggccgtcgccggcacgattgccagcggagcgctcaatgcgctgttgatccagggaggattgattggcgcatcgccgtggggacgcatgttgttgatcaaatgtgcgctggtcgccgggatggtggtaattgcgttagtgaacaggtatgttctggtaccgcgcatgtcggcaagcggttcgcgggcggaaagcctgatcctgcgaaccacgcaggctgaaatagggctcggcgcgctggcgctgctggccgtcagtctgtttgccacctgggaaccttattgaattaactggcaaaatcatgaaaaaaattgttctgaccatgttgttactggcaagctccggggctgctctggcagcgccacaaattatcaccgtgagccgttttgaggtggggaaggagagctgggcgttcaaccgggaagaggtcatgttgacctgtcgaccgggtaacgcgctttacgccatcaacccgagcacgctggtccagtatccgctcaatgaggtggctgagcagcaggtcaaagccggcaaaaccaccgcgcagccgatctcagtgatccagatcgacgatccgcagcatccgggacaaaaaatgagcctcgcgccctttatcgagcgagcgcagaagctctgctaaactttctcgctatcctgctgtaataacatcaaaaaaaccgcccttgccggacaacggcagtggcggttttttcgctggcagaggccccctttccaggaattatgcagccactttggccgcggactggaaaagctgacgcgttaaactattcttatagtgcaaggcggcttagcctgcattaatgccaacttttagcgcacggctctctcccaagagccatttccctggaccgaatacaggaatcgtattcggtctctttttatctttatctgtcttctttcccaagagccagcgacatcctgtcagtcaaacacccgctggcctctggatgtcccgttatagcacaccgtttttagcatacacaattcatttacacataaatcgcatcctgtggaaggggaggtggcaacggtggaaccgtaaacgagggcggagaaaagaaaaaacctgcacctaaacaggcccggcgtgcaggttaactggcgggccaacatcggaagcctgctagtatacatatttgtatgataaataaaataagcaaaatctaaacgatttggcaattcatgcgattacacctcgccggctgacgaggtggcataaataataagcacgagcacttttgcgggcggaaaatattattgcggaacgctgaatgtagggtatatctggctttccagatagcagagcaatagccaaatttcatcgctgaaaataaaccatatgctcccgagcagaatgaccgccagaataatcagcagaaaaatttcggttttactcattatgcaagcgactatccggtggccttcggggaccctgatagtagcgaaatattgacataataagcaaacgccatgttgtaattcggcttcaccgacagtgcaatttagtcaccggcatgccgctgcgtcaatattgccacctgctccgtcagctgatccagcagctggaatcgccgccgatattcagcccgttttttactggcgatactctccagcgattttctttccagacatagcggtagccgccagcgccatgggctttccggctggccgtcgatagactgccagaactcgtcgtagctggcgtggaaatggcggcctttgctcaggcgatagcgcagggcgcggaacacgtgaccgttatcgctgacgccgtaaatagccgcgatttggctgcgagcggccagctgccagataaactccagcagcaggcgcttcggaaacaggccgtagcaggcgcgagtcgcctgcttaatcacctcatgagaaacgtgacgtcgtggcccctgcagaccgccgataaccagctgccaggcatcgtgatcacgggttacgctgaaggtggcgctggccagcagggtgtggtcgctgtcgcgcagccacagagtggtttcaccctcacgttcggctttgcctgccgaggaggcataaagagtaaaccggcggtcctcttttccgtttaacgtcagcagcgggacctcagacaccgcggtcatagcgtgcgccagccgcgatccgcgtagggtgtcgatatagcgataatggttgattaccgccaccgcccgctgccaggcgttgagatcgcgggtcagatattgacggtgtactttgcccggcagcgtagcctgtgcggccagcagctgattaaaatcatcccgagcgctgagcgcttccagcatcgctctggtggcgttataaaataaggccgtgcgcagcaaaaacttaaagcggtaatttttttgccgccagatgggggcaggtgtcaatctgcccatcaccagatcggcaataagatgcgagcgcggcgctagcacgccggatgaatgcaggctattgtctgtcacgataaacacctcgttgtgatttccccctattttaaagcgagccactgacaagcttaatcctctggcggactatatttgccgtctgtttaaaattgattgaggtgtaaattaaattccgtggacctttgctggaattacctataattaccgctgagaggtaattatatgtatcaacgtattaacggcagcgactggcgtaatatctggctgatgggcgatctgcatggctgctttgcgctgctgatgaatcgcctgcgtcagttgcgttttgatccctgggccgatctgctgatctcggtgggcgatctgatcgatcgcgggccgcagagcgccgattgtcttggcctgttgcgctgtcgctggttcagggccgttcgggggaatcatgagcagatggcgctggaggcgctggagagcggagatatgcggctctggcagatgaacggtggcgactggtacgtcaagggtgatgcgcggcagcgggccgacgtcgatcggctgctggcgcactgtcggcggctaccgttgattattgaagtggaatgcgggaaagcgcggcatgtgatcgcccacgccgattacccggcgccggtctatcgctggcagcagccggtggatccccaacgggtactatggagccgctatcgtctgagtgaacacctggcggggcgccatggcgctattgccggcgcagaccatttctggtttggccatacgccgcttcaggcgcgttatgaccacgataatcaacactatattgatacgggcgctgtgtttggtggggcgctgacgctggtggcgctgcagtcggcaggctaaaagtcgctgtattcgctggcgggttgccagaagccatcaataaaatcttctatcgggtagcagccaccgtggcggatccgctgatcctccatcgccactaagcactgcgtttcctcgcggtagacgtctaccacaatgtcctcgcagccgccatccagatagcaaataaacaacactaaggcaaacatcctggcctcatgctcgggttcacatactatttagtgtaggggatgacggcgggacggggaaataaataacccgtctcaggcgacgggttcattggtgtcaggcaaggcgcatgacccaggcatcggactggcggtcgtaatgtttacggtagagaacggaatgttcgccattgagaatcgcgggcacgctggtgtcggcatcccaggcgtcaagctgcatacataagtctggatcggatttgcagggtatgcttaacgttcgctcaccctgatgctcaccgtgcagttcggcatcgtctatttcgaacgcgccgatgcggacattggttttactcatcgcttcaccccatttttcagctgagttgtggtacgaccagttatggccgttatttttcagcgtagtcaatggggcgaaaagcgccagtcaaaaagtgcgcattttttgcgcggcctcacaccttgccggcaaaaagttttccatcgcgcaccagttcgcgcggatagctgttcttcagtcgggagccgacgcgcttcgccaggcccagcgggacgccctggaaggtcacaatggtttcatcctgcccaggcgcggtttgcggatagacgtcgcgcccgcgataccattcctccgcttcctcctgcgacagctcgaaggcgcgctgcggcgcggcaaaggcgataaccgcctcatgctgccagcggtaccccttattgtgcagctccgccaggcgcacgccgatgcgagaaaagcgcaccttgccgaacaggggctccaaagccagcggaaacagccacagctctttatcccgctgccacagcgtatggcctgcgtcccactccaggccaacagccctggcggcggcagttaccgcggcggcctcccggtccttcagcggcgtaaacgggaatttaccgaccttatagcctggcgccgggagcggatcgatcgccgcagttttgcgcaacctcgcgacaaagaagccttcgcaatcgtaaatttgcggaaaaacgtgcagaaaaccttccgcggttaaggcgtcggctgcgccgggaaacaactctcccagcggcaggatctcaaccgcctgcggatagcgggacagcagccactcaatgaccgattgattttcttcacgattcagggtgcaggtggaatacaccagcgtcccgccagggcgcagagcatggaaggcgctgtcgataagctcgcgctgagtggcggcgatgtcgaggttgctctccggcgaccagtttttcagcgcgtcggcgtctttacgtacaaccccttcgccggagcagggggcgtcaagcaggatggcatcgaaggtttcgggcaaggccgcgccaaaaacccggccgtcgaagtgggtcagagcgacgttgctgatgccgcagcggctgatgttggcatgcagcaccttcacccggctggcggagaattcattggcgagaatgccgcccgcgttgcccattcgggctgcaatttgggtggttttcgatcccggagcggcggcaacgtccatcacccgttcgggctgccggttatcggcgaacagggcggcgaccggcagcatcgaactggcttcctgaatatagaacagcccgctgagatgttcggcggtactgcccagcggcagcgcgtcgtcatcctctcgctcgatccagaatccttctgcgcaccaaggcaccggcgcgagttgccagccgtagggggcaaccagagagaggaaatcatcgacgccaatcttcagcgtattgacgcgaatactgcggcgtagcgggcgctgacaggcggcgataaagtcgtcgaaagagagatgcgctggcatcgccgcgcgcatttgagcgagaaacgcttcagggaaatagacagtattttcagccacgggcagcgcaccacagaaaaaaagggtgcgcagtttagcacaaacgccccggcgcgtgacaccggggcgtgcggtttaccctctccccgcgccaggcgttgcccggggcgggagaagggggcattactgcggcagagcggtgccccactcccgccactctttcggctcgctctcctgcagcaggaagtgcttgccatcctgggccttcggcgccagcggcgtgcccggcggcgtggcaaaggcgatcccgccgcggataaactgattgaaggtaccggttttcaccaccccgccaatcaggccgaagtcgaggctgtaacccgaggccagccagaacaccgagttattacgtaccaggtactggtagcgcttactgatgcgcagcttaaccatcacccggtcagacatcgaccccagcgacagtccggtaaccgtcccgacttccagtccgcggaacaggaccggcgtaccgatgccaagcgaccccgcctccggcgcttccaccacgatgttcaggccgtcgatataacgcgaatcgctgatcgtcgtatcctggatctcaaaatcgcgtcgtgccgggccgcggccgggctcaacgttgatgtaggcctggaacagggtgtcgagatgttccacgcccgcggcggagatttgcggagtgatcaccgagaagcgggtcccggcgcgagcgaaggtgccgacgtattccggatagagcaccgctttcgcctgcacttcgtttttggcggtgattagctccagcgactggatttgaccgatgtcgatgccgagataacgaatcggcatcccggccgccatcttcccggcgtcgtacgcgtgcagggtgatttggccgcccacggcgcgcgccgccgtttcagatgcataaaggatacgtttgttattcagccgtgctccggcgctgctgccattgaggttatcgaaactgatcgcccctttgatcgcgcgcgccagcggcgaggcctgcacggtgagtccgttaccgtcaagcttgaccttcgcaccgccttccgcccagaagacgctgttgttggtcagcaggtagcggtactccggcttgatatgcagatcgatatcgaatgcatccttgcgcggtttgacggcgatgatctcgccgacggcgaatttacgatacagcaccaccgagccggcctgaacgtcaggcagcgtctcagcagacaggctcagggtagtggtcggcacttcgctcaggctattttcctgcgccttttcaaggttagcgtacagcggatagctgctttgcattttgcctttttcgccggggatcaccctgatcccgccgttcacccattcgctggcgctggcgcccagcacctgcacgccgtcgagccccactttgacgtccagacgactgttaaccacaaatttgctgtcgccgtgaattagatcgcggtattcagggtcaatggcaacctgaaaggttacccctttggccgtcagtttacgctccagcacctggccgacttttactccgtgcagcaccagcggctgaccgccgtcgatgccgtagctctccggcgccgagagggtaacggtggcgacgttgggctcatccagcagcgctttatccgccggcattaccgagaagtgattgcgtggctcgccttcgccgggcaccagctcaaaggtattgccggtgagcagggtgctaatgctggggttatcgagggagagcttcggcttcttcatctgaatcagcgttttctcccgcagcagcgtcaccacgctcgggtcgacggtcatctcgccagtaactttgccgccggtgtttagattcagtttgcttaactggcccacctccagcccctgatacatgagcggcgtcgagcccgctttcagtccgtcgccatcaggcagatcgagggtcactaccacgccgcgctggctatgcgccagatcttcatacaggtgatattcatcgttttgcgaggcgacatgcgaatcggcgggggagtcaaaggcgatggcgccgttcaccagcgcggacaggttctccagttgcactttggccccgctcaggccgacgtcggccttgacgcctgagacgttccagaagcggctgccttttttcaccagattggtaaaccggcgctcgattagcacatcgatggtcaccccctgattattggcattcagggaataatcatacactcgcccgaccgggatttttcggaagtagaccagcgagccgctgttcagagagccaagatccggcgcctgcaggtggatcattagctcgccgttgttgatgcggtatttaggttgggtgtcgagggcgacaaagtgatcttcgggttcacccttgcccggcatcatgccgatgtagttcccgcccaccagcgcatcgaggcccgatacgccggccagagaggctttcggcgtgaccagccagaactgggtctctttgcgcagcgcatctttcatatcgcgtttgatgctggccgaaacctcaatcttactcagatctttactgaggctaatatcctggacggtgccgacttcaaccccctgatagcggatcggcgtccgtcccggcacgatgccgttcgcggactggaaatcaatcgtaatcgtcgatccgcgatcgtcaaagctggtccagattagccaggcggcaatcagcaacgcgatgaccggcagcagccagaatggcgaaatacggcgtttggtttttattctggcttcagtctgcgaagcgggcgtttcctgactcatgtgcgtcccaaagtaagcggctgtccagccattcaactgcaagaatagttaaaattaccgcgccgccaaagtaaaccgcagccggccccatggtgaaggcgaggagctgatcgcgatttattagcgacatggtgagtgagataacaaacagatccagcatcgaccaacggccaatccaggtgattagccgcagcagcaggatgcgggtgcgcaatccctgctcgcacttgaattgtatgctgagcagcagggtaaataacactataactttggtgaatggcaccaaaatactggcgataaacacgaccccggcaatggcgatattgctgctggccagggagatgatccccgagaggatcgtgtcgtcctggcgcgcgccgttgacgtagataatggagattggcaacaggttggccggaaagaggaaaaccagcgaggcaatcagcgccgcccagctgcgctgcaggctctgcggtcggcgatgatgcagcggcgtgtggcagcgtcggcagcggccgcgcgcgtcgcgatagccggtgtaatggcagccggtgcacacctgcagattattatcggcgcgggtcgccggacgctcgggatagaaacgctcccatagctcttcgacgttcatatgaataagcgtcaggatgctcaacaacgtcagggagataaacgccaccagaccgatgcccggctgcaggaaggcgtaatcctgcaccttgatggaggcgacgccgatgcccaccagatagatatccagcatcacccactctttaagcttgccgagcatcagcagcaccggccgcaggttcatccccagcacattgcccagccagagatagctgatggagaccaccagcagcaccggggcgaccaccgcgcaaaacagtaccatggcggcggtaatcggatcgccctgcgcggtcatctgccagatcccctgcaggacgttggcgtcgatgcgtacgcccaacagatgcaggcgcagcagaggttcagaccaggcgaaaggcatgagcaatagcatcgcgagggccatgctgcccaggcgggtcagcgaccagtcgcgaccatcgcgcaccttcgcgttacagcgcggacaccaggcgctttggttgcgtttgagcaccggtaagcggaagagcatgtcacactgcgtacagcgctgataatgcgcatagggaagcggcgtgctgacggtatgcacgaccatctttttcgcaggtttgagggtgggtgtttttatcggcatttattacgtacaggaatgaatgtatctcactatcttaacctatgaatgaattcatcttgagcccaagcgcatttaatgcttattttagtaggctgtacgtatcaggcagtaagacaacaaagtgaagatataatgagcaaaacagaattttacgcggatctgaaccgcgatttccaggcattaatggcaggtgaaaccagttttctggcgatgatcgccaataccagcgcgctgctgttcgagcggctgagcgaggtcaactgggccggtttctaccttctggaaggcgataccctggtgttgggaccgttccagggcaaactggcctgcgtgcggatcccggtcgggcgaggcgtatgcggcgcggcggtggcgcaggctcaggtccagcgcgtcgaggacgtccacgcctttgacggccacattgcctgcgatgccgccagtaattcggaaattgtcttccctctgcgcgtgaatggccagattatcggcgtgctggatatcgatagtccggcttacgggcgcttcaccgctgaagatgagcaggggttgcgcacgctggtcgagcatctggaaaaactcattgcggccacggattatcaaaaaatctttacccgtgtcgtgggataatcaacggataacgtagcatttagcgaggacgtcattataatgtcgcctgttcatgcctgcggcttgttggctacgtccgttgtaatcaggaaatttcatggaaaatcaacctaagttgaatagcagtaaagaagttatcgcctttctggccgaacgtttcccgcagtgctttagcgctgaaggtgaagcgcgccccctgaaaatcggaatttttcaggatctcgttgagcgagtgggtggtgagatgaatctcagcaagacccagcttcgcgctgcattacgtctctacacgtccagctggcgttatctgtacggcgtaaaagccggcgctattcgcgttgacctggatggcaatccgtgcggcgaactggaagagcagcacattgcccatgcgcgtcagcagctggaagaagcgaaagctcgcgttcaggcgcagcgcgcagcccagcaggcgaaaaaacgcgaagccgctgcggccgcaggccagcaggatgaaggcgttcgccgcgagcgtaaaccgcgtcctcagcagccgcgtcgtaaagaaggcgctgaacagcgtaaaccgcgtcctgttgcggccaaagccccgcgtgaagagcgtcttactccggtatcggatgtttccgttctgaccgtcggccaggcgctgaaggtaaaagcaggcaataacgccatggacgccaccgttctggaaatcaccaaagatggcgttcgtgtacagctgacttctggtatgtcaatgattgtacgcgcagaacacctggtgttctgaaacggaggccgggccaggcatgaacacattttttaaaatcaccgcgcttgcgggcctgctggcaatagcaggccatgcattcgctgttgatgacataacccgcgcagatcaaatccccgtgctgaaagaagagccgcagcacgcgacggtaagcgagcgcgtgacgtcgcgctttacccgctctcattaccgtcagtttgatctcgacaacgccttctcggcaaagatttttgaccgttacctgaacctgctggactacagccacaatgtgctgctggccagcgatgtggcgaagtttgcggctaaaaaagaccaaattggcgatgagctgcgcagcgggaaactggacgtcttttacgacctctacaacctggggcagcagcgccgcttcgagcgctatcagtatgcgctgaaggtgcttgaacgtccgatggactttaccggcaatgataatttcaaccttgaccgctccaaagcgccgtggccaaaagacgaggccgagctgaacaagctgtgggacgctaaggttaagtttgaccagttaagcctgaagctggcgggtaaagacgataaagagatccgcgacaccttaacccgtcgctataagtttgctatccgtcgcctggcgcaaaccaacagcgaagatgtcttctcgctggcgatgaccgccttcgctcgcgaaatcgatccgcacacaaattatctgtcgccgcgtaataccgagcagttcaacaccgaaatgagcctctcactcgaggggatcggcgccgtgctgcagatggatgatgactataccgtcattaattcgctggtggcgggcggtccagccgcgaaaagcaaagcgatcagcgtcggcgatcgcatcgttggcgttggccagaccgggaagtcgatggttgatgtcatcggctggcgtctggatgacgtcgtggctctgattaaagggccgaagggcagcaaggttcgtcttgaaatcctgccggccggtaaaggagccaagacgcgtattgtaacgctgacccgcgagcgcattcgtctggaagaccgtgcggtgaagatgtcggtgaaaaccgtcgggaaagaaaaagtcggcgtgctggatattccaggcttttacgttggcctgaccgatgacgtgaaagtgcagctgcagaagctggaaaaacagaacgtcagcagcatcatcattgacctgcgcagcaacggcggcggagcgctgacagaggcggtatcgctctcgggtctgtttattccgtccggtccggtggtgcaggtgcgggataataatggcaaagtgcgcgaagacagcgacaacgatggcgtggtttattacaaagggccgctggtggtgctggttgaccgctttagcgcctcggcgtctgagatcttcgccgcagcgatgcaggactatggccgcgcgctgatcgttggcgaaccgaccttcggtaaagggacggtacagcagtatcgctcgttgaatcgtatttacgatcaaatgctgcgtccggagtggccggcgttgggttccgtccagtacaccatccagaagttctatcgtattaacggcggcagtacgcagcgcaaaggcgtgacgccggatatcatgatgccaaccggcaatgaagatcgcgaaaccggcgagcagtatgaagacaacgcgctgccgtgggatagcatcaacgcggccacctatgtgaagtccggggatctgaccccgtttggaccggagctgctcaagcgccacgacgagcgtattgcgcaggatcctgaattccagtacatcatgaaggatattgcccgttataacgcgatgaaggacaaacgtaacatcgtctctctgaactacgcccagcgtgagaaagagaacgaagaagatgatgcgattcgtctggcgcggattaacgatcgcctgaaacgcgaaggcaagccgccgctgaaaaaactggacgatctgccgaaggattaccaggagccggatccgtatcttgatgaaacggtccatatcgcggtagacctggcgcatctggaaaaagcgcgcccggcggtggaaccgccggctagcaaataagttgctaacgggcaccctgagaggtgcccgttttttttgtgcgcgttgtcatcgccattcagctcatctaacaaaatgtcaacctgcgctgccgctgtcagcaagatgctacaaaatgtaaagttgtgtttttatcgtgacttagcgggggctgatggttgaaaattgcagcctgacccatacgatgtgggtaatcgcatagtgcgttttgttaaattgaggtaaaaagaaaattatgatgcgaatcgcgcttttcctgctgacgaacctggcagtgatggtcgtgttcgggctggtgttaagcctcacggggatccaatccagcagcatgaccggtcttctgattatggccctgctgttcggcttcggtggttctatcgtttcgctgatgatgtcgaagtggatggcgctgaagtcagtgggtggggaagtgatcgagcagccgcgcaacgaaacggaacgctggctgatgaataccgttgcgcagcaggcgcagcaggtaggtattgccatgccgcaggtagctatctatcacgcgcctgacattaacgccttcgccaccggcgcgcgtcgtgacgcctcgctggtcgccgtcagcaccgggctgttgcaaaacatgagccgtgatgaagcggaagcggtcattgcccatgaaatcagccacatcgccaatggcgatatggttaccatgaccctgatccagggggtggtgaacaccttcgttatctttatctcccgcgttatcgcgcagattgcggccggtttcctcggcggcaaccgggaagatgaaggggagagcagcaatggcaacccgctgatctacttcgcggtcgctacggtgcttgagctggtgttcggtattctggccagcataatcaccatgtggttctcgcgttaccgtgagttccatgctgacgccggctcggcgcgtctggtaggccgcgagaagatgattgcagccctgcagcgtctgaaaaccagctatgagccgcaggaagccagcagcatgatggcgttctgcattaacggtaaagcgaaatccatgagcgaactgtttatgactcacccgccgctggataagcgtattgaagccctgcgtagcggtgaatatctgaaataatctatcttctgacgctgaaaacgaaaatccgcagcccgcaagctgcggattttttttaccgtccgtcaggctgcgcgcggctgagtgacccgcagaccgctaattagcgcggcgacgatagccagggtgccggccagcagcagggcggtgtgggtgccgttgttaccgagcaaattgaatagcagcgccaccagcgccgcgccggtgctctgtccgagcaggcgagcggtgcccagcatgccgctggcgccgccgctacgatggctcggagccgaggcgacgatggtatggttgttcggcgactgaaacagcccgaagccggcgccgcacagcgccatgcgccagatgatatccagatcggagggcgacgagggcagcagcgccaggccgaacaggccgcaggccataatcagcaggccgatagcccccagcagcccggcatgacatttctcgatcaaatagccggccagcggcgccatcaccatggtcgctaacggccacggcgttagcagcagacccgtctccacttcgctgcgccccatcatcgactgcagaaaaaagggcagggagaccatcgccagcatctgcgcgcagaaggagcagatggaagtgcagatagagagagagaagagtgggatacgcagcaggtcgaccggtagcagggggacgggcatcgtgagctggcggcgaacgaagaagaaccccaccaccagcatagcggcgacctccgccagcaccagctgagtggactgcccctgggcgaaaccgctcagggcggtgatcagcagcccgaaggtaagggcgttcataatggcgctcggcagatcgaagcggatgattttgctgcgcgcgctgttgggcggcagaaagcgcatggccagaacaaaggcgacgatgccgagaggcacgttaattaaaaacagccattgccatgaggcgagggagaggatcgctgcggcgatagtcgggcctgccgccgaagagacggcaacgacaaaggagttaatgcccatgccgcgaccaagaaagcgctgcggataaatcagacggatcagcgcggtgttgacgctcatcagcgcggcgccgcccaatccctgcgcgacgcgagcgaaggttagcatttcgaggctacgcgacagcgcgcaggccagcgaggtaaagataaacaccaccaggcctatcttatagatacgccgatagccgaccatgtcgccgaggaaggagagcggcagcagggcgatgacaatggcgatttggtaggcgttaacgatccagattgaagccgccggtgaggcgttgagatcgctggcgatagtcggcagcgcgacgttggcgatagccccgtcgagcacggccatggtcagcccaagcacgatggtcagaatggcgccatagcgttgcggcaacggcacgccatcagaagaatttttatccatggtgaatatgagtcttaaatgaaacggttttttgaatgatgagtttagcattgattaattcgcagtatgtcgcagatttgtaacgaagtggcagaagaatgattgcggctcagaggcggcgaatttataataaaaaccggttctaatttttataaaacagttacgacgaggtgataaatggcaggtgcagatttggataaacagccagattctgtctcttcggtattgaaggttttcggcatcctacaggcgctgggtgaagagcgtgaaattggcattaccgaactgtcccagcgcgtcatgatgtcgaaaagcaccgtttatcgctttttacagaccatgaaatcactgggctatgtggcacaggaaggagagtctgagaaatactctctcaccctcaagctgttcgaactgggcgcgcgcgcgctgcagaacgttgacctggtgcgcagcgccgatattcagatgcgcgaactttcgcggctgacgaaagagaccatccatcttggggcgctggatgaagacagtatcgtctacatccataaaattgactcgatgtataacctgcggatgtactcgcgtattggccgccgcaacccgctgtacagtaccgcgattggcaaggtgctgctggcatggcgcgatcgcagcgaagtggagcagatcctcgacggcgtggagtataagcgcagcaccgagcggaccattaccagcaccgaggagttgctaaaagtgctggatggcgttcgcgagcagggctatggcgaggataatgaggaacaggaagaggggctgcgctgcattggcgtgccggtgtttgaccgtttcggcgtggtcatcgccgggctgagcatctctttcccaacgctacgtttctctgaagaacgcttgcatgaatacgtggcgatgctccaccaggcggcgcgtaagatttctgaacaaatgggatacaacgactatccgttctgaggcggcggataacggggttggcgaccgcggcgctacgtcgcgatcgccggttcgatgttagccgttatcaaccacggttgtgcttttacgcagcagagggcaactgctgacgccgatcactccgctgtcggaatgaacataaagtgcggtgctgactccgcgggcggtgagatattggcacttaagacccagaccgccgacgttttcctcactgtggaataacaccccataaccgctcaataatacgccaatccataagatagccaccaagataatagtacgaatgattaatcgcattgatgcctcattatttgtatgatccctggcttgattttgacacgaacacgttttgaaacaagtcgatgattcctaaacttacctttcgtaatacagttagccgcggtttaagaaggccgtgctatcctggcgacattgcgtactgatgcggagagtggagtgaaaaaattacggtgggttttactgatagtcatcatagcaggctgcctgttgctgtggactcagatgcttaacgtaatgtgcgaccaggatgttcagtttttcagcggcatttgcactattaataaatttattccgtggtaagacatttttctgccgactgatttccttctgcgccgcgggtggtagaatgaacgccttctctttgaggtggtgaaatgagtgagttactaaatcctgggattttaaatctggcatcgctggctgtgtccgtggcgctgctgcttgtcggtctgttgttatggttcttcgtcaaccgcgccagttcgcgggccaatgagcagatagagctgctgcaagcgctgctggatcagcaaaagcggcagaatgcgctgttacgtcgcctgtgcgaagctaatgcgccagagaaagaggatgtggctgagccgaccgtcgccggcaaggcgaaaggggaggatgagtttatccgcctggtagctgaacgttaaggtgcccgacaggtgtgcatcataagatgcgcacctgcatgatagcgggcggtaatatcttattcttattccattattcctttcttagtgcaatatcctctttattacacgctgtaaataaagtcattctcgccgcgtttattgttgggtaacgtgacactgtcatctttttttcattattaaggtgcagaattagcactatttttagcgtgacgactaacaggttttattatcactacactggcacggcttagcgatttttagcctggagttataacgaattatgcgcatcaatattcaccgttgcccaccagacgcttacattacagcagttcgtgtacggacatacctggacgaagcgaagttgttgagctatggtaaaaaagttgcagtaatgaggcaacgaatgggcgatattggctgatgctgtagcgccttgccaggggcggcaaagacgcataaatgtgcaggcgatcaaatgattaccttataatttgtgcgaacgatcgagacacgtttaaaaatggcttgccattatttacgtagtgtgtgataacacgtttcgggttaaacgaggtacagttctgtttatgtgtggcattttcagtaaagaagtcctgagtaaacacgttgtcgttgaataccgcttctctgccgaaccttaaattagtgcctcatgcagttatgtgtcagttttatctaggtaaacgccagcaggcgaagaaaacagtctaaggaattttgcaaatggcaaagattaaaggtcaagttaagtggttcaacgagtctaaaggttttggtttcattactccggctgatggcagcaaagacgtgttcgtacacttctccgctatccagggtaacggcttcaaaactctggctgaaggccagaacgttgagttcgaaattcaggacggccagaaaggtccggctgcagttaacgtaactgctatctgatacaagaccactcttcttgtataaaagcctcgcctgcgcggggcttttgcatttttattgcaaagcatgtcatttttccccctcccgtcgcgtcttgttgcaaatactcatctttattagcattgtgtagcagtctgttttgctaattttctgttaaatcagttggttgcaaaacaatgccggagctatggtgctaaagaaaaaaacgaagtccgccgccagtttcaccccgattcgcttcgggttactgtgtgtggccattctcggttgtctggggctgctgctggtccgcgtgggctggctacaaattatctcccccgataacctggtaaaacaagaagatatgcgctccctgcgcgaagaacccgtagcggttgagcgggggatgatcagcgaccgggaaggacggccgctggcggtgagcgttccggtcagtgctatctggatcgacccgcagaccactatggagaagggcggtgtgggctatggaccccgctggcaggcgatggccgaagcgctgcacctcaacctcggagagctggcccagcgggtacagagtcatccccacgctcgctttctctatctggcgcgtcagatcaatcccgagcaggcagagtggattgataaactgcatctgccgggcgtctacctgcgcgatgaatcgcgacggttctacccggcgggccacgtggctgccaatctgctgggctttaccaatgttgataatcagggcatcgaaggggtggagaaaagctttaacgcccagttgaccggtaaacccgggcgacgtctggtgcgtaaagataaacatggtaatgtcattgagaacattaccgaagtgccgccggtaccggcgcataatctgcagctgagtattgatgaacgcctgcagacggtgacggaagacgccctcgacaacgccgtccgctggaacaaagcagagtccggggcggcggtattgatcaaaattgataccggcgagatcctggcgatggccagctatccggacttcaatccgaacaatcgcgatagcgcgacgctggatgattttcgcaaccgggccatcagcgacaccttcgagcccgggtcgacggtcaaaccgctggtgatcatgactgcgctgcagcaggggattgtccagccagacagcgtggtggatacccatccgttcgtcctcgatggccatcgtattcgcgatgtgggctattatccggagctgagcctgaccgggatcctgcagaaatccagcgataccggcgtgtcccacctctcgctcgccatgccggtgcagcatctgatcgatacctataaagctttcggcttcggcgaaccgacggggctggggttgaccggcgaaagcgccgggctgatgccgcatcgccgctactgggggcaactggatcgcgccaccttcgccttcggctatggtttgatggtcaccccgctccagctcgcccacgtctacgccaccatcggcggcttcggcattgcgcgaccactgtcgattacccgcatcgatccgccggtgatgggcacgcgggtgatgccggagagtattgtgcatagcgtggaacatatgatggagagcgtggcgctcccgggcgggggcggtaccaaagcggcggtacgcgactaccgggtggcggtaaaaaccggcacggcgaagaaaatcggcccggacggcaaatatatcgataagtatgtggcctataccgccggcgtggcgcccgccagtcgaccacagttcgcgctggtggtggtgatgaacgatccgagcaatggttcctattacggcggcgctgtgtccgcgccggtcttcagccagatcatgggcgatgtcctgcggctggagaacgtcatgccggacggcatgccgcaaggggcggagaatctgatcgtaatgcacgatagccacccacaggggccggcgctgtaacagtggtctgcaggggcgaatagcgctacactttcgccctttcagcaacaccggagccgtcatgtcatacagttgccccctttgtcacgcgccgctcagccgtagcgacaaccactattcctgcccgcagcggccccagttcgacctggcgaaagaggggtacgtcaatctgctaccggtgcagttcaagcggtcgcgcgatcccggcgatagcgccgaaatgatgcaggcccggcgggcgttcctcgacgccggacattatcggccgctacgggatgctatcgctgagcggctgcgacattacgcccctacggatttactggatatcggctgtggcgaggggtattacacccacgcgtttgccgcgatcgccagccgcagctgggggctggacgtgtcgaagccggcgatccgcgcggcggcaaaacgctacccgcaggtgaatttttgcgtggcctccagccagcgcctgccattttccgacgctagcttcgacgcggtagtgcgcatttacgcgccctgcaacgccgaagagctggcgcgggtggtgcgtcccggtggttgggtgatcaccgccacgccgggtccccgtcacctactggagctgaaagggctgatttacgatgaagttcgcctgcatgagctgaagacggaagcgatgccggggttccgcctggaggctcagcagcagctggcttacccgatgatcctgacgggaagtgaagcgcaggccctgctgcagatgacgccgttcgcatggcgggctaaagccgaagtgcacgccgcgctgcgtcagcagccgacctttggttgccagaccgattttatgatccactgctggcagcgcgaagcgtaaagcttaaccggcgaaatggctccagaggatttcgctgccgatgccaatcagcacgataccgccgagaatttcggctcgtttgccaagcagcgggccgataaagcgaccgaccatcatccccagcgtcgacatgataaaggtggcgcagccgatcgccagcgcggtggtcacaatgctgacctgcaggaaggccagaccgacgccgacggccatcgcgtcaaggctggtggcgaaggcggtggtgaccagaagccagaaaccatgtcggtgaggcgcctcgcacgcctcgtcgctgtcgccgcgaaaaccttcgacgatcattcgcccgccgagaaacaccagtaaaataaaggcaatccagtgattccactcgaggataaactggctggccagcatgccaagcccccagccgaccagcggtgtcagggtttcaatggcgccaaaaatcagcccggtgcgtactgcctctgaaaatttgggtttatgcagggtggcgcctttgccgatggaggctgcgaaggcgtccatggacatgccgaaagcgagaagaatggtagcggataaattcatgtgcgtgtcctgaccggggataatccatatgacacatcgctgcccccagtaaacatacgcggagccgctcaatggctgagcaatacgtacagcagtgatgtatctatggtctcgcctgattgaatctcttcaacccgtacgtgccacgttttgcaacgagtatgttgacacgtacatttcctggcgggcaggaaatcggctactccccaacgacgggcgcaaccttaacatatttttagaatataaaacaataacagaagagggctattttaataaccaaatgataacgattttcatttaaatttataagtgaaaaaatagttaataaaaaagataaggttaggcgggaaatatagccgtggctataatatttctccgctgctaacgggaataatatagcgctggctatatttttaagtcattgagttgtaatgagaagtttgtatatcttctccagatcgtcgatatttcgtacgcgtatcagcagccgccgttgctctaattgcatcaccagcacaccgtcctcggataaattcatctctttaatccgctgatattctatccacacgttggcgaagaaaaagccgcgcggtttaaaaatgattttcggcgtacggatccagaataaatagagccccatcagcgccagcacagataatagccaggtggtgatcgccgtgccgtgctgggtgatgttgttatagatcagaatggcggtgaggccgacaaagatcatgccgtcaacgcgactgcggcggagcagggggatggccagcagtaccgggccgtttcgcctcggcataataaactggtcatatatcgcgtaggccagtagcgcaaggataaacaggatgatcaccaggtccgtgaaggtcattgctttgcgtttctcctgataaaaaaaagccgggggcaagcccccggcgtacagcctggaaattacagacccagcaggccgaccgcgtagccggcgataccgatgacgaagaagccaacgatgatccacagcgggttaactttcttacgcagcagccacatacaggcgaaggtcaacagcagcggcaccagaccaggcatcagctgatcaaggatagtctgcaccgtggtgacgtgaacctgtccgtcagagccggtgatttttgacaccaccatcggaatgttcacatgcgtccacttgttaaccagcgcccccatgacaaacaggccgaggattgacgccccctcagtcagtttctgcaggaagccgccgcccatatctttaacgatatccacgcctttgcgataaccataggcgacaccgtagtaacgggtcagcagacgcaccgcgttgaacaggataaagaacagcagaggaccgagcaggctaccgctcatcgcgatcccggcgcctaaggctgcaaacaccggacgcacggtaccccagaagatcgggtcgccaacgccggccagcggtcccatcagaccgactttgatgccgttgatagcgccatcgtcaatctctgcgccattggcgcgctgctcttccatcgccagggttacgcccagtaccggagcggcaacgtaagggtgggtgttgaaaaactcaaggtgacgcttaattgcctgcttacgcgcatcgttgttctccgggtacagacgacgaatcgccggaaccatagagaagcagaaccccagcgcctgcatacgttcgaagttccatgaaccctggaacaggttagaacgaatgaacacgccacgaatatcactctgtgtgagttttttctcggtggtatttttagtcatatcaaccatttcgctcacctgttagtccagttcgttatcgagatcgttgttaccagccgcctgagccggcgcaccggcgacgcggttatatttcgggctcagctggatgtagaggattgccatgaccgcaccaatcacgcccagggccaccaggttgaagttggtgaaggcggcggtgacgaagccgaggtagaagaacggcatcagatagcctgcgcgcatcatgttgatgaccattgcataaccgacaaccacgatcataccgccggcgatgttcagaccgctggtgaccacttccgggatagcattcagcaggccctgaacttcgctggtgccgacggaaatcgccacgataacggccgggatagcgatacgcatcgcctgcaggaacagggacgagacgtgcagccacgacagggcggtcaggttgccattctccgccgctttatccgccgcgtgctggaaggccacggtgatggtgcgcacgatgatggtcagcacctggcctgccgccgccagcgggatagccagcgcgataccggcgccgatgctctgatggccggcaataaccaggacggtggaaataatggacgccagcgcggcatcaggggctaccgccgcaccgatgttcatccagcccagggctatcatctccagcgtaccgccgatgataataccggttttcatatcgccgagaacggcgccgatcagcgtacaggcgatcagaggacggtggaactgaaattcatcaagtaccgactccatacccgcaatacacgcgacgatgaacaccagcacaatctgaagaagggtaatctccattgtacttctcctgttgattaagtcttaaagtgaaaactggggcgcgatccgccgggttatttatcaaccttagcgatcagatccatcattttcagtttcgggtcggtggacactttacgtgcctccagctcgataccgcgggcgttcagctttttaaacgcctcaatatctttggcatcgactgaaatcgcgttgttaacctgggttttaccctggcggaacgccataccgccgatgttgacgctggtgattttcacgccgccctcgacgatacgttcaacgtcggtcgggttagtaaacagcagcataacgcgctgtccggcatacttggggttgttgtagacgcggatcattttggccacatccaccacgtgagcggtgacgcccggcggcgcaacctgggtcagcagagttttacgcacggtatccgcggccacttcatcactgacaacgatgatgcgggtaacgttggtctctttggtccagcgggtggcgacctgaccatggatcagacggtcgtctatacgcgcaaggccaattaccatgtagtcgttcgggcccatgggtttggccggtgcggcggcttttggcgctgcggcaggcgcgggcgcaggggccgctttttccaccggtttggctttaagcgctttcacgccttcgctgccggtttcaaccgctaaggcgaccagttcatcaaaggaaggatcgtcgtcgcgggccatgaaggtttccaccagcatcgggatattgacgccggcgataacttcgtaatgctctttatcgacgacaatgcggctcgcagcgttgaaagggctgcctccccatgtatcgacgagaaacagcacgcctttactggtatccagttttgccaactgggcgttgtatttctcgatcaacgtttcggcattttcacccggaacgaaatcgatccagccaacgttttcctgctcgcccaacagcatttctgctgttttcagcagctgttctgcagcccaaccatgtgtgcctattacaatagcaatcgtcacttgctacctcctttattatcgtgaatgcatcatctgctttgatacatcctgaatcactcttgaggacaaaatcgattcagttagggtgtaagatagaaaatagttactaccgcgaattattttagacagtgaaaaaataattaatgtgatgaagatccgttaatcacgtatcgtctgcgaataattttgcagcgcaaaaaatagccttagttattgcaaattcaggtaaattatttccaatttcgatctatattttgctatgtttaacttccgtttaattactcaggagtatagggcatagcccgcagtatggaccgtcatcgacgtcttttcactttctggcatctgattgccacctctacgtatcccgcatttctttcagcacctggtgtcgcgcccctgcatggcatggcaatgactgaccttgccgcaaaccggagtcgtacatggaattgttaatggatccctcaatctgggccggcctgttgacgcttatcgttctggaaattgtgctcggtatcgacaacctggtgtttattgccatcctggcggacaaactgccgccgaagcagcgcgataaagcgcgtctgatcggcctgtcactggcgctggtgatgcgcctggggctgctgtcggtcatctcctggatggtgacgctgacgaaaccactgattaccatcgccgatttctccttttccgggcgcgatctcatcatgctgctcggcgggatcttcttgttgtttaaggcgacaaccgagctgcatgaacggctggaaaaccgccagcacgatgccggtcacggtaaaggctatgccagtttctgggtagtagtattgcagatagtggtgctggatgtcgtcttctccctggacgccgtgatcacggcggtcgggatggttaaccatctgccggtgatgatggcggcggtggtgatcgcgatgatcttgatgctgctggcctccaagccgttgacgcgctttgtcaaccagcacccgacggtggtcgtgctctgtctgagcttcctgttgatgattggccttagcctggtggcggaagggtttggcttccatattccaaaagggtatctgtacgcggcgatcggtttctcgatcattatcgagttctttaaccaggtggcgcgccgtaactttgttcgccaccagtcgacgctgccgctgcgcgctcggaccgcggatgccatcctgcgcctgatgggcggccgcaaacaggcctccgtcagccatgacgcagacagtccagccgcggtgcccgttcctgagggcgcctttgcggaagaagagcgctacatgattaacggcgtgctgaccctggcccagcgctccctgcgcagcatcatgaccccgcgcggagaaatcagctgggtcgacgctgagcagagtgaagatgaaattcgtcgtcaactgctgtcgtcgccgcacagcctcttcccggtctgccgcggagagctggatgaaatcattggtatcgtgcgggcgaaagagatgctggtggccctggagtcgggggaaaacgtcgcggcgctggcttctgcctccccggcaattgtcgttccggaaacgctggacccgatcaatctgctcggggtcctgcgtcgggcgcgcggcagcttcgtcatcgtaactaatgaatttggcgtggtgcaggggctggtcacgccgctggacgtccttgaagccatcgccggtgaattcccggacgctgatgagacgccagagattgtcatcgatggcgatggctggcttattaaggggtcgaccgacctgcatgcgctgcagcaggcgctggggctggatccactgatcaatgacgatgaggatattgccaccgttgccgggctggtgatctccgctaatggtcatatcccgcgcattggcgacgtcgtgtcgcttccgccgctgcattttaccgtagtggaagcgaatgattaccgggtcgatctggtgcgcgcggtggtcactcgtccgccgagcgacgaagaagagtaatcgccaggctcgccggccgctgcggccggcgagttattctgtcgtctcgctctcaccctcaccctcactctcactctcctccctgctggccagccacgccgggaacgcctccaccggcatcggccgcgcataataaaacccctgcagcacatcgacgccgtggctacgcaggtagttttcctgctccagcgtctccaccccttcggcaacggtaacaatatgcaggcggttggcgagggcgataataatatctgtcaccgtcgcgttcacgctatctatgccgaccgagctggtgaacgagcggtcgatcttcaggacgtccgggcgcagcttttccagccatgagagcgaagtattgccggtaccaaaatcatcgatcgccagctgtacgcctttaaagtgcagatgttcggccatatgctggtcgccatcctgcaggacatcgcgttcggttagctcgaccaccagctgctgcaccggatccacgctgaaccagtaattgtgcaggtcgcgcagcaggagtccgttagcgaaatggcgcgcggcgacattgatcgcgatgtgaaaatggcggtcgcgaggaaaagcgtccaggcggcgagcggtttcggcaatcacatagcgggtgagagggatgatcagattattgccttcggcgatggggataaatacctccggcgaaatcgtcccacggcggggattattccagcgcagcaggatctccaccccgcagcagcggccgctgcgcgcatcctgcagcggctggcaccagagggcaaactcccgggccgaaatgccaaggcttatttcccgcgagaaactcattctgccggcggtggccagccaggcgatgccggtcattagcaggctaaaaatcagcgccagcggcagctcgccgggcagctcctcaagcgcaatcgccgaggcgccagggccgttaatattgacagtaaacggaaactccgtagagcgctggcgataaatcaccgtgccctgcgggacatgcgttttttcgagaagcccatggcggctgctaaaataacgatcgccaacctgcaggctgacgtcgctgatcagggccgatttttcattaagaattaaggttcccagcagctcaatattcaccaccagcatcacgccgtccaggccgctctccgcggctggataccattggatcagtaccggcgagcctttgagcaaggagctgtcgttcgagaagagcagcagagggcggggcacaggaagcgcgggctgcaggcgatgtaagtctgcctgtcgcgggccaaaaatactggaacagtaaacgatacctgacgtgacgagggcgacggaacgaatggtttgcaacgaggccgccattttgcgcagcgtcagatggatatcagggcagggtttgcccaccagagggagcagggtggctcgctgcgcgcttagcgggcgcaagatgtcattgagcgccgccacccgttggctggcggccgtgcgaatataatcttcatttacgctgcgctgcgaaataaatcggatggctaatgtggcgcccagggtcgccagggctaccagcaggcagacaataatgcgtttgtgacgataggccgtaatgactttttgtgcagtctgcatgtgcgacaccctgtcgacaggacgagtggttaagcgtggcttattttatagagcaagtgtagtggcagaatatcgccaggtatagaaaaaagaaaatgcgccgttgaaggcgcatcagggagatttcagtcaccagggttaaccccctgcgcgctttgcaggcgcagagggacacgaatagtttagtcacactgaactttaatcgccaggccgccgcgcgaggtttcgcggtacttggcgttcatgtctttaccggtttcatacatggtctcgatcaccttatcgagcgagacgcgcggttcgctggtgcggcgcatcgccattcgcgcggcgttgatcgccttgacggaggcgatggcgttacgttcaatgcatggcacctgcacctggccggcgaccggatcacaggtcaggccgaggttgtgttccatgccgatctccgccgccacgcaaacctgttccgggctggcgccgagcagttcagccaggcccgccgccgccatcgagcaggcgacgcccacctcgccctgacagccgacttccgcgccggaaatggacgcattcatcttatacagcgcgccgatcgccccgcaggccataaagtagcgaatatagatctccgggctgacggactcgataaagtgatcgtaataggcgagtaccgccggaacgatgccgcaggcgccgttggtcggcgcggttaccacgcgaccgccggcggcgttctcttcattgaccgccagcgcgaacatattgacccagtcaacaacgttcattggatcgctggagagcttatcgctggccaccagcagacgacgcagcgccgaggcgcgacgcggtacgcgcagcgggccaggcagcacgccctcggtgttcatcccgcggtcgatacaggcgcgcatggtttgccagacgttggcgaaataatcctcgatctcttttttgctgtgcagagccagctcgttctgcatcaccatcccggagagcgacaggccagtctctttgcagtaggccagcatttcctgcgccgatttaaatgggtagggcacctgcagttcgttggcgttttccttgccgaagtgctcttcgtcgacaataaagccgccgccgatcgagtagtaggtcttgcagtagatctctttctcgccggcccaggcgtgaatggtcatgccgttttcgtgcagcggcaggttgtcgctgcgaaaacgcatgccgtcatccgccgggaagtcgacctcatgctggccgttggccagcagcagacgaccacgcgcttcgacgtcacggataaaagccgggatcgcgtcaatatcgaccgtatcgggctgattgcccgccagtcccatgataatggcgatgtccgtatggtggcctttgccggttaatgacagtgaaccgtagacgtcaaccgccacacgagtcactgcattaagcaatcctttttcgaccaggtcatcgacgaactgttttccggccttcatcgggccaacagtgtgggaagatgagggaccaatccccaccttgaacatgtcgaatagactaatcacgataatactcctgacagggttaccgcgggtgcggtaacgatgtaataactgcgcatagtgtaagagggaagcgccctgtcagttcaactattcacatgaattaaactaatggctaaccgcgattttactaataatgagagcgccctctcattatcagtatagctaaggacgtgcgccaatttgcagcgccagctcgcgaatgatcccggcggtcattccccagacaaaataatgctggtaccaggagagccagacgcggtggtcgttgccccggcggtggatatcgagcggatggtagcgcccaaggcgcagggcttcggcgagcggcatttcaaataccgcggagacttcgtcctggctggcgtgatagtgcagatccgggggaataatgcccaccaccggcgtcacctgaaagccggtgacgctgtccaccggcggcaggacgccgatcacctcgaccgcctccggcgggatcgccacctcttcctgagcttcgcgcagggcggcggcgataagcgtcgcgtcggtattatctactgcgccgccgggaaaggcgacctggccggcgtgcttgcgcagcagcggcgaacgctgggtcagcagcaggccgggctgcggccggcgcacgatcggcaccagtaccgccgcctgccgctgattgagcgcatggcgcgaaggctgcgggcgcagaagctgaaagcgggacagaaaatcatccagattaagggcgcgatccgccatggtctagttctccagttgctgcaggatacgattaactttatcaaaagtttcctgatattccgccgcttcctcgctatccgccacaattccgccgccggcggagcagtacagctgtccctgccatgccgtcagggtgcgaatggtgatgctggtatccatattgccgcaatagctcaggtagccaatgctcccacaccaggcattgcgtcgctggggctccagttcatcgataatctccatcgcccgcactttcggcgcgccggtgatcgagccgccgggaaaggcggcgcgcagcaggtcgctggcgtgcagcgtcattggcaggcgggcggtgatggtgctgaccagatgatggaccgccgggaacggctccaccacgaacagctcggggacccgcacgctgcccgggacggcgacgcggccgatgtcgttgcgcatcaggtcgacaatcattaaattctcggcgcgatctttcggcgaattcgccagcttctcagcctgctgcgcatctgccagcggcgaatcgagccgcggcagggtgccttttatcggccgcgtctggatctccccctggcgcagctggataaagcgctccggcgacaggcttaaaatcgccccttcatcgaggcgaataaaggcgctaaagggggcgcggttgacggcgttcagctggcggaaggcctgccattcatcaccgacgtagctggcctgaaaacgctgggcgaggttgacctgatagcagtcgccgctgtgcagataggcctgtacctggcgaaatttttcgccgtactgctggcggctcatatttgactgccaggcagaggtcagggcgaaaggtttcatcgccggacgtgattgcgccagcagccactggaaacgccgctgaggatcgtcatagctgagcagcgatatctgttggcgctggtggtcgacgatcagcgcccagtcatagatccccaccgccatatccgccagcgcgatatcggcctgcgcgtgcgaagggagacgctcaaagcgacggcccaggtcgtaaccgaataatcccagcgcgccgccgagaaacggtagatcgtcatggggttgcggcgtgaacggctgacgatccaactgctgctgcaggagctgcagcggatcttccgctgagacaacaacggtttcgccgtcgtcgacccacgtctgttcaccgcgcgtcagcagcgtggcgcgcggggcagccaccagaatatcaaagcggttatgcggatggtcggcaaagccggaatgcagcagcatcgcccagggcagggcgcttaacggcgcaaaatagtgttcggccgcatccgggcgccagggcagggtaataatcgcgggggacaacatctttctcgatcctgaacgttgccgcccctctggcgtagttggggacggcgtgaaataattacgccccacaatgtagcaggagtaaaagatgtttgcaggtttaccttcgctgagccacgagcaacagcaaaaagcggtcgaacgtatccatgagctaatggctcaggggataagcagcggccaggcgattgccctggtggcggaagagctgcgcgcaacgcataccggcgagcagatcgtcgcgcgctttgaagatgaggatgaagatcaagacgaagatgaggccgaagaccagtaaatccgtttcgtcttgctcgggtgagaaaccttacctcctctgcaggatcacatcaggggcccgtccgggttcgtcatatagcatcacctgcgtcatgtgatgactgcgccagaaggtcactcgggttccctttggcgtgggatccacatgagcttcggtaagcgggttaccgttggccagatcccacagaccgacaaaacgcgcctgtggaagatgattgcggataaccagatagctaaggtcggttattgccgggttatcaggggcctgcccttgccaaagctcgccgtcgcccgccagccaaagcgcgatagtgctgccgtcccgcacaaagtggcgcggctgacagccattcagcgacgtcatcgttgccttcttcatatgccgcagcggtccgctgagcgaaaaaggctgcggtgtaccgttctgatccagcgcctcggcagccagatgcagcgtccagtcgagctgctggcgatgcgggttttccaccgttgagagatcgatcaaaacctcttcaagccacaacaggcggcggcgaaagcgtacgtcacgccaggactccaggtcccattcgactcgactatgactgtcgagcgcaggcggcggtttaccccagtcggtctcacaatccagccagaaaacgtcgtcagccatatgccagcccagcaccgtcgggatggcagggggttgattgctctggttaactgacagcgtattatgcgtggcgctgtttttataatagtcataatgcatttccgccccgtagccggtggtgccaggatccggcaacaaccagccgtcgcgctgccatagcatcaggctttgtctgtcgtagtggtcgtgttccccgccccagggactgtgtttaatcagcaccgccagctgttgcttcggacgtcgccacagggtcaaccccgcgcccggtgcaaaaaatgactgctgggggatcggcgttagcggtgactcaggcagcggatggtggcgccacaataacgtctcatcctcgtcaggctccgtttcggtgaattgcagcacggcggcatacagcggatcgcgccagataaaccaggcgaactcgtacagatcccggtgctgtagcttttcctgcccggcaagacagtcattcagccgcgggaatgtgccatccggcagcagcagcgacagcgggaatttcagcatcggctgataccaggggccatccagcaggctccagcgggtgccgcgcgccagcttctcaaaggcgaaaaagccctgcagcgcgtagtagtggtagtgaatcgaaccctcaaaccatagcccctctgccagcaggccattttccagttgccagcgcaagccgtacggctgaaaaacggcaaactccagtagatcctcatcttcgaggatgaagccaagtacagccagcgccgcattgattttgacttcatggttatggatctgcggcgtgcgatgctgccgcaaaaacgtggccgcacagcgcaacaagttttccctgatgtgctgctgttcgccaggcgtcaggctgtcgctaataaaatcgtaacccagcgccatgtccagaatgcagttggcttcgcacagggtctgggcattcattttacccggcccgttgttgggaatatcaccgtggacttcatagcccggataaacatccgcgtagcccatcagtaaggcgcgtactttatcgcgccaggctctctcaccggtcagttgccatagcaggccgagctgctggcatgcgctggcattacgcccgttcatttcgcgccaccacgcgctgtcccacggttcgccgcgaaaaatttcattatcgaccgggcaggcatgctggtggggcatgtccgctcgccacgttaatcgtacgccgtggtgcgggcaaaagtagtagagattccagctggcaatcccggtctgcggaatgcgtaatgcggcatgtagtaccggctgtgcatccttcacgagccgttcgagcagcccgttatgggctgcggcacgttcgacaatattgggccagagcccagtaaattgtttcattagcggttttccctgacctctgaggatggtaaaagcggggcgataagagtggtgatatcgtcggggtatttcgcccgtagccactgcgctttgttacggaacagcggatcttccggccaggcgtgggcggcagtggcgatattgcgcagtgctttttggtcatccatgttatcgatgtctttccatggccatggggtatcgctgttaataaatccggcgatgtactgatagcctttgcgcagactatggtcatcaagggtgaagttccagatatcgacgcccgctttctcgcccagtcgcccgaggcggttgtaggcttcaaggttgaaattactgtagtgccagggccgcgtacgctccagctcggccatctgacggccttcgatatcaaattgaccggcaatgcgccgtagctgggtgagatacaggcgctgtttcgcctcgtcggttttgccgctaaacagggcgaaggtgacggcctgcatgtcaaaatagctgccgtggttgttgtgccagttatcttcttcgaaaccgttctggctggtggtcatccagtgataatactcgccaaaccactgcttcaacgcactcacgtccttctcgctaagcaccgcagaggattgcagcagggcgatagcatccaccacctcaaccagcgcccggctatcaataatgccgataccgcgcccgttgttaatgccgggaatggcttgggcgtattgcagattggggttcatacgcgtctgtgggtcgagaaaccaggtcttcaactgggctgccgctttttgagcgtagcgagcgtcgtgggagaagtaccatgccagcgccagggttgatacatcctgactcatcttcaccaggcggtttttatcggtggcatcgctattggcgtccgggttggtttgcccatctttgcggatatacggcagcccgtctttggtatcgggattcggccaccagtaaggggggaaactatagtagtcgtgcttgttgccgctggcggcaacaagcgttttgtccatcactgagcgcagcggatgcgtgagcgccagatcggctttttttagcaaggccgcctgcgccagaacaaacaacggatctttggcggcaatctgctggcggctaaaggctaaatccttttcgtccagcgtgtacggctcggcggcatgcagagaagcgctaaggctggaacaaaatagcgcaacgcataaccaacctcggcgaggtattgcgttcatggtgataacccttctgcaagtgtgagaaaagataacaacggatttaagcctgtcgcgtatttaaataacgcgtaaaacaggcggtttaattaaaaagaatatatttgaatatacagtggcgagcagtgtaaaagacaaagttattttttgtgtgacgcacatcaaatttatcgctatcgattgataatgacctttttaatgttatgcacatcacggaattcagcgtttttctatattttttgattgtttcaataaaaatggtaaatttataattaattgattttaatgtatattttttcggtgtaactttcattgtcacttttccatgtgatctgattcaacttttttgtttttgaaacgcaatttctttttactgtggttgtattgatgggtgtgtttctatctaatgaatggaaatatttcttgcgtcagctgttttaacgcctgagcgatattcaaattaattcctgcgtattaattgagaatttaattacctttgtgtccaacaataaaggatatgcaatcatgtctgcgaataaattccgctcattattactactcaccgcgcttggactcggcgtgagccaaagctatgccgccacgaccctcaacgtctggatccgcgccagcaacgactcgaaaaatatatacaagcaagaggcggagaaatttgaagcaaaaaccggtatcaaaattgagtacttcaacgccactactgactttgaacagcgcctggcgcgcgccacggcgggtaacgctttgcccgatctgatttttaacgacgcggcttcgctggggcagtttatccagttgggtattgctgaggaaatagatccgcagtcgatctccggcggcgaccagctcttcccaaccgcatggaagagtacccgctatatcgacggtaagtactacggtgtgccgacctccgcccaaaccttcgccctgtttatacgcaaagactggcgggaaaagctggggctgccacagcctaaaagctgggaagatattcagaccctggcgaaagcctttaccacccaggatcctgacggcaacggtaaaaacgatacctacggctttatcgtccccgcctccacgacgcgcggctacgccagctggtttatgagcagctttatctggcaggcgggaggggatttcgtcaaagaagagggcggcaaattccgcgcggcgctcaatacgccagaagtggttcaggcgatgacctttatacgcaccatgatgtgcgaaaaagtcacccagccgggggcgatcaatgccaccaccgccgacgtcatcccgtctttccgctccgggcaaagcggcatgttctttagcggcccgtaccatatcgcgctgtttgataaagacccgggtaaagacaattttgaagtggttccggtagcagggccaaaaggtgaggccacgctcgcggagggcaccacggtctttatgatgaagagcagcaaacaaaaagacgccgcgcgtaaatttatcgaatttatgatctcggcggaaggtcaggaaatcggcatgggtaaaggcagccagcatattccggtggtgcgcctgccggtgaataagaacgtcgacgtcaaagccgtctatcaggacgcccgctgggagactttcgccaggctttacaatcaacagggacgctatgtgccgcaaattcccaactggacgccggtgcgtcaggtggccgccgagggctttaaccgtatttttgccgactgcaacagcccgatcgccggcgagctggagagtatcgacggcaaggtgaacgctgagctgaaaaaacaaaatgtgctggctaactgaggacaaccgtgatgacgctgcatgagacgaagtcctctccgatgaagcaggccgcgtcgcctgactcgatcggatggctgagcgcaaagcgtaagcgggcgctgatcccgtggttgtttttagcgcctgcgttaattatttttagctggtttaagttcatcccgatgattcagggtctggtgatgagcttttacaaggtcaactttaatcagccgaacgaatgggtaggactcgataactttacccgtgcgtttgccgacgtcgagctgcacgcggcggtggtgaatacgctgctgtatgtggtagtcacgatgttcgctgcggctatcctggcgttcttcctcgcgatgctgctggaaggcccggcgcgccacctgcgttttattcgcaccgccatctttttacccgccgtcaccagcgcggcgatcgtcgccgaaatgtggcgtattttattcaacccgacgcccaacggcgtggttaaccacattctcagctggtttggcgtcgccgaccagggctttcttgccagttccgaccaggcgctgtgggtcatcatgctgctgcacatctggaaagcggtgccttacaacatggtgatctttattgccggtctggcggggatcagccgcgatttatacgatgcggcgaacgtcgacggcgctaactggtggaaccgtctgcgctacgtcacgctgcccggcatgatcccggcgctctcggtggtgctgatgctctcctttatccgcggtttccgcgtgtttgccgaggtgtacgccaccaccggcggcgggccatctaacgcgacggaaatggtcatgacccatatctacaaactggggtttgagcagtttgactatggctacgcgtcggcggtgtcgtttctgctgttcgccttcacggttttcttaaccatctgtcatctgacgctgaaaaaacgtattgcacgttactaaggagccgcgatgttaagtcaacgttgggataccgcagggcgctggtgcatctacgcgctgctgctgatcgtttttgtcggaccgttctggggcatcgtcgccacggcattcagcggtgcgccggtgaaaccgggtgagctgctggcctggccgaatcagttctcgtttgaaaatttcatcttcgcctggcgggatatcggtgtctggcagtatctgttgaactccatcctggtggtgttcttcggcaccgttttgcaggtgtcggtcagcgcgctggcggcgtatgccctggcccgtaagaagtttcgcggcgtggcgctggtcagtctggttattttgtcgaccatgatgctgccggaagaggtgattgcgatcccgctgtacatgatcatcaactggcggctgccgctgatcgatgcctcactctacaacagctatctcgggatgatactgccggtcgttggctgggcgttttccatctttgtgctcacggaatttatgtcggcgatcccgaaagagctggaagaggcggcgcgcattgatggcgccaacgaatggcagattttctttcacgtgatcctgccgctggtgaaaccggcgcttggcacggtagtcaccttcggcttcattatgatttgggaccagtacctgctgccgctgattgtggtcaaccacgacagcctgaacaccattccggtgatcctcggcacgctgcgtaccgacgagagcatcacgccaaacatttttatcgccattacgctgctggcgatgctgcccagcatcatcgtctatctcggtctgcaaaaacatttcaatcgcgggattatgtccggcgcggtcaaaggataaggagttacccatgggatctgttgtactgaatagcgtacgtaaatcgtatggtgatgcgcacgtgataaaggatgtgtcgctgaccattccggacggcgagttctgcgtgcttgtcgggcccagcggctgcggcaagtcgacgctgctgcgcatgattgccggcctggaggagatttccggcggggaagtacatatcaatgaacgcaatgttaccgacgtcgagccgaagctgcgcgacattgccatggtgttccagagctacgccctctatccgcagatgacggtgcgggaaaatatgggctttgcgctcaagatggctaagttgccgaaagcggagattaaccagaaggtgaatgaagccgctgcgctgctggggctggatcccctgctggagcgcttaccaaaggatctctccggcggccagcggcagcgcgtggcgatgggacgtgccatcgtgcgtaaaccgcaggtgtttttgtttgatgaaccgctatccaacctcgacgccaagctgcgcacccaggtgcggggagagatccgcgaactgcatcgccggctgaaaaccacctcggtatacgtcacccacgatcagatcgaagccatgaccatggggcagatgattgtggtcctgcgcgatgggcgcatcgagcaggcgggtaccccactggagctgtacgaccagccggcgaacctgttcgttgccgggtttattggttcgccggagattaaccagctgcccggcgaggtcgtattgaacggagacgcgaccagtctgcggctgaaagatggttcgcttctggcattacctgcggggttagcggtcaccaatggtcaacaggtggtgtatgccattcgccctgagcaggtcaacgtggtgcatgaggcccacgatgatgcgctggcggcgaaggtcacggcggtagagaacaccggttcggatatgcagttgttctgcgataccggcggcggggcgtttacttcggtatttaaacagcgactggcggtgaaagagggcgacagcatctggctgcagccgaagctttctggtgtgcatctgttcgatgcgcaaagcggtcaacgtatagcctgccgggagggcgtctgacgtggcgatgaagctgtacacccttgacgaaagctgtctggaaaacgcgcgtgcgggattaaaacagccgttctcgccgctgcagctggcgctgagcaagctggtttcgcaggccgatattctgcgtcgtgaagcgccggaaagcgttgtgcataaaaaactgcggccggcgagcggcgacgcgcacgattactacagcctggggacctactggtggccgaaccctcggcgtcccaacgggctgccgtatattcgccgcgacggacatatcaatccgcagtgtgaaaataacgataccgacacctcgcgcattatccgcatgtgcgaacgctgcctgaccctggggctggcgtggtacttcactggtcagcgccactatgcccaggcggcggccgcgcagatccgctgttggttcctggatccagagacgcgaatgaacccgcatctgaactatggtcaggcaatcccggggattgtctccggtcgcggcaccgggctgatagatacccgattaatgtggatggtggtcgataccatcggcttgattagcccggcgaacgtgctggataccgacgatattatcggcctgcaccagtggttccgggattttaaccactggatgtactacagcgaaatcggccattcagagtatgtctggcacaacaaccacggcacctggtacgacgcccagcggacggttaacgcgctattctacggcgataaaggactggcggcgcggatcattgcgcaggggatcacccagcgaatggcggcgcagattgaccaggatggcaagcagaccatggagcttgagcgcaccattcctttccattactcgctgtttaatctggaggcgcatctgctgctgaatcgctatgccgagcatgtcgaattcgatcgctggaacaccatccgcgacgggcgaggagtgaagcaggggatagattacctggtgccgtttatccgtgaacccgatctctggccgtacagtgacctgcagggcattgtgtgggatagtgcgctgcgggtgctgctgcagtcagcccgtggttatgcaaaacaatccgccagctatcgcgatgtgctgaaatgcctgccgcaggagacgctgcagttgaaggaacagctgatgtggtgtccgggtttgtaggcctgataagcgcagcgccatcaggcattaggtgcacgttgccggatggcggcgtgccgccttatccggcctacagataccgtgtctcgccgacctcgggaggcacggtataacgagttacaccgcggcgataattttgatctcaactttatactgcgggttcatcagcgtcgcttccaccgtgcagcgcaccggggcgtgaccagccaccacccacgcgtcccaggctttattcatcgccgcaaagtcgcttttatcggcgaggaagatggtggcgtcaagaatacgcgacttgtcgctgccctgtttttccagcaccgcgtcaatctgcgccagggtattggcggtctgctcgaaagcgtcggcatcgagatttgccggcacgccggtgtagtacagggtctggttgtggatcaccacgtctgaccaacgggcttcggcatcaatacgcgtaattgtcattgctttttcctctttaagcattccattcggctgcggcaagactgccataatgtgccgctcgcgtcactacccggactggcgaaacgccgtcctccctgacataatcactgtccaaataaccagggggcaatgtgatcgacgattttgcagcagacggccagctagccaaagccataccgggatttaaaccgcgcgagccgcagcgccagatggcggtggcggtcagcgaagcgattgaggcctcccggccgctggtggtggaagcggggaccggaaccggtaaaacctacgcttacctggcgcctgcgctgcgggcgaaaaaaaaggtgattatctccaccggctcgaaagcgctgcaggatcagctttacagccgcgatctgcccaccgtcgccaaagcgctcaaattcaccgggaaactggcgctgctcaaagggcgctccaactacctgtgtctcgaacgtcttgagcagcaggcgctggcgggcggcgatctgccggtgcaaaccctcagcgatgtgatcctcctgcgctcctggtcgaatcaaacccaggatggcgatatcagcacctgcgccagcgtcgcggaagactctcaggcctggccgctggtgaccagcaccaacgataactgtctcggtagcgactgcccactgtataaagattgcttcgtggtgaaggcgcgtaaaaaagcgatggacgccgacgtggtggtggtcaaccatcacctgtttctggccgatatggtggtcaaagagagcggctttgccgagctgatccccgaggcggaagtgatgatcttcgatgaagcccatcagctgccggatatcgccagtcagtactttggccagtcgctctccagccgccagctgctggacctggcgaaagacatcaccattgcctaccgcaccgaactgaaagacactcagcagctgcaaaaatgcgccgaccgcctggcgcaaagcgcgcaggatttccgcctgcagctgggagacccgggctaccgcggcaatctgcgcgagctgctggcggacagccacattcagcgagcgctgctgctgctcgatgacgcgctcgagctatgctatgacgtcgccaaactttcgctgggtcgctcggcgctgctcgacgccgcttttgagcgcgccaccctctatcgcgggcgcctgaagcggttgaaagagatcaaccagccgggctacagctactggtatgagtgtacctcgcgccactttactctcgcgctgacgccgctgaccgtggccgagaagtttaaagaggtgatggcgcagaagtcggggagctggatctttacctcggcgacgctgtcggtgaacgacgatctgcaccactttaccgcccggctggggatcgacgaggcgcagactctgctgctgccgagtccctttgactatcagcaccaggcgctgctctgcgtgccgcgcaacctacccctgccgaaccagcccggcgcggcgcgacacctggcggcgatgctcaagccgctgatcgaggccaacgatggtcgctgctttatgttgtgcacctcgcacgccatgatgcgcgatctggcggagcagttccgcgccaccatgacgctaccggtgctgctgcagggcgagaccagtaaaggccaactgctgcagcagttcgtcagcgccggcaacgcgctgctggtggctaccagcagcttctgggagggagtcgatgtgcgcggcgacgcgctgtcgctggtgattatcgataagctaccgttcacctcgccggacgatccgctgctaaaagcgcggatggaagattgccggctgcgcggcggcgatcccttcgatgaagtgcagctcccggatgcggtgatcaccctcaagcagggggtgggtcgcctgatccgcgatatcgacgatcgcggggtgctggtgatctgcgacaaccggctggtgatgcgcccctacggcgcggtgttcctggccagtctgccgccggcgccgcgaacccgcgatatccgtcgggcggtgcgctttctcgccgtaccgccggcaaggtaatccgcactaaaatgtgttaagctgcgcgccattttgttaattagcggttcccaatagacttcgggcggcatggcggcgggtttgccgtttgccggaaatcaggctgcctgaaggcctgaactatgtaacgagagcgtgaccacccatgcgaattttggctatcgataccgccacagaggcctgctccgcagcgctgtggaatgatggcacccttagtgctcatttcgaaatttgtccccgcgaacatacccaacgtatcctgccgctggtgcaggaggtcctcaccgagagcggcaccaccctgagcgagctggacgcgctggcctttggccgcggtccgggcagctttaccggcgtgcgcatcggcatcggtatcgcccaggggctggcgctgggcgccgaactgccaatgattggcgtttccacgctggccaccatggcgcagggcgcctggcgcaaaaccggcgccacccgtgtgctggcggccattgatgcgcgtatgggcgaagtctactgggccgagtaccagcgcgacgagcagggcgtctggcatggcgaagagacggaagcggtgctcaaaccggacgcggtagctgaacgactggcacagctttccggcgaatgggccaccgtcggcaccggctggcaggcgtggccggatctggcgaaagcgagcggactgaccttaagcagcggcgaaattgaattgccggcggcggaggatatgctgccgttagcctgttacctgctggcggcggggaaaaccgtggccgtggagaaagcggagccggtttatttgcgaaacgaggtggcgtggaagaaacttccaggccgcgagtgaatctcagtaacaagaagactgagaaaaggagtcgcatcatggcgggtcaaaaacagggcgttcgctggctgctggccgcagcgattgccgttgcgctaagcggctgcgtatcggtgccggatgccatcaaaggcaccagcccgacgccgcagcaggatttggtgcgggtgatgaacgccccgcagctgtacgttggccaggaagcgcgctttggcggtaaggtggtcaatgtgcaaaaccagcaggggaaaacccgcttagaaatcgccaccgtaccgctggacagcggcgcgcggccagtgctgggcgagccgtcccgcggaaggatttttgctgacgtcaatggcttcctcgatccggtggatttccgcggtcaactagtgaccgtggtcggaccgatcgccggggtggttgacggcaaggtgggcagcacgccgtataaatttatgctaatgaacgccaccggctacaagcgctggaacgtagtacagcaggtggtgatgcctccgcaacctatcgacccgtggatgctgggtccgcgcccctggggctacggctatggcggctggggctggtacaatcccggccctgctgaggtgagaaacgttgtaaccgaatgattttgttgtttatgttagttcaaagaaacagcggccggtccgctgtttctttgttttcagtcgaataagaaaaaaaatagtgacgcgcttcgcaacctgctcattgcctaattaataaactggtacgctgagttaatataatgttaacaaaatgtattatccaggggctgtgatgacgacgaataactatttcagaggtgatgcagtgaaaaaggtttggctaaaccgttatcccgcagatgttccggcggagataaatcctgaccgctatcaatccctggttgaactgtttgaacatgccaccacccgttacgccgaccaaccggcgtttatcaatatgggtgaagtgatgacctaccgtaagctggaggagcgtagtcgcgccttcgccgcttatcttcaggaggggttggggttacagaagggcgatcgcgtggccctgatgatgcctaacctgctgcagtatccggtggctctgtttggcatcctgcgcgccgggatgatcgtggttaacgtcaaccccttatataccccgcgcgaactggagcatcagctcaacgacagcggcgcggcggcgatcgtcatagtctccaactttgcccataccctggaaaaagtggtggcgaaaactcaggtccagcatgtgatcctgacgcgcatgggcgaccagctttccaccgccaaaggtacgctggtgaactttgtggtcaagtacattaagcgcctggtgccgaagtaccatctgccggacgccatctcgtttcgcagcgcgttgcagcacggctatcgcatgcagtacgtcaagccggagatcgttgcggaagatctggcgtttctgcagtacaccgggggcaccaccggcgtggccaaaggtgcgatgctaacccaccgcaatatgctggctaacctcgagcaggtcaatgccacctacggcccgctgctgcatcgcggcaaagagttcgtggtgaccgcgctgccgctgtatcacattttcgccctgaccatgaactgcctgctgtttatcgaactgggcgggcaaaatttgctgatcaccaacccacgtgatatccccgggctggtgaaggagctggcgaagtatccttttaccgccatgaccggggtcaataccctgttcaacgccttgctgaacaacaaagagttccagcagcttgatttctcctcgctgcatttgtccgccggcggtgggatgccggtgcagcaggcggtggccgagcgctgggtaaaactgaccgggcaatatctgctggagggctacggcctgacagagtgttccccgctggtcagcgttaacccgcacgatattgactaccacagcggcagcattggcctgccggtgccctccaccgaagccaaactggtggatgatgatgataacgaagtggcgccgggtcagccgggcgagctctgtattaaagggccgcaggtgatgctgggctactggcagcgccctgacgcgacggatgagattatcaaagacggctggctgcacaccggggatatcgcggtgatggatgaagaggggttcctgcgcatcgtcgatcgcaaaaaagatatgatcctggtgtcgggttttaacgtctatccgaacgaaatcgaagatgtggtcatgcagcatagcggggtgctggaagtggcggccatcggcgtgccgtccggcagcagcggcgaagcggtgaagattttcgtagtcaagaaagatgctgcgttaaccgaagaggcgctgattacgttctgccgtcgccatttgaccggatacaaggtgccgaagctggtggaattccgtgacgaactgccgaaatccaacgtcgggaaaattttgcggcgagaactgcgtgacgaagcgcgcgctaaagtggacaataaaggctaagtaacgaatgagtcgcctgacgccggctacgccggcgttttttatgggcgcaagttaagagagtatgctttgaactatcagatgatcaccaccgacgatggcctgcgcgctgtctgcgaagcggcaagcacggcctccgccgtcgctctggatacggaatttgtccgcacccgcacctattacccgcagctgggcctgctgcagctgttcgacggccagcaggtctctctgatcgatcccttgacgattaacgactgggcgccgatgcgcgacctgctgctcaaccaggatgtgactaaatacctgcatgccggcagcgaagatttagaagtcttccttaatgcatttaacctgatgccgcagccgctgattgacacccagatcctggcggccttctgcggccgcccaatgtcctggggcttcgcctcgatggtggaagagtattccggggtagcgctggataaaagcgaatcccgcaccgactggctggcgcgcccgctgactgagcgtcagtgtgaatatgccgcggccgacgtctggtatctgctgccgatcgccagccagttaatggcggagaccgatcgcgctggctggctgccggcggcgctcgacgagtgccgcgtgatgcagcagcgtcgtcaggaggtggtcgacccggccgaggcctggcgcgatatcggcaacgcctggcagctgcgtacccgccagctgggttgtctgcagctgttggcggagtggcgcctgcgcaaagcgcgcgagcgcgacctggcggtaaactttgtggtgcgggaagagcatctgtggagcgtggcgcgctatatgcccaccagcctgggcgagctcgacagcctcgggttgtccggtagcgaaattcgcttccacggcaaaacgctgattagcctggtcgaaaaagcgcaggcgctgccggagtcggccctgccagcgccgctgcagaacctgatcgacatgccgggctaccgcaaagcctttaaagatattaaagcgctggtgcaggaagtgagcacggagaagggcgtaagcgcggagctgctggcgtcgcgtcggcagatcaaccagctgctgaactggcactggcagctgaaaacgcaagccggtgaacctgagctgatttccggttggcgcggggagctaatggccgagcggctgaagaggctgttaaacgactatccgcgctagttcgcggccaggttcagaccattaaaaaaccggcggcgcgtggcgtagccggttttttttcgcgatagcgcgacaggtcaggatttcgactcttccgtttcgggtagggtcacgttcagctcaagaatggatatatccccgtcccgctgctccagctgcacgctgaccatctccgggtcgatctgtacgtatttacagatcacttccaggatatctttgcgtaactgcggcaggtaatgcggctccgcgtctccgcggcggcgctcggcgacgatgatttgcaggcgttctttcgcaatattagccgtgttcttttttcgcgagagaaaaaagtcgagtaaagccataatttatcctccgaacaggcgtttgaggaatcctttcttctcttcttcaatgaagcggaaagggcgttcttctccgagcagacgttcaacggtatcggcataggctttgcctgcgtccgaggcggcatcgaggatcaccggctcaccctggttggatgcgcgcaggactgactggtcttccgggatcacgcctaccaggttgatgcgcagaatttccagcacgtcttccatgctcagcatatcgcctttattaacgcggcctggattgtagcgggtcagcagcagatgctctttgattggctcttcgccattttccgcgcggcgggatttagaggcgagaatgccaaggatacggtcggagtcgcgaacggaggagacttccgggttagtggtgatgatggcttcatcagcaaagtaaagcgccatcagcgcaccggtttcaatgcctgccggggaatcacagacgatgaaatcgaattccattttcttcagttcttcgagaaccttgtcgacgccttcgcgagtcagagcgtctttatcccgggtctgggaagccgggagaatgtagaggttttccgtgcgcttatctttaatcagcgcctggttcagtgtggcatcgccctgaatgacgttgacgaaatcataaacgacgcgacgttcgcagcccataatcaggtcgaggttacgcaggccgatgtcgaagtcgataacgacggttatctttcccttctgggccaaacctgtagcgatggccgcgctggaggtggtcttgccaacgccccctttacccgaagtcacaacaataatgcgtgccatagaaattccttgttaaaaagggattaatttaacggttgaattgccaaagcgctttcacctaaacgcaggcgcgccgctttgccataaaattcggccgggatgttatcgctcagccaatattccccggcgatggagaccagctccgccgcaaggtgggtacaaaatatctgggcgtctctgtcgccaccggcgcctgccagcgcacgtcctcgcatcatgccatatacatggatatttccgtcagcgataagttccgcaccggcactcacatgatttgtaacaataagatcacagtgtggcgcctaaatgcgctgaccggaacgtaccggctgatcaatcaaacgcgtttttgtgatctgactagcaactggcggcggcggggtgggttcggacggtgccggacgagaggctttttctttcccttcggttaataacgggatgccggcgcggtcgatttcggttttcaggcgcggaattttgcatccgctaacgcccataatacgtaaaccggtcgcggcgatagcctcgttgatggcgcgccattccacctcctcctcgatgctggcgatattcaccaccaccggagcatgacgtaaaaaagcgggagcctgggcgattttgtcttctaacgcctgacgaataacctcgggatttgcatcgtgcaaatgaacgacagataacgtgaagctactgcctttaagttcgattggcgtatttgacatcctggccttactcaatttgctgtttatcaaccgccgaagtgcggtgatattccgaagactaaaaggcatgttatagtcactcatatattgaggcaagtgaccacgggtctaattccgagtaaaactatgttttgtgtgatctatcgaagtactaaacgtgaacaaacctatttatacgtcgaaaaaaaggacgatttctcgcgcgttcctgacgagctaatgcgcagctttggcacgccgcaaatggcgatgctgctgccgctggatgggcgcaaaaaactggttaacgccgatctggaaaaagtgaaacaggcgttaagcgaacagggctattacctgcaactgcctccgccgtctgaaaatctactaaagaaacacctggcggaacaggggaaacaatccgattaacccacgagggaaaataatgtaccaacatcataactggcagggtgcgcttctggattatccagtaagcaaagtggtttgcgtcggcagtaattatgcgaaacacatcaaggaaatgggcagtgcgacgccggaagagccggtgctgtttattaaacctgagactgcgctgtgcgatcttcgtcagccgttggtgctccctgaggggctgggctcggtgcatcacgaagtcgagctggcggtgcttatcggcagcacgctgcgtcaggcgacggaagagcatgtgctgaaagggattgccggctatggcgtcgcgctggatctcacgctgcgcgacctgcaggcgaaaatgaaaaaagcgggacaaccctgggagaaggccaaaggcttcgataacgcctgtccgatctccggctttatcccggccgctgagttccacggcgacccgcagaatacgtcgttaagcctgaagattaatggcgaagtgcgccagcagggcaccactgccgacatgatccataggattgtgccgctgatcgcctatatgtcgcgcttctttaccctcaaagccggggatgtgatactcaccggcaccccggaaggcgtggggccgctgcacagcggtgacgagctggaggtcggcttcaacggcctggcgctcactacccgcgtgctgtaagcgctatttgccgccttttggggcggcaaaacttgcatcggcgtgccagactggttataaggtgcacccttaactggcaacgacggacactccgatgagcgaacaacctttctggcaacaaaaaacactggatgacatgagcgacgcggagtgggaatcgctgtgtgacggctgcggccagtgctgcctgcacaagctgatggatgaagacactgacgagatctacttcaccaacgtcgcctgtcgtcagctcaatatcaaaacctgccagtgtcgtaactacgcgcgtcgctttgagtatgagccggactgcatcaagcttacccgcgaaaatctgccgaccttcgaatggctgccgccgacctgtgcctatcgcctgctggcggaaggcaagcctctgccggcctggcacccgctgctgactggctcaaaagcggcgatgcacggcgaacgcatctccgttcgccatattgcggtgcctgagtccacggtggtcgactggcaggaccatatccttaatctgcctgacagggcgcgctaagcgccgtcacgctttcttcgcgtggaacagcccgttttcaccgtcggtttcttccgccacccagaagtgaatattgaagcgggcgtcgtcactgagttcgacgcggtgccagtactgcggcggactggtagcaaactgcccggcatgaatcacgacttttttctccggctccgtcgcctgttcattggcaaaaccgtaataggtcaccgttccctccatgacgcacagctggccgaagacgccagccgcggtgttgtggtggctcagcagggcggcagggacattctctttggtaaagaatggggtggagcgtttaactttccagtctgcggggatcagtaaagatgacatgtgagctcctgtggggttttaaaagatgtatttaatatgcaccttttaatggctatggtcaaccatagaggtcaaccatagacgggaaacgattcagcgatgcgcaggaggcataaaaaaacgccccgcagggcgtttcattgtgggctgtactcgccgcggcttaacgaccaaacagatcgcgttttttcgctttgaaaggctgagcaacgatcaccagaatagcgaccagcagataggcggcgaaaatccccaccagccattgcggcatctccagcgacaggaactgccactgacgtactgagcagtctccggacgcaacgaaaacctgcggcagccatttatccagcggcagccaggttgggaagcgggcggcgaaatcgcaggtctggaacggtgaagggtgcagctggagcatcgtatgctcccacgccagctgtagtccgcgtatcgcgctgtacaaccagattgccatggcgacatagcgcagcggcgttttgggggcgatagcgcccaccagtcccgcgcccatgatgccgaacagcgcgcagcgttcgtaaatacacatgacacacggctgcagcagcatcacgtgctggaaccacagcgcgacaagttcgagaataaaagcggtcaacgccatcaggagccaggcaccgcgtcctcttgagcactggtttaaatattgcaacataatcatttccctggaagatgctaaatcatggcagtgtaaacgaaaaccgaaccgacgccagaggcgcggcggaaaatattccgtaacgggttattgatgcgcccgggcgaacccgggcaaaaactgactcagggtaggctgggcgtcaccagccagccgtgcgccagcagccagtcggtgactggcatcagggtgaactcgacgcataacaggccgaccagcgtcagtacgatggtgtagggcagcgccatccacaccatacggccataggagagcctaataagcggcgccagggcggaagtcagcaggaagagaaacgccgcctggccgttcggagtggccaccgagggcaggttggtgccggtgttgatcgctaccgccagcatctcaaactggggcaggctgatggcgccatgttcgagcgccgctttcgcttcgttgatgtagaccgtgccgacaaacacgttatccgaaatggacgacagcaggccgttgaacagataaaacagcgacagctgcgcgtgcggcgaggcctgcaggacaaactcgatcaccggcgtgaacagctgctgatcgatgataaccgcgacgatggagaagaagaccgtcagcagcgcggtaaagggcagcgcctcggtgaacgccttgccaatggcgtgctcatcggtaacgccggtaaaggtggtggcgaggatgatcaccgacaggccaatcaggccgacctcagccaggtgaaaagccagggccacgatcagccaaacgccaatgagcgcctgggcaatcagccgcagtcgctcctgacggctgcgctgggcgcggctgcgatcgtcaaactcctgcagcaccttgcgcaccgtcggcggtagcggttcgccgtagccaaacaggcgatacttttcgaccagcagacaggttaacagaccgcagaccatcaccggcagggtcacgggcgccatgcgaagaaagaactcgccaaaatgccagcccgcggctttggcgataatcaagttttgcggctcgccgaccatggtcatgacgccgccgagcgcggtcccgacgccggcgtgcatcatcaggctgcgcagaaagccgcggaactgctccagcacctcacggtagtgctgctcgatatggctgtcatcgagcaggtcgctatcgtccgggcgcgccgaggcgacgcggtgatagatgccgtagaacccgacggcgacgctgatcactaccgccaccaccgtcagcgcatcgagaaaggccgagaggaaggctgccgccaggcagaaggccagcgatagcagcattttgctgcggatccccagcagcaggcgcgtaaacacgaacagcaaaagctgtttcataaagtagatacccgccaccatgaacatcagcaggagcagcacctccagattgccggcgatctcttcccggacgtgcgccgggctggtcatgccgatcagcagcgcctcgatagccagcagaccacccggcagcagcggatagcacttcagcgccatggcgagggtaaagataaactcgaccaccagcagccagccggcgacaaacggcgccacggcgaacaccagcggatttacgattaagaaaatgattaatgccagcttgtaccagtccggcgactggccaagaaaattgcgccacagcgcgcggccataagaaatttccacgacagaatccttccccgtcaatgagtgcatggttttgtgcataacgattggcaagagtaccagttgagcaaaatgagaagcaactttcttcgcgccgcgctggcggtttgtgaagataaggaaaagcgcaaggtaaaagcggaaaatgaaacggcgatccctttttaattcacttgccatgctatctgcgctatagcggctctggtatgatgagtgcaattgtaacgctgtgtaatggaaatcttactatggtcattaaggcgcagagccctgcgggtttcgcggaagagtacatcattgagagtatctggaataaccgcttccctcccggatcgattctccccgctgaacgcgagctttctgagctgattggtgtcacccgcacaaccctgcgcgaagtattgcagcgtctggcccgtgacggctggctgaccattcagcatggtaagcccactaaagtgaataacttttgggaaacctccggcctgaatatcctcgaaacgctggcgcgcctcgagcacgacagcgtaccgcagttgattgataatctgctctccgtgcgcaccaacatttccacgatttttatccgcaccgcgtttcgccagcatccggataaagcgctggcggtcctggacagcgcccgggaggtggaggatcacgccgacgccttcgccgagcttgattataatattttccgtggtctggcgtttgcctccggcaacccgatctacggtctgatcctcaacggcatgaaggggttgtatacccgcatcggccgccactatttctccagcccggaagcgcgcagcctggcgctcggtttctatcatcagctggcgaaagtgtgtgaggctggcctgcatgaccaggtttacgagctggttcgtcgctacggccatgacagcggcgagatctggcaccggatgcagaaatcgctgcccggtgatttagccatgaatatgcgttaagcgggcttttcgcgatcgatatacagaacaagggggccaatggccccctttgttattttactcgccccgcaatgctatagcgcgttcggccgcgccgggcagcggtccaacagctcaatgctgccgtcggcgttctgttgctccagcagcacatcgaacccccacagacgatgcacatgcttcagcacttcgcgccggcctttgtccagcgggacgcggttgtgcggcacatagcgcaaggtcagcgatcggtcgccgcgcaggtcaacgttccacacctggatattcggctcaagattgctgaggttatactgcgcggagagcttattgcggatctcgcgataaccctcttcgttgtgaatcgccgagatctccagataattgttgtgatcgtcgtcgagcacggtaaagaagcggaaatcgcgcatgatcttcggcgacaggaactgactgataaagctttcatccttaaagtcgcgcatggcgaaatgcagcgtttccagccagtcagaaccggcgatatcggggaaccagtacttatcctcttccgtgggcgactgacagatgcgcttgatgtcctggaacatggcgaagcccagcgcgtaggggttaatcccgctgtaccacggactgttgtacggcggctggaacaccacgttggtatggctgtggagaaactccagcataaagcgctcagtcactttcccttcatcgtagagatggttgaggatggtgtagtgccagaaggtggcccacccctcgttcatcacctgggtctgtttctgcgggtagaaatactggctgactttacgcacgatgcgcaggatctcgcgctgccacggttcgagcagcggggcgttcttctccataaagtacagcaggttctcctgcggttcggaagggtagcgacgagcggattcaatcgctttttcttcctcgcgcttcggcagggtgcgccacagcatattcacctggctttgcagatactcttcccggcttttctgccgcgctttctcctcctgcagagagattttttgcggacgtttatagcggtcgacgccgtagttcatcagcgcgtggcaggagtcgagcagtttctctacttcgtcgacgccatagcgctcttcgcactcggtgatgtacttacgggcaaagatcagatagtcgatgatcgagctggcgtcggtccagctgcgaaacagatagttatttttaaaaaacgagttatgcccgtagcaggcatgggccatcaccagcgcctgcatggtgatggtgttttcctccatcaggtaggcgatacaggggttggagttgatgactatctcatacgccagaccctgctgaccgtgcttataggcctgctcggtctcaataaattttttgccaaacgaccagtgcggatagttgatgggcatgccgacgctggagtaggcgtccatcatttgctcggaagtaatgacttcgatctggtgcgggtaggtgtcaagacgatagagcttggcgacccggtccacttcggccaggtaggtttccagtaactcgaacgtccagtcgggtccatcgcttaaacgggtggtgtccctgttcatggagtcaatcgtagccattagcgcgccctcgttgttgttggttttctctgaacggaaaacctctaaacaagcatagaacacggtgcagcaaactgtgctgtacgccaatcgcttttcttcgcgatttccccatctcaaagccgtttttttgccttgtttgcagaatttaatgctgggtaaaaataaagcgcagcatgagatcgtaaatctcacagcgcagggctggtgcggtttgctgtgagttaagtcaccataaataaagcgtatgttgaataatattttcaactgagttatcaatttgtaattagatgattgttctttaactgttacggagtcgctatgcgtgtcgtcatactgggaagtggggtggttggggtagccagcgcgtggtatttgagtcaggcgggtcatgacgtgacggtcatcgaccgtcagcccggtccggcagaggagaccagcgcggccaacgccgggcagatttctcccggctatgcggcgccctgggcggcgccgggggtgccgctgaaggcgatcaaatggatgtttcagcgccatgcgccgctggcgatcggtcttgacggcacctcgttccagttgaagtggatgtggcagatgctgcgcaactgcgacacccgccactatatggagaacaaaggccgtatggtgcgcctggcggagtacagccgcgactgcctgaaggcgctgcgcgacaccaccggcattcagtatgaagggcgccagggcgggacgctgcagctgttccgtaccgccaaacagtatgaaaatgccacccgcgacatcgcggtgctggaggacgccggcgtgccgtatcagctgctggaagcgaagcggttggcggaggtggagccggcgctggcggaggtcagccacaaactgaccggcggcctgcgcctgccaaatgatgaaaccggcgactgccagctgtttaccacccgtttggcggcaatggcggaacaggccggcgtgaccttccgcttcaacaccgcagtggatgcgctgctgcacgagggcgatcgcattgccggggtgaaatgcggcgatgagattattaagggcgacgcctatgtgatggccttcggctcctactcgacggcgatgcttaaagggctggtggatataccggtctacccgctgaaaggctactcattaactattccgatcgctcaggaggacggcgcgccggtttcaactatccttgatgagacttacaaaatcgccatcacccgcttcgatcagcgcattcgggtcggcggcatggcggagatcgtcggttttaacaaagcgctgctgcagccgcgtcgcgaaaccctggagatggtggtgcgcgatctgttcccgcgcggcggccacgtggagcaggcgacgttctggacgggcctgcggccgatgacgccggacggcacgccggtggtcggccgcacagcgtataaaaatctgtggctcaacaccggccacggcacgcttggctggaccatggcctgcggctccgggcagcttatcagcgatctgatctccggccgcacgccggcgatcccttacgacgatctggcggttgcccgctacagccccggttttaccccggcgcgcccgcagcacctgcacggcgcacacaactaaggagcttgcatgacccgtccggtagtggccagcatcgacctgctggccttgcggcagaatttacagatagtgcgtcgcgcggcccccgggtcgcgcctgtgggcggtggtcaaggccaacgcctacggccacggcgtggcgcgcgtatggagtgcgttaagcgcggcggatggtttcgccttgctcaacctggaagaggcgatcctgctgcgcgagcagggctggaaaggcccgatcctgctgctggagggcttcttccatgccgatgagctggcggtgctggatcaatatcgtttaaccaccagcgtccacagcaactggcagattaaggccctgcagcaggcgaagctgcgcgcgccgctggatatctatctcaaggtgaacagcggcatgaaccggctgggctttatgcctgagcgggtccacaccgtctggcagcagctgcgggcgataagcaacgtcggcgagatgacgctgatgtcgcacttcgcggaggcggagaacccgcagggaattgtcgagccgatgcgccgtatcgaacaggcggcggaggggctggattgcccgcgctcgctggccaactcggcggcgaccctctggcatccggaagcgcattttgactgggttcgtccaggcatcgtgctgtatggcgcgtcgccttccgggcagtggcaggacatcgccaacaccgggctgaagccggtcatgacgctgcgcagcgaaatcatcggcgtgcagaacctgcgccccggcgaggcgattggctatggcggcctgtaccgcaccacccaggagcagcggatcggcatcgtcgcctgcggctatgccgatggctatccgcgggtggcgccgagcggcacgccggtgctggtggatggcgtacgcaccactaccgtgggacgcgtatcgatggatatgctggcggtcgatttaacgccctgcccgcaggccgggatcggcgcgccggtcgagctgtggggcaaagagattaaaatcgacgacgtggcggccagcagcggcaccgtcggctatgagctgatgtgcgccctggcgccgcgggtgccagttgtgaccctgtaacctattccggggcggatcactccgcctcgtcttccgcgacccgcaccccaaccttcagcacgtgatcgttctctttttcagctaccgtccacaccatcccggcgaactccacctggtcgcccaccaccggcgccgcgcccagcagctgctgcaccacttccccgagcgactgctgatgctcgcggaactcctcaccgccgtcgagaccgtagatttgcgccacatcggcgaagcgggcctcagcatcaagaatgaagtcgccgaaaaagcgctgatcgagcgccaccggcggcgactggctgaacattttgccgagcgccggcaggtcgtgctcccgaccaataacgcacaggatatcgccttcccgcaggcgggtgctgccggtggggtgcagcaggacattgttgcgaaacagcgcggcaatccgcgtctccggtggcatgtgcaagtcgcgcagcgccgcgccgatgcaccacttatcggcccccagctggtagacaaactgctcccacgggttttccgggtgaatatccagcccgacgcgggagatgggccagctgatgggcggcaccaccactttggcttttttcgccgcccacgacagcgaagtgccctgcagcagcagcgacaccagcaccacgaagaaggcgacattgaagaacaggcgggcgttgtccaggccggccatcatcgggaacaccgcgagaataatgggcaccgcgccgcgcaggccaacccagctgataaacacccgttcgcgcaggttaaagccgcgaaacggcagcaggccggcaaacaccgacaggggccgggcaatgaatatcatccacatcgacagcagcagtgccgggatagcgatcggcagcaggtcggagggcgtcaccagcaggcccagcaccaggaacatggcgatctgcgccagccacgccaggccgtcgaagttctgcaggatgccgtgccggttgcggatcggccggttgcccagcagaaagccgcagagatagacggcgaggataccgctgccgtcgagggaggtggtgacggcaaaaatcatgatcccgccgctcagcgccagcagcggatagaggccggcgggcagcacgatgcggttaatcatctgcagcagcaggtagccgccgccgaggccgatggcgataccgaggccgaactgctgaatgatatgcacggcgaacatccagctgaggccggtttggtgctgctggatcatttcgatcagggtgatggtcaggaagaccgccatcgggtcgttactgcctgactctatctccagcgtcgagccgacgcgctcgttgagccccttgccgccgagcagcgagaagaccgccgcggcgtcggtggagccgacaatggcgccgatcagcaggccttcgatcagatccagcttgaacaaccaggccgccatcatcccggtcagcgccgaggtgatcagcaccccaaccgtcgccagcgacagcgcgggccacagcgcgacgcgaaaggagctggcctgggtgcgcatcccgccgtccagtaggatcaccgccagcgccaggttactcaccatataggcgaaggggtaattgtcgaaggggatgccgccgatgccgtcaatgcctgccagcatcccgatggccagaaagatgaccagaatcgggatgccaaggcgcgaagaaaaggagctcaataagatactgcaggttactaaaacagaacccagaataaacagactaatgaccgcagcggcgtccaatgttcacgtactccctgactggcgtgaaaaaatggctaaaagtgacactattttaacaattcgcaggggatccgcctatgcgttcgggaaatttattctgtcagcaccggatggccgccgatcgtcagggtggtggccgccgcctgattcaccaggcgcgcgcgggcgcccagcggcagggtcaccgtgcgctgctcgtggccaaactccagtccgctaatcagcggcagggatagctgctggcgcagataatcaaagacctgcggcaaatcgtatcccgcgtcatagtcgttcggcgcgctgccggtgaagctgccgaagatcaccgctttctgcgccgccagcacgccgctgtgcaacagctgaagcagcatgcgctcgacgcggaacgggtgctcattgatatcctccaccaccaggatgccgtcgcggatcgccggcagccacggcgtgccgataagcgaggtcagcatcgccagatttcccccccacagggtgccttccacccggcagttcggcccttcgcccggccattcgagggtgaattccggctggcgtagcgcctgccagaaatggtgctcggtaaacgggtcgagggtctccgcgccgaagttgccggcgagcattggaccgctgaaggtgatgacgttgcccatggccagcaggcccgactggatagcggtgaaatcgctgtggccgcaaatcagcagcgggtcgcgctgctggcgggcaaccagcccctgccagtcgatatgcggcagcaggcgactggcgccgtagccgccgcgtacggcgaggacgatccggttgcggccgggcaactgggccagctggttaatatcggccagccgttcatgttcagtcccggcgaaacgctgctgccggcggggaatgacctgctggtgggccacctcgtgtccggcctgctgcagacgctcgacgccgcgggctgccgcctgctggttgatgcaatacccggatggcgcgaccagataaaactgagacatgataattccttgctatgaatgaaagggttatgatgccgcctggaatggcgattgtcatctccaggtggctaacttcagtccgcacccgtcatccttcaggttgtcggcaggcgggagacgtaccgcggccgtcgttctgtagcatgatggcgtttgggtagataaggatagatgtgtgaaattgagatggttgcttattttagtcgtttttctggccggttgtagttcgaaacatgattacactaacccgccgtggaaccccgaggtcccggtgaagcgggcgatgcagtggatgccgatcagtgaaaaagccggcgccgcctggggcgtggatccgcagctgattacggcgatcatcgccatcgagtcgggtggtaatcctgcggtggtgagtaaatccggcgctgtcgggctgatgcagctcaagccctcgacctccggacgcgatgtctatcggcggatggggtggcgcggcgagccgtcggtcagtgagctgaaaaacccggaacgtaatatctcgatgggggccgcctatctgagcattctggagaacggtccgctggcggggatcaaagacccgcaggtgatgcgctatgcggtggtggtctcctatgccaacggcgctggcgcgctgctgcgtaccttctcctcgaaccgccaggacgccatcgaggagattaacgatctcgacgccgatgagttcttcgaacatgtggtgaaaaaacacccggcaccgcaggcgccgcgctatatctggaaactacagaaagcgctggacgccatgtaatccctcgtttggcctccggtagtctcccggaggccacgtcctcagaaatcgtagcccacggtggctataacgctgcgctctgctccccagtaacagttgccggtgccatagcagccggaaatatactcgcggtcgccgatattgttggcgttaacctgcacataagcgcctttcagcgttggcgaccagacgctgaggtcggcccgcatcatggcgtccatcagcgtgaccgacggcagccgcgcggtgttggcatcatccgcccactgtttaccgatgtagcggacgccggcgccaacggagatccccgccgggaactgatagcgcgcccagaaggaggccatctgatccggggtcagctgcggcgtgttattgtcggtcccgtctttggtgtcctggaaacgcagacgattccaggtatacgaggcgatagtactcagctgcggggtgatctggtggtgcgcttccagctcaacgccctgggaatggaccttacccgccggaatataggtggcggtggcgatgttcgggtcgcgagtggcgacatccttttgcgtcaggtcgtaaatcgcgatgctatagagatcgctgctgcccggcggctggaacttcaggccggcttcaacctgttcggcggtggtcggtttcaacggtttgccgtccgcgcccggcagcatcgccggagtgatcgcctggctgtagctcaggtagggcgacagaccgttgtccagggcgtacaacagcgaggcgcggccgctgatatggtcgtctgaacggcggtttgaggtcccctgggtatcgctgacctgctgggaaacgatgcggtcgtagcgggcggaaacatccacatgccagcggttccagaccatctcatcctgcagatacagcccggtctggtaatagcggcgattattgtcgtcgctgtaggtaacggtatgtccggtctgcgcggtatagccgctaaacgggttaaggggcgccgcgccgccggcgccggtccacaggtcgttacggaagcgatgatattcggcgccgaggatcagggtgtgtgccaggtcgcctgtattgaaatcggcgcgcaggcggttatcggttgaccagccgtccagcgaaccgcgcgaaccgctgtagccgcgggccagcatgtcgctgtcatctatccagccgacctggtagacctgatcgagggagacgttggtatgggtgtagctcccggcggaatagaccgaccagacgtcggtgaactggtggtcaaactcatagctgtagatctgctggcggcgttgatagccatctcccggatcgccttcgttggtgctgggggagagcttacggccattgtgcgcgtagcgggtgccgtccagcggcaaagagccgtggtagccgccggaaggatctttttgcagataggcgcgcagcagcagcgaggtgtcgctgtccggctgccacagcagggaaggcgaaatcgcgtagcgctcttcgcgggtatggtcatactgcgtgtcgctgctgcgggtcatcccgatcagccgccatgcccactggtcattgatggcgtcggtgtaatcgaaggccgcgcctttggtattttgcgtgccgccggtcaggcggatgtggccctgctgactgaactgcggacgtttggaagtcaggttgaccacgccgcccggcacgctctgcccgtagagcgcggaggaggggccgcggatcacatccacgcgttcgataaaccacgggtcgatttgcaatacgttatggctgccgccgtcgctcatcaggcgcatgccgtcgaggaacaggttatcgacgtcgccgccgtggtagccgcgcagggagatggcgtcgaaccgggtggcgccgccgccgaagctggagtagacccccggggtatattccagcgcctggctgatggtattcgccccctgatccgccatctgctggcgggtgaccaccgacaccgactgggcggtagtgattaacggttggtcggttttcgtcgccccgagcgaggtgctggcgctgtagccctccgtcggcgcgctggcggacgccggcggggtggcagtgaccaccaccgtctcttcggcttgcgtggtgaaggggagtgcgaccgcaagggcatacagcagccccgggcgttttcgagaaatagccacgttcataagatcatcctgaaccaacgcggtctggtactcctgtacgccgccgcgtgaaaaacgaatctgtcattattcgttaaaaagtaatgcgaattattattgtttgtatttgtgcgatcaagcgaaaaggtgacctgttcaacgcgagggggtggggaagtgtttcccgcgagccgcagaatgggtctgcgcgggacgatagtgaccagggagaccgcttccccccctaccgattttggtagggggcggcgaagcgtcaggagccggtcttttgcggttccgcaggggcggggtcgttagccgcgggcgccgcaacaggtttgtcctgcggtgaaggggttgtcgccggacgggtagcgggcagcgcatcgcagggtttctcctgcgggcagatcagatccaacatcttcagggtgacgccgttggtccagccaaagccgtcctgcagcggatattccccgccgccgccgccggtgccggtcgagctcacgtcatacttctccaccagcttttgcttactgtcataggtatgctgcacgttggtcaggaagcgccaggtgacctccatggcgatcttctgctgaccatagttttgcagcccctcgaccgccacccactgcagcggcgcccagccgttgggggcgtcccactgctggccgctgttgacggtggtggtggtcagcccgccgggtttaagcaggcgcgactcggcggcggcggccactttcgtcgcccgctcgcgtgacgcggcattgacgtacagcgggaacagcgccgccgcggtcaactgattgcgcaccttgtggcttttcagatcgtagtcggcgtaccatccctctttatcattccacaggtatttctcgatggcctgctggcgggcgttagccagcgcatcgtactgcgtagcgccagcgctgtccccggatgccttgctggcgcgggcgagggttttctccagatggaacatcagggcattgagatcgaccgggacaatcgaggtggtgcgaatggtggcgagctgctgcggattgtccatccagcgggagctgaaatcccagccggaggcggcggcggagcgcaggtcgcgatagatctcggttgccggacgattcgggttgcttttggcggttttgacgtcgtcaagccaggactcgggacgcggggtgtcgttatcgtcccagtagcggttgagcagcgcgccgtccgccatccgcaccgcccgtttgtcggcgctgccgggagccagcgcgtccgctccggccatccagtagcgatactctttctccagctgcggctggtaggttttcagcacctggtcgccatcgtgcgtcgccagcaggctcaccataaaggagaagaaggggggctgcgaacggctgagataataggtgcggttgccgttggggatatggccccaggcgtcaatttccgcggcgaagttggcgaccatatcctcgactttatcccagtgaccgctttcggcaagacccagcatggtgaaatagctgtcccagtaatagacttcgcggaaacgtcctccgggcaccacgtagggcttaggcagcggcagcagcgagtcccatttttccacctcgacggtgctgcgggtcaggaccggccacaggccatcgatatgttgacgcagagtttgccctttgggcggcacataggtgtcgttctctttcggcagcgtgaagttcagttcgacgaagtggcgcaggtcgaagctggcctggtttttttgcatccggtaatcggcaaggatcatcagcggatcgctgttagggatagcgtcggcgaaggttttctgatcggcaaacagcttcgcgctctggacatcattgaacagcgggcccagcagaatatccggcgaggggggcggcgcggttttgccgtcttccgcctgagcgttcaggctcatcagggcgatcagagcgccgccgatcgccaggcgcagggaacagggcaaagcagcgggacgacgtgcatcagtactcgtcatggggagttctccttatcattatcgactgcgggccacgacgtttggccatccaaaaaccttagacgaatatctgccgctgcgcgtgtcaggggtaacattttgcgcgaaaacagaggatttacctgccaggtctcctgagaccgccgcgggctgggccgcctggctgagggcgctggcgtccacgatggcgcaaaaaacgtcgccctgcctcacgacggtgcagccgccgccgggcgcgggcggctgttttgacgattttttgcacaaccagacggcggggctgaaccgatttgcacaacgccgcggcggcagaggacctggcataattaatgcttatctcttagcgggattaccacaaagtgagtacaaccggaggggatagccatgattaaaattacgctacctgacgggcattattatgacgagatgctgaccgcgcagggtgaacagcggccgcactataatgcctggtggcaatggtttcgcaacaccgatcaattctctatccggcagaaaaaagcgcaagcggaactgctttttcaccgtatcggcatcacctttaacgtttacggcgaggatgaggggaccgagcggctgatcccgtttgatagcgtgccgcggatcatacctgccggggagtggcagcgcattgaccgcggcatacgccagcgggtgaaagcgcggaacgccttcctctatgacatctatcatgagcagaatatcctgcgcgcggggctgatcccggccgagcaggtgctggccaacgagcagtatcagccgtgcatgcagggcatcaacctgccaaacaacacctatgcccatatcaccggcgtcgatatggtgcgcaataacgacggtcagtactacgtgctggaggataatctgcgcacgccgtccggcgtctcctacatgctcgaaaaccgtaagatgatgatgcgcctctatccggagatgttcgagcagcatcacattgcgccggtggagcgctacccgagctacctcctgcagaccctgcgcgaaagctcgctggtggatgatccctgcgtcgtggtgatgaccccgggtcgcttcaacagcgcctacttcgagcacagcttcctggcgcagcagatgggggtcgagctggtggagagcgccgatctgtttattaaaaacggcgcggtgtatatgcgcaccaccgaggggccgcggcgggtggatgtgatttatcgccgcatcgacgacgcctggctcgacccgctggccttccgcgccgattcgatgctcggcgtcccggggctgctgtccgtctatcgcgccggcggcgtagtgctggccaacgccatcggcaccggggtggctgacgacaaatcgatctatccgtacgtcccggagatgatccgcttttacctcggcgaacagccgatcctcagcaatatccccacctggcagtgccggaaagcggaggacctgcgctacgtgctgagcaatctcgagctgatggtggtcaaggaggtccatggcgccgggggctacggcatgctggtcggcccgcgttcgactaaagaggagcgagaggccttccgccagcgcctgctggccaatccggccaactatatcgcccaggacacccttgcgctgtcgacctgccccaccttcgttgaggaaggtctgtcgccgcgacatatcgatttacggccctacgtgctgtccgggcaggagatgcggctggtgcccggcggcctgacccgcgtggccctcaccgaagggtcgctggtggtcaactcgtcgcagggcggcggaaccaaggatacctgggtgatggaggatgacgcatcatgctaagtcgtacggcgagtgaactgttctggatggcccgctatctcgagcgggcggagagctacgcccgggtgctggacgtgacctggaaattatcaatgatcccccgccacagccagcagtcgcgggatctggcgctgccgctgaatttgtcgatgacccacgagttgtttcaggcgcgccatgcccgctttaccatgagcaatctgctcaacttttttgcccttgatggcaacaacccctgcagtatttacagctgcgtggagatggcgtggaacaacgcgcacgcggtgcgcggcagtctgtcggccgaagtgtgggagagcatcaatgccacccgcattgaactgcggaccctccgccagcaagggctgggcgagctggggagcgacggcttttttgagtgggtgaaagagcgggtgcatctgtttcgcggagcggtgataggcacgctgctgcgcaacgacgccctgagctttatcggtatcggcaccctgattgagcgcgccttcgccaccacccagctgctgctgattaaggatcaacagctgaccaacgatccggacccggtgcgggaatactaccggctggataccctgctcaatgcggtcagcgcccgcgaagcctacaacagcctctaccgccagccggtcagtcgcgaaacggtgatggagctgctgatcctgcgcaacgatattccgcgttcgctgcgcgccagcattgccgatctggtgggcgagctggagaagatcgccaacgaccgctcctatcaaccgctgcgcctcgcccatcagcttaacgttgatctgcgcttcagcacccgtgacgacctggcgcaggcggacctgcagaccacccttaacgggctgctggcgagaattaacgcgctgtccgacagcatcagacaaacctatctggaggccttatgaaactggtcatcgatcatctcacccgctatggctacgatgaagaagtgaagttttccacccagtatctgcgcctgacgccgcgcagtaccggccggcagacgatcaccgcctggacgctgaccctgccggacggcgcggcggtgaccactaccgacggctggggcaatgtgctgcatgtgctgacgctggataacccgcacaaggagatcaccatccgcgccagcgggattgtcgatatcgccgacgaaggggaggagacgcgtgatgaagaggccgagctgctgtcgccgctggtttttctgcgctgtacgccgctaacccgcgccgatacggcgatccgtgagtttgcccagcgcctctatcgtcccgatgcggcggaagagagtctgaatcaactgatggcggatctgctgttaagaatgccatactcccccggcgcgacccaggtgcaggactccgccgccgacgccttcgcccgcgcgaagggggtgtgccaggatcatacccatgtttttctcgcctgctgccgcgcgctggagatcccggcgcgctacgtcagcggctatgtctacagcgataacgcccagcatgtggcgatgcatgcctgggcggaagtctggctcgacggccgctggctgtcgtttgatatcaccaataatacccgtcgcctgaatcagcatttacggctggcgaccgggctggattatctcgacgcctgcccggtacggggcacccggctgggtgggggcggggagattatgttaactaacgctgaagtgcgcgaacacagccagcaggcgcagcagcaataatacgggaataaccgcaatgacctactgtgtggccatgtgcctggcggatggactggtgtttgcttccgactcccgcaccaacgcgggcgtcgaccatattgccacttttaaaaagctgcacgttttccatcaggagggggaacgggtgctggtgctgcaatccgccggcaatctggccaccacccagagcgtgataagcctgctcagcgcgcgcatccgtacccagcaggagccgaatctgatgcaggtcacttccctctacgacgccgcgatgctgatcggtaaaacgctgctggaggtgatccagcgcgacagcagcaaccagcagacctgcagtaacaccaacttcaactgcaacctgctgcttggcggccagatcgccggcgaaacccatcgtctgttccatatttatccggagggcaactttattgaagccacccgcgacacgccttatttccagattggcgaaagcaaatacggcaaaccgatcatcgatcgggtgctgaccatcgacacgccgctggagcaggcgatgtgctgcgtgttgatctccattgattcgacgctgcgcagtaatctgtccgtcggcctgccgctggatacgctgctctaccgcagcggcagcttcagcagtgccgggcagcatcgcatcaccgacagcgatccctacttcaaccgcattcgcaaggcgtggtccgaagggctgttgcacaccttccagactctgccgacctggacgccagcggagcgggaagaggagtagtcgctgtgacgctccgccggtatcgtcggcgcgaaggcgggtaaggcgctggagtcctttagtatcctcgacctggcggtaaaatttcagcaacagcggtaaataaattaacgacaggccgcacggattgtaggccgggcaaggcgtcgccgccgcccggcacaaaagcgacgccgctgtccttgtccggcctgggaaaggggcttccgggctgtggtaagcattttcctgcgttgtatctgactacgtggcgcgtctggcgaggttctctgcatttaattgtggtgcgaaggccaacaggaggtcagcccgcgaacgaaacgtgatatacaaccgaaacgcaggttcggtgaaacgtaataagaaatatgtgataccaggataattaaagcattcatgccataccgtattctgttgtaactgaggagaatatgttgcaggaggcagtatgaataatgaaaatacgtatggctacgtatatatactggtatcagataaaacaccgtatattaaaattggtggcacggattatttgccagagaagcggtgtaaggagattaatacccagccaccctattgtttatatgccccatggcgggtagcagactaccgtagcgtacctgactggcataatgtcgaaacctggctgcactatctttttcgagattctcgcgtgcggactattgcaaatcagaaagagctatttaatgtcacgcctgaactggctgcccatcatcttgccagccttgatcaacaaccgttgacgactaaacctaaaatcgaccgactttttcatcaccaggggttgagagattacctggtaaaactattcgctatcgccggttgtgaaaaatggcgacataaagaaggggtttgggtgtttagtctgttcccaggggcgcatagcggatggtcccggtattttacgcttagtatccatagccacgaagtcgcttattcaacgcggtcccgcgattgtcaaattcatatgttattagcagatgagcttatcatggactatcccgatattgttcggtgggtgacggaccataaaggagggattgaaaaaccaatttataaaacagctttatcacacgcgcagcaaatctggtttgagggtgagtttgaagagtgtcttcagttactctcgttccctgaagtccagctggccgttgctacctactgggaccgcgcattaacaaaatacgattatagtcttcaggcgaagtatcataaccggatggcagttgaggagatcttcaaacagttacaagtacaacggcagcgagaatcgagcgcaatgtaaacaccgccaacctgttgcgccatggacggtattctctttgtcctgctgaatacaaacgcgctttttggcaaagctaagtcaattaaatactttgttatttaacgtgttatctcacatcttcggtgggaatgaggcaacacggcaaggtatcggaagtgacggaaaagaagacggctgtctatgtggatgaccaacagcgcatcctgatccgccagctggcgcgcagctggctgtggcgcagcgagctgccgacctggctgctgattgtgacggtttacggcggctggtttgcctgcgtggcgggctggcggacgctgggactgtttccggccacgctgctgttgatctggtttaccgcctggtatatgtccttacagcatgagctgatccatgggcatcccacccggctggcatggtttaaccagctgttggggacgctgccgctggcggtctggtatccctatggcgtctaccgcgacagccacctggcgcaccatcgcaaccatctgctgacgcaccctgaggatgaccccgaatcgtactacgtaacggcggaaagctggcagcgcttctcagcctggcagcgccgccttatccacctgcgcaacaccttctgggggcgtctgctgctggcgccgatgatggatattattcacaccctgaacagcgcgctgtgggctttccgcgagggcgaccgccgcgctatctccatgtggagtctgcatctgttgctgctgacgggtctgctgacctggatggcggcgcagggtttttctccgctgtggtttgtgctggcggtgagctacccggcgctggccctgaccaaagtacgctcttttctcgaacaccgcgccgcggatgacccgctggcccgctcggtgatcaacgaggccgggctcccctggcgggtgctgttcctcaatctcaactaccatgcggtgcatcatgatctgccaggggtcccctggtacgctttacgtcaactgtatctgcatcgccaggcggcgtatctgcagcgtaatcaggggttcctggtgcgcgggtacggcgagtggcgacgccattttagccgccgggcggtagcggtgaacgcccatccgggctttggcgagcaggcgcaggcgggaggagaatatggctgaacgcatgacttttccgatgtatgccatccaccgtcaacagacccaggccctgtggcaggcggtgcagtcgctgctggacgaacgcggcgtgatggtggcgggggaccctccggcggctgaccccggggatctgctggctcactggcgccagccgacgctgttgctgagccagacctgtggctacccgctggtgacccaattgccggaggtgcagacggtgggctgcttccactacgctgcgcccggttgcgaagggcgccgctatcgcagcctgctggtggtccgcgaagcggatagtcaccggatgctgggggacttttttggccgtcgggcggtgtgcaatgccgagcactcgcagtccggctacaacgtactgcgtaaaatggtcgcgccgctctcccgggaggggcgttttttttcagcggtgatgttcagcggcagccatcggcaatcgctgcgcgaactgcagcaggaaaacgccgatatcgccgccatcgactgcgtgacctacgctctgctgcagcgccatcagccgcaggctctggctggcctggtggcgatcggctggagcccggccgtgccagggctgccgctgatcaccgccggcgccaccccggcggcaacgctgaatagcctgcgcgaggcgctccagcagctggtaagcgatgatcgctatcgttccctgtgcgacgccttgctgatctgcggctatagcgatatgtcgcgggaggcctatgcgccgctgctggcgtggcgggatgaggccgcggcgctgggggtcagccagctataggcgaaatgcccgggccagcgatctgcgccggggcgggctatagcggctggtcccacggctgggcgctgagatccattcgcagataggaagagagcaggtcgacagccagctggtcgctcatcagctgctcgttaagctgctggcgcagccgcgggatcatctcttcacgataggccgggtcgttgttttatggatttgtgatcggcaacacaaatgactctccaatggccgtcgtaaaagataaattaccagggttgattttaatcaaagtatgaccaactgcgctatggcggaaaaaagatcgctgcctatcgcgacccaaaagaaaaattgtgaatttaatgtttctttggtgtaaataatgaccgtgcattttccccaaccgccggggataaaatgtgatgcccgaccggcttgtcgttaaataatggcgtttattacgtctgctttttattctttacagcattaatttaattttcggctttcttctcaccctgatagcgcgggtcgaataacgtacaaaaggcgtattttttatcgccatttcgccgtcgatgttatcgccatcaattatttttatccccgcattcggccacggcaaaaggcgcgcaaatagcgttcatgatgcttttaatgtattgattttactttacttattctggctcgtggatcctgcttatccgccgcggcggagcctttgtgagagctctcacataacccggcaattgcgatttgttacactttccgccgtcaacaaaggaatgaaagtgagacgcgatgaatactttttctctgcctaaaacacagcatctggtagttttccaggaagtgatccgcagcgggtcaatcggggccggagcaaaagcgttaggactcactcagccggcggtcagtaaaattattggcgacatggagagttattttggcagcgaattaatcgtccggcgaaataccggcgtctcgctcaccgaggccgggcaggtatttctcaactggtcagaagcgatcacccgtgaaatgaaaaatatggtcaatgaaatgaatgctctgaccaacagcgcggtggtggatgtctcctttggtttcccttcgctggtcgggtttacctttatgtcggagatggtgcatcagtttaaaatgactttccccaaggcgcgggtctcgatgtatgaggcgcagctctccgcctttttgccggcaatccgcgacgggcgcctcgacttcgccatcgggacgctgagcgatgagatgaaactgcaggacctgcacgtcgagccgctgtttgagtctgagtttgtgctggtggcgaaccgggcgcggatcggcaacggcaccgtccgcctggcctcgctccagcacgagcagtgggtgctgccggagaccaatatgggctactacagcgaactgctgaccaccctgcagcgcagcggtatccgccgtgaaaatatcgttaataccgattcggtggtgacgatctataacctggtgctcaatgccgatttcctgacggtgatcccctgcgacatgaccacgccgtttggctcgagccagtttgtcaccatccccattaaagaggccttgccggtggcgcgctatgcggcggtatggtcgaaaaattaccggttaaaaaccgccgcggcgtcgctggtggagatggcgaaacactattcctcggggcagggcaaccgccactggcagccattacaaattattgcgtaactgaaagtcgttaaataatccaacacacgtcctcgctgttatcagcaggatgacgcccggtcattgactttatattaagatacagaggccataatgcatattacctacgatcttccggtatctattgacgatattctcgaagcgaaacaacgcctcgcgggaaaaatatataaaacaggcatgccccgttcgaattattttagcgagcgctgccagggcgaaatatttcttaaattcgaaaatatgcagcgcacgggttcatttaaaattcgcggcgcctttaataaactgtgcggtttaaccgcggcggaaaaacgcaaaggggtggtggcctgctcagcgggcaaccacgcccagggcgtctcgctctcctgcgccatgctcggcattgacgggaaagtggtgatgccgaaaggggcgccgaaatcgaaagttgccgccacctgtgattattcggcggaagtggtgctacatggcgataactttaacgataccctcgccaaagccagcgatattgttgaacttgagggccgcatttttattcccccctatgacgacccgcaggttatcgccgggcaggggactattggactcgaaatattagaagatctgtatgacgtggataatgtcatcgtgcccattggcggcggcggcttaattgccggtatcgcgatcgcgattaaatccattaacccgacaatccgcattatcggcgtgcagtcggagaatgttcacggcatggccgcctcctggtatgccggggaaatcaccagccatcgccacgccggcaccttagccgatggttgcgacgtcgcccgcccggggaaactgacctatgaaatcgcccgccagctggtggatgacatcgtcctggtgagtgaggatgacattcgccagagcatggtcgccttaattcagcgcaataaagtgatcaccgaaggggccggggcgttagcctgcgccgcgttattaagcggcaaactcgacagctatatccagaaccgcaaaacggtcagcctgatttccgggggcaatatcgatctctcccgggtatcgcaaattaccggttttgttgacgcttaattcaatacataagtgaggacaggatatgagtacgactgagagcattgcatccagccagacaagcctttcgtcctggcgtaaatctgacaccacctggaccctgggcctgtttggcaccgctatcggcgccggggtgctgtttttcccgatccgcgccggcttcggcgggctgatcccgatcctggtgatgctggtgctggcctatcccatcgccttttattgccatcgggccctggcccggctatgcctgtcgggggctaacccctccggcaatatcaccgaaacggtggaagagcattttggcaaaaccggcggggtggtgatcacctttctgtacttcttcgccatctgcccactgctgtggatttatggcgtcacgatcaccaatacctttatgactttctgggagaaccagctgcagatgccggctctcaaccgcggggtggtggcgctgctcctgctgctgctgatggcgtttgtcatctggtttggtaaagacctgatggtcaaggtgatgagctatctggtgtggccgtttatcgccagcctggtggtgatctccctgtccctgatcccctactggaatagcgcggtgattgaccaggtcaacctcagcgatatcgccttaaccggtcacgacggcattctggtgacggtatggctgggcatctccatcatggtgttctccttcaacttctcgccgatcgtctcctcgtttgtggtctccaaacgcgaagagtatgaagcgcagtttggccgcgagtataccgaacgcaaatgctcacagatcatctcccgggccagcatgctgatggtggcggtggtgatgttcttcgccttcagctgcctgtttaccctctcaccgcagaacatggcggacgccaaggcgcagaatatcccggtgctctcctatctggcgaaccactttgcctcgatgtcgggcaccaaatccacctttgccaccctgctggagtatggcgcgtcgatcatcgccctggtggccatcttcaaatcgtttttcggccactatctcggcacgctcgaagggctgaacggtctgatcctgcgctttggctatcaaggggataaaacccgggtctccagcggcaagctcaataccctgagcatggtgttcatcatgggctcgacctgggtggtggcgtatgccaaccccaatatcctcgacctgattgaggcgatgggcgcgccgattatcgcctcgctgctgtgcctgctgccgatgtacgccattcgtaaagcgccttcgctggccaaataccgtggccgtctcgacaacctctttgtgaccgctatcggtctgctgaccatcctcaacattgcttacaaactgttctaatccggctcaggccacgcggagtacaacatgactgaatttccggtagtactggtgattaactgcggctcgtcgtcaatcaaattttccgtcctggacgccgccagctgcgactgcctgctcaacggcgtggccgagggcatcaacgcggaacgggcgtctctctcgctcaacggcggcgagccggtggcgctggcgcagcgcggctacgaaggcgccctgcaggcgattgccggggcattagcccaacgcgacctcatcgacagcgtggccctgattggccaccgcgtcgcccacggcggcgacctgttcaccgagtcggtcattattagcgaggaggttatcaataacattcgccaggtatcgtccctggccccgctgcataactacgccagtctcagcggcatcgcctcggcgcagcggctgttcccggaggtgatgcaggtggcggtctttgataccagctttcaccagaccctggccccggaagcttttctctatggtctgccgtgggagtattaccagaatctcggggtacgccgctacggtttccacggcacctcgcaccgctatgtgtcccagcgcgccctggcgctgctcgggttgccggagcaggagagcggcctggtgatcgcccacctgggcaatggcgcctcgatctgcgcggtgcgtaacggccgcagcgtggacacctcgatggggatgacgccgctggaggggctgatgatgggcacccgcagcggtgatgtcgacttcggcgccatggcgtggattgccggggaaacccggcagaccctcagcgacctggagcgggtagccaacaccgcctccggcctgctggggatctccggtctttcctccgacctgcgggtgctggagcaggcgtggcatgagggccatgcccgcgcccgcctggcgattaaaacctttgtccatcgtatcgcccgccatattgccggccacgccgcggcgctgcagcgtctcgacggcattattttcaccggcgggattggcgagaactcggtgctgatccgtcggctggtgagcgagcggctggcggtctttggccttgcgatggacgccgcccgcaatcagcagcccaattcggccggcgagcgcctgatctccgccgacggcagccgggtgcgctgcgcggttattcctaccaatgaagagcgcatgattgccctcgatgcgatccgcttaggccggatccacaccgcggcggcgctggcctgactttttattctgtagagagacgatgttcatgaaagtagatatcgatacccaggatgtacgatacgccgacgcctggcagggctttcgcggtacggcgtggcaaacgcagatcgacgttcgcgactttattcagcataactacaccccttacgagggcgatgagtctttcctcgctaacgcgacgccagcgaccaccgccctctgggagcaggtgatggccgggatccgcgtcgagaacgccacccatgcgccggtggatttcgacaccaatgtcgccacctccatcaccgcccacgcggcgggctatatcaaccagccgctggaaaagatcgtcggcctgcaaacggaccagccgctgaagcgcgccctgcatccttttggcggcatcaagatgatcaaaagcgccttcgaggcctatggtcgcgaaatggatcctgactttgagtatcagtttacggcgctgcgtaagacccacaatcagggcgtttttgacgtctattccccggatatgctgcgctgccgcaaatccggggtgctgaccgggctaccggacggctatggccgcggacggatcatcggcgattaccgccgcgtggcgctgtacggcattcgctatctggtccgcgaacgtgagctgcagtttgccgacctgcagccggcccttgagcgcggcgaggcgctggaggccaccctgcgcctgcgcgaggagctggccgaacagcggcgcgcgctgctgcagatgcaggagatggcggcccgctacggctgcgatatcgcccacccggcgcgcactgcccgggaggcggtgcagtggctctacttcgcctacctggcggcggtgaagtcgcagaacggcggcgccatgtcgctggggcgcacggccaccttcctcgacatctatatcgaacgcgatctgcgcgccggtttattgaatgaggagcaggcccaggagctcattgatcacttcatcatgaagatccgcatggtgcgtttcctgcgcaccccggaatttgattcgctgttctccggggatcccatctgggcgacggaggtgctgggcggcatggggctggatggtcgcaccctggtcagcaaaaccaccttccgctatctgcatactctgcacaccatgggcccggcgccggagccgaacctgaccgtgctctggtcgcaagcgctgccggcggcgtttaaaaaatatgccgcccgggtctctatcgccacctcgtcgctgcagtatgagaacgacgatctgatgcgcagcgattttcacagcgacgactacgccatcgcctgctgcgtcagcccgatggtgatcggcaagcagatgcagttcttcggcgcccgcgccaatctcgccaaaacgctgctctacgcgattaacggcggggtggatgagaaactgaagatccaggtagggccgaaaaccgaccctctgcgtgatgaggtgctggactacgacaccgtgatggccagcctcgaccactttatggactggctggcggtgcagtacatcagcgcgctgaacatcatccattgcatgcatgataagtacagctacgaggcggcgctgatggccctgcacgaccgcgacgtctaccgcacgatggcctgcggcatcgccggcctgtcggtagcggcggattcgttgtcggcgataaagtacgcccgggtgaagccggtgcgcgatcaccacgggctggcggtggactttgtcattgaaggcgactatccgcagtacggcaacaacgacgatcgggtcgatgccatcgcctgcgacctggtggagcgctgtatgcgcaaaatgcaggcgctccccacctggcgtcaggcggtgccgacccagtcgatcctgaccatcacctccaacgtggtatacggccagaaaaccggcaacaccccggacggacgtcgggcggggacgccgttcgctccgggggccaatccgatgcatggccgcgaccggaaaggggcggtggcgtcgctgacctcggtggcgaaactgccgtttacctacgccaaagatggcatctcgtataccttctccatcgtgctggcggcgctcggcaaagccccgtcagcgcaggaaaacaacctggtgggcctgctggacggctacttccaccacgaggagacggtggaggggggacagcatctcaacgtcaatgtgctgaaccgggaaaagctgctcgatgcgatagaacacccggagcagtatccgaatctgacgatccgcgtctccggctatgcggtccgctttaacgcgctgacccgcgaacagcagcaggatgtgatctcccgaacgttcaccagtcaactctgagcggccaccgggtcacaggagagcctttaacgggctctcctgttatcatcttcacattaccgcaacaaaataatcaccactgttgatcatattcgcatttttgcaccacgctggcgcgcagcgaccgctaactgcatctatgtttagctcacgggccggtacggataccgcgttgtccggctcgccacgtgatggcaaccgatctcctgacctgaaagggaatgcgcccttgccggatgcggcacgggttgccgtcgcgtgcgtaccgaccggggcgactgttctccggtgttccactccttcctggcgggatttttgcttcttccaccctggccgtcctggcgctgcgccaacgtcggcaccacacggtaagtgatattttctgcgtcattccatgacgccaggctttacatcgctgaggaatatccgaatgtctttgaaactgaaaacaatgacgcttcatgttgtgatagcaggttgtatgagcatggccttttacgcccaggcagacgtgaagatcggcgtcgccgggccctttaccggccccaacgccacctacggcgcccagtactggaagggggcctcgcaggcggtggccgatatcaatgccgccggcggcatcaaaggcgaaaagattgtgctggtgcagggggatgacgcgtgcgaaccgaagcaggcggtggcggtggccaaccggctggtggatgaagcgaaagtctccgccgtggtggggcacttttgctcttcctcaacgatgccggcctccgaggtatatgacgaagccgggatcctgaccattacccccggctcgaccaacccgcagatcaccgagcgcggcatgaaagatctcttccgcatgtgtggtcgtgacgatcagcagggggcgatcgccgccaactatatgctggacgtgctgaaggcgaagaaaatcgccgtcatccacgataaagacacctatggtcaggggctggccgatgccacccgcgcggcgctggcgaagcggggtaccaaagaagtgttgtacgaaggcctttcccgcggtgaaaaagactttaacgccctggtgaccaagatcggcgccctcaagccggacgtggtctactttggcggctgccatcctgaagcgggcccgctggtgcgccagatgcgcgagcagggggtgcaggccaaattcttctccggcgactgtatcgtcaccgaggagctggtcacggccgccggcgggccgcagttcaccaacggcgtgctgatgacctttggtcaggatccgcgcaccctccccgacggcaaagcggtgatcgagaagttccgcgccagcggctttgagccggaaggttataccctctacgcctacgcctccattcaggctatcgccgcggcctggaacgccgtcggtaccgataacgccaaagccagcgactggctgaagagccacgacgtcgagacggtgatgggcaagaaagcctgggatggcaaaggcgacctcaaggtgtccgactacgtggtctatcagtgggacgacaagggcaaatatcaccagctctgatcggccacgacctgaggacgctctgtccttttgacttgcgaattgtcacatgacggcggttgaccgagaacggaacccggcggccgtctgcctggcggctggagggactatgacggcgttttttctgcaacaactgatcaatgggctgacgctgggcgcagtgtacggcttaatcgccatcggctacaccatggtgtatgggatcatcggcatgatcaacttcgcccacggcgaggtgtatatggtctccgcctacctgtgcgccatcggcctggcgctgctctctttcttcgggatccactccttcccgctgctgattttcgccaccctggtgttcaccatcgtggtcaccggcgtatacggctgggcgatcgagcgcatcgcctaccggccgctgcgcaactcgacgcggctggcgccgctgatctcggctatcgggatgtcgctgatcctgcagaactatgtccagctgagccaggggccgaaccagcaggggatcccgacgctgcttagcggcgcgttgcgcatgacggtgggcgatggggtggtgcagatcacctggaccaaggtgtttattctcgtcgcggcgctggtggggatgcttatcctgacctggattattcagtatacccggctggggcgcatctgccgcgccacccagcaggaccggcgcatggcggcgatccttggcatcaataccgaccgggtgatctccctggtgtttgtcatcggcgcggcgatggccggtctggccggcgtgctggtgaccatgaactacggcaccttcgacttctatatcggatttattatcggcatcaaagccttcaccgccgcggtgctgggcgggatcggctcgctgcctggcgcgatgctgggtggtctgctgcttggggtggccgaagcccagttcgccgggctggtgaattcggattacaaagatgtcttttcctttgcgctgctggtggcgatcctgatttttcgcccgcaggggctgctgggacgtccgctggtggccaaggtctaaggaggctttatgggtgaaattacgcgccagcctgcgcgggctatccaaaacgcgctgatcgacagcgtactggccggcctttgcgcgttaattgtctttggcccgatcgtcggcgtggtgctcaaagggtatggttttaccctcgcgcctgcgcgggtggcgattctggtggcggtggtgatggccggcaggctggcgctcagtctgctgctgcagagccacaggggaaaagcctttattgcccgctttgagggggcggatgacggggtgtacgtccggccgccgggctaccgctcgcggctgcgctggataataccgctgctggtggggctggccattgtctttccgtttctcgccacaaaatatctgctgaccgtggccattcttgggctgatctacgttctgcttggcctggggttgaatattgtggtgggcctcgcgggcctgctcgatctgggctatgtggcgttttacgccatcggcgcctacggcctggcgctgggctaccagtacctgggacttggcttctgggcgatgctgccgctgggggcggtgatggcggctctcgccggggcgttgctgggctttccggtgctgcgtatgcatggcgactatctggccatcgtcaccctcggctttggcgaaattatccgcctggtgctcaacaactgggtgagcttcaccggcggccctaacggcgtaccggtgccatcccccacgctgtttggcctcgagtttacccgccgggccaaggatggcggcatccccatccatgagtttttccacgtcagctacaaccccaacctgaaattcatctttctctacgccgtgctgtgcctggtggtgatgctggtgctgctggtgaagcatcgcctgacgcggatgcccatcggccgcgcctgggaggcgctgcgagaggatgagatcgcctgtcgggcgatggggctcaaccacgtgctggtgaagctctcggcgtttatgctcggcgcgtcgacggccggcatcgccggggtgttcttcgccagctatcaggggtttgttaacccgacgtcgttcaccttttttgagtcggcgctgatcctggcgattgtggtgctcgggggaatgggctccaccctgggtgtggtactggcggcgtttgttctgacggtcaccccggagctgctgcgcggttttgacgaatatcgggtgctgctgttcggcgtgctgatggtgatgatgatgatctggcggccgcgcggcctggtgcgcaccagccgcagcggggttgcgttgcgaaaaggagtcgcgccatgaccgacagcatcttacgcgttgagcatctgatgatgcatttcggcggcatcaaagcgctgaatgatgtcaatctggaggtggagcgggggtcgatcaccgccctgatcggccccaacggcgcgggcaagaccacggtgtttaattgcctgaccggtttttatcgggcgacggggggcagtatcgtgctgcgggcgcgggaaaaggtcaccgatgttattcaggtgctggggcagaagcttcacccggacgattttctccacccggcgcagctggggaggcggatctattacaagatgttcggtggcacccatctggtgaaccgcgctggcctggcgcgcaccttccagaatatacgtttattccgcgagatgtcggtgatcgagaacctgctggtggcccagcatacccaggtcaaccgccatctgctggccgggatcctcaatacccgtgggtatcggcaggcggagagtcaggcgctggatcgcgctttttactggctggaggtggtggagatggtggactgcgccaaccgtctggcggggaccctctcctacggacagcagcggcggctggagatcgcccgcgccatgtgcacccgtccggagatgatctgtctggacgagccggccgccggcctcaacccggtggaaacccaggcgctgagccggattattcgctttctgcgccagcagcacggcattacggtgctactgatcgagcatgatatggggatggtgatggagatttcggatcatatcatcgtcctcgatcacggggacgtcatcgcccgcggcgcgccgcaggcgatccaggccaacgccagtgtgattgccgcctatcttggcgctgaggaagaggagacgcgccgatgagccagcctttgcttgcctttaatgaggtggatgtcttctacgggccgatccaggccctgaagcaggtctccctcaccgtcaacgagggggagacggtggcgctgatcggcgccaacggcgccggtaaatcaacgctgctgatgtcggtcttcggccagccgcgcattgccggcggggagattttctatcgcggggaggcgatcagccggaaatcgacccactttatcgccagcaacggcatcgcccaggccccggaagggcggcgcatctttcccgatatgaccgtcgaggaaaatctgctgatggggaccattgccattggcaaccgctatcaggccgaggacaaggcgcgaatgtaccagctgttcccccggctggaagagcggcggggacagcgggcgatgaccctctccggcggcgagcagcagatgctggccatcgcccgggcgctgatgagccgaccgcgcctgctgctgctggatgagccgagcctggggctggcgccgctggtggtgaagcagattttccagatcctgcgcgagctgacggctcaggggatgacgctgtttctggtggagcagaatgcccgccatgccctcaacctgtcggaccgcgcctacgtgatggtgaacggccagatccgcctgagcggtagcggccagacgctgctcaacgacccggaggtgcgtaaggcatatctggggatcagcggctgagggggttattcccgcggttcgttacgggttttaatgtgctgccagaaacgttcggcggcctggttaagccgcgagccggagcggtagagccaggcgccgatcggcagcgacaggctctcatcgaggatcgtcagccggccttcgtccagctcgcgctgaatggagtactgcggcagccagcccacgccgtcgccattgaggatcatgcgcttgagcagctcgctcatggaagagacaaaggtgagagagaaggtgatctccggcgtgcggtcgatcacctggttcacctggcgccccatatagctgtcgttggcgtatttcatcagcggcagcacgccgcgatgtaaatgaaacagcgggcggccatgttcgtcgcagggggagaccaggtgcagataagaatcaaaaattttatgattaataaacggatagttcatcaattcttcattatagaaggagaggataaaatcgctttttccctctttcaggttaaatacggcgtcgttgacgttaatcgattcaacatgaaaagtcttatttttacggtcggtgtaaccggcgatgatctcgggcagtaataacaccgacagcgaaggggcggcgtcgatccttattttctgggtagtgttatttaagcctttaatacggctgatctgaaaatccatgtcatcgagcatatttcgcgcatagccgacaaaaattttcacgcggttgggcagctgcagagggttggcgctacgatcgaagatgctgaatccgagggaagcctccagcgactggatgcgtcgactgaacgaggactgagagatgttgcgggctttggccgccagggtaaagctgcgcgactcctcgagggcaatcacatcatacagccattttacttccagatttgccaacaccgatccagtcctcaaaaacgcaataaaggctatgcaattttagcatagcgcatagaaactatgcaattaacataattatcgacaggtgttaacattttttggaaagttgagatttatgaatgcatatcggcgaccctacatgagcacgatatgaaatcgcgactcacggttatttattgctttatttcattgtccaggacttatcttattaaatagccggcgacgatgacgaaagcaatgaataacccaggcctcttaccttaaatagtttgtcaggagttccatgtcacaacaaattgaatcagtaaaaatggctctgcaggagctggggattaatgcaagcggcgaattctattacaaccctgattacgatttgcttattgcacatgaaacctctcctgagctgaccggcgcggcccgcggcgtgatgaccgactctggcgctgtggctgttgataccgggatcttcaccggccgttcgccgcgcgataaatacatcgtccgcgacgaacagactcgcgacaccgtctggtgggcagactccggcctcggccgtaatgacaataagccgttatcgccagacgtgtggcgcagcctgaaaagcctggtcgcgggccagctgagcggcaaaaaactgtacgtcatcgacgcctggtgcggcgccagcccggacacccgtcttggcgtacgcttcgtcaccgaggtggcgtggcaggcccactttgtcaaaaacatgttcatcgtgccaagcgccgacgagctggccagctttacgccagacttcgtggtgctcaacggcgcgggctgcaccaatgccaactggcaggcgcaggggatgaactccgagaactttgtcgcctttaatctcagcgagcgtattcagctcatcggcggcacctggtacggcggcgaaatgaagaaagggctgttctcggtcatgaactacctgctgccgcagaaaggcatcgcgtcgatgcactgctcggccaaccgtggcgaagcaggggacgtggcgctgttcttcggcctctccgggaccgggaaaaccaccctgtcgaccgatccgcatcgtcagctgatcggcgatgatgagcacggttgggacgatgacggcgtgtttaacttcgaaggcggctgctacgctaagaccatcaatctcgatccgcaggcggagccggagatttatggcgccatccgccgcaatgcgctgctggaaaacgtggtggtgcgcgctgacggcagcgtggattatgccgacggcagcaaaaccgaaaacacccgcgtctcctatccgctgtcgcatatcgacaatatcgtcaagccggtgtcccgcgcgggccatccgtcgaagg

SEQ ID NO: 141 - DNA, 96846 bp, Unknown
  source: /note="Description of Unknown: MKP2_2161_1 Mutant Bacteria sequence"
gctttattgtaggtgggccagttggtgattttgaacttttgctttgccacggaacggtctgcgttgtcgggaagatacgtgatctgatccttcaactcagcaaaagttcgatttattcaacaaagccattttgggactggatattcctctctcaactatctaagagaatttccatttgatgcgattaagttagacagaacattcattagtggtattgcccacgttgcacgggacttatctattgtaagaagcatagtgtctcttggaaaagctttcagtttaggtatagtcgcagaaggtgtggaaaataatgaacagtttgaattgctaaaaaatatgaattgcgatgaatttcaaggttattattattcgaagcctttgtcaggtgatcaactgattgattttttgaggggccaaaaaaaatagggctgtatgtcctattttttcatatactatcgttttccctttttaatttcatacattctttcgtctgcatcctgcatgatagcagagcattcagtatgaatttcctcatcatattcaataatccctgcagaaaaatctatgttgtattttttttgagaattaagattgtagctggtaatcccggccctcaatttatgaaggaattcttctgcttctttataggttgactcgggtaatagaacaccaaattcatcacctcctaatcttgcaacaacgctttttgaactactaagatcttccagcatatctgcaaaattgcaaagtacttcattaccttctgaatgaccgaagttatcattgattggtttaaaattatcgagatctatgatcagaacacagaatgtttttttcttttttttggcttttcttaacgattcatccgtcattagggcgaaagaacgccggttacatatacctgtcaaaggatcagtagttgcttcgtttattattctaaactcatcctctacgatttctgctaaatctttaagcaataagaagtcatctctggttaatactcttggttctgtatcaataatacatattgttccagctatctcaccatctggcagtcttacgggatgccctgcataaaaccggatataaggatcatttttaactaatttattttctttgaatcttggatcaaggcttgcatcgggcactattaatggttcactaagatctactgctattgtacaaaatgaatcacttctatctgtctcttttatcttcagcccataacatgacttaaaccattgcctgtctctatcaattaatgaaacaagtgctattggtacatcaaagagtttggtggcaatcctcgtcaatctgtcaaatcgttcttcatattttgtatcaaggatccccatagaatataatgataataacctgttctcttctttatggtttgtcataattttcatcttgagtggttattgcagggtagtgttggttatcgctatcttatcagaattgtcctggaactcaataatcccaatatctcataatcatataaaacttaacaagtttccaataaatcatgatgaatagtgaactgttacatctaatcatctgtgacctgaagcgctcattatacacttccatgtattcagaatgcataatgatttgtatattaaaaatcgccataacttacaatgacttattttttgtggcacaattaaagcgcatctgttcaaataaatgtaaagacattaatgcttgatcttcatggtttcttatgaaaaccagtggctgaagaaacgtatggcagttctgaatctgaacaagacgagacggcatgaaaggttcaagaaaattgtccaggaaggtacatagtttccttatccaatattttctactgagggtatattgtatcagcttaagacaggaactgttgatacagaacagaaaagttcaacacagcctgaatctgcgcgacgctaaattttttccttctggcgaaccaacaaacagcccgtttatagagagattctgcagacgacaaaaggattaatccctgaaattgcactgaattgtcacctgaagatgtgcaggacaagccagattactcttacaagggataccatcgtaatttagcaaaaacacctaagacctaaacgacagctaagtacatagtgccggacggatcatgattttttatttaacttacggacttcatttttcagcaattatcttttctcttctgttgtaaacttatgaaagcgttacgcgaaatcccgcaaggttacaggggtgtaccaggccggaaatcgcgtagcgctctcttctcttctgtttcctgcctaacatgtacatcctggcattactccaattctcccaaaaaccgtaaaacagccatcaacccgcgtcattactggcttcatggaggatctgagcagaaaaaggatcctttacgtatttggttttacccgcaataatgcgggataagacaacaaaaggatccgcgcgctgcgatttattgtcatggcaggatcggcccgtcaggtgcaaaatacctgtatccataaacagtgcgtgcgctacgtgaaaaataactcatgaacagcatcattcccctgcagaattcaccagaacgcgtctccctgctgccgatcgccccgggcgttgattttgcgaccgcggtggcactccggcggatggccacctcaacaggtgccacgccggcttacctcctggcgccggaagtgagcgccctcctctggtatatgcctgaccagcgtcaccacatgttgttcgccaccatgtggaataccgggatccgtatcggtgaagcccggacgctcaccccggaatcgttcgacctggatggtctgcgcccgtttgttagggtgctgtcggagaaagtgcgcgcgcggcgcgggcggccaccaaaagatgaagtgcgactggtgccgctgacggatgccagttttgtgcgtcagatggaaagctggatggtcaccacccgcccccgccggcgtgagccgttatggccggtcacggatgagacaatgcgcaactggctgaaacaggcggtgaagcgggctgaagctgacggcgtgcatttttcgatccccgtgacgccgcatactttccgtcacagctatattatgcacatgctttatcaccggcagcccaggaaggtcatccaggcactggccgggcataaggatccgcgctcgatggaagtctatacccgggtatttgcgctggacatggctgccaccctggccgttccctttaccggtgacggtcgcgatgccgcggagatccttcgctccctgcccccggccggctgagattggcacgcctggcatgacgtcctgtattccgctaatacggaatacaggagcagagcgcattcagccccctccctgctccagcacaccagtccatcatgctgatgactgaaccgccgtggtcttacccggtgacctgcaatcctgcaggcatcaacataccgcagacaagacagggcacaatgcaggcattctggccgtgcatcccacggtgcgttatttcctgaaagctcagcgaatcatcccgttaactgcgacagtcattgaccatctgtggcccacatttttctgccatccggctcccgtttcctgatcgcatttagcagcgtgaagctggcgccgggttatacaaacagctgcagtctcatcctgccgggctaaatctgcagtacacaggggaacggataccatcaggtaacatgaccgtctcagcatccgattgagatcttcgtaaggggtatagagctttactgaaaaattgactgtggcatgttatcacccatgaaatagtgaacagaccagggaatacccccgttaaacccgcatgccgtagtcaatatctgcgtatcaagacccgaaatcacatattacagtcaatattgttcgatccgggcagacatgatagagaataaatattgactgcggtatgcgtgatgcatatcacagtcaatggaatgtccttagcggcatacggcagtcatgatatgcatatcgcagtcaattttctggcttcatcgctgagagggcttcagccagtttaagaggatcgatgcccgcagccttcagcgccttaatgacttcgtcataattttgctctggcgccttctcttcttcctcattgcgcggaaccttcacagggccactgatgagtttggggttgcgataatgcacgctgaaataggtggctcggccacgtttaaactcggtgtaatccagataaccaatatcccgcagctgctccatcgccttacgcaccgtgtggttctgcgtatagacatttgaggtgagattcagccgctcacgcatccgtttcatggaaataggtgcaggattctggggaagactttcgatgtaggtataaagcgcctgggctgattccttgcgctgcagggcgtcaatggctttcagccgcagcagtacccttctgtccatgtggtaaagctcaaacagcttaggttcagccttgatctcaacgatatcctcgttgatgtcataataggctgactgcaccagatgggtggtccatcctttggtctcgctctggaacttcaacgtaaccgaggcgagtttaaacagggaattactgatgcgatcgcgcatttttttgtttgaacgacgggagtcaaatccgcacatcttaacgaattcgacgaacgacagttccagggtgtcactttttaccccatactccgacatggagcgaattatccccagccagactttaaaatccgtgtccatatcaagacgcgaaccggtgatcttaacgtcagtgtacccttcgcttttggcaatggacagctgtacaagctcctcagtcgcgtctgtaacgtttttccggttcgccttgctcttccctgttgatttcagagttgggacgaagagaccgagtctcatgagcgctactggctgcacggtactggtgctgttgacatccagcttaacaacttcgccggttgtcttatcaacttcctgaaggttcagaagtaagctgttattttcgctcgtcatcttgatcctcaacggttatccacaaaaggatgtagtaatacgtatcgcagtcaacggatatacatacctctgtaaataccgttgcatatcacagtattagattatgcatataacagtcaacattttacattccgcagtcgatccagacagacgttaaagccagttacagcgcatgctggagcgatccggggatctcttttggatctcactatgatctccttgggatcaattattggatcgagaccatgaataacccagatacaaggccggaagcgccataccagatatccagaaccctggcctgattttcctgaatacgctctggaagattgagatctacaggtacaacaatgaaacattgactgcggtatgctgagtcgtctttcctctttctcgacacagatgcggtaagcatcataccatagtcaatatattacataccgcagtcaatttcattataactggcttatccagagccatctttagcaacccgacgtacgtgcaatctgtgaattctgtgattttccgcttcctcgccgctttctcactccgtgagatcgcttactgcggcgagcggcagtgattaatattgactgcggtatgtactcttttgtaatcccctgcgttctttgcatcacccaatgcggttcactttgcactttttcgtgcactttgcgtttttattgttgctttgcaataaattccaagatttaataaaataatgcaaagtgaagattaaaggatgttcagtatgggactcatggatacactcaaccagtgcataagtgctggtcatgaaatgacgaaagcaatcgccattgcgcagtttaatgatgacagtccggaagcccggaaaataacccggcgctggaggattggtgaagcagctgatttagttggcgtgtcatctcaggctatcagggatgccgagaaagctggccggctgccgcaccctgatatggaaacccgtgggagagttgagcaacgcgttggttataccatcgagcaaatcaatcacatgcgggatgtatttggtacacgactgcgccgtgctgaagatgcgtttccgccggtgattggtgttgctgctcacaaaggtggtgtttacaaaacctcagtatccgttcacctggctcaggatcttgctctgaaaggactccgtgttctgcttgttgaaggcaatgacccacagggaactgcttctatgtatcacggatgggtgcccgatcttcatattcatgctgaggacactctcctgcccttttatcttggggaaaaggatgacgccagctacgctataaagcccacctgctggcctggccttgatatcatcccgtcctgtctggcactgcaccgcattgaaaccgagctgatggggaaatttgacgaaggcaaattacctgctgacccgcacctgatgctccgtctggccattgaaactatcgctcatgattatgacgtgatagttatcgacagtgcacccaaccttggtatcggtacgataaatgttgtatgcgctgctgatgtactgattgtccctactccggcagagcttttcgactacacctccgcactgcagtttttcgatatgctgcgtgacctgcttaagaacgtggatcttaaaggctttgagccagatgtccgtattctgcttactaaatacagtaataataacggctcgcagtccccgtggatggaagaacaaattcgggatgcctggggaagcatggtccttaaaaatgttgtgcgcgaaacggatgaagtcggtaaaggtcagatccgtatgagaaccgtttttgaacaggctattgatcaacgttcttcaactggcgcctggcgtaatgccctctctatatgggaacctgtttgcaatgagatttttgatcgtctgattaaaccacgctgggagattagataatgaagcgtgctcctgtcattccaagacataccacacatactcaatcgactgaagatacttcatcaccggcgccagccgcacctatggtggattcattaattgcgcgcgtgggtgctatggcccgaggtaatgctatctctcttccggtatgtggacgggaagtaaaatttacccttgaggtgctccggggagactctgttgagagcgcttcacgcgtatggtcaggcaatgagcgcgatcaggaactacttaccgaagatgctctggatgatctcattccttcatttttactgaccggtcagcagactccagctttcggccgccgggtttctgatgtcatagaaattgcagacggcagccgtcgccgtaaagccgcaatcctgacggaaagtgattatcgcgttctggttggtgaactggacgatgagcagatggctgcattgtcccgactgggtaacgattatcggccgacgagtgcttatgaacgtggcctgcgttatacaagccggctgcagaatgagtttgcaggaaatatttctgcgcttgccgatgcggaaaacatctctcgtaagatcattacccgctgtattaatacggccaaactgcctaaatccgttgttgccctgtttgcacatcctggagaactgtctgcccggtcaggtgaagcccttcagaaggcttttgcagataaagaagaattactgaagcagcaggctgagactctccacgatcagaagaaagcgggactaatctttgaagctgaagaggtcattagtcttttaacatccgtactgaaacaatctccctctccaagggttaatctgagctcacgtcatcagtttgctccaggggcaacagcattgtataagggcgataaaatggtgcttaatctggataggtcccgcattcctgtggagtgtatagagaaaatagaagccattcttaaggagcttgagaaaccaggagtctgatgcggacacgctttagtctacggttatctccctttacttcatttcctttctcacaggccagaaaacataactggcctaaatattctctctgagaccacggtcccacctgcatcgtcggtcaggttatctttctgggaccacggtcccacctgcgtcgtcggtcagcttagctgcctgggaccacggtcccacctgcgtcgtcggtcaggttatctttctgggaccacggtcccacctgcatcgtcggtcaggttatctttctgggaccacggtcccacctgcatcgtcggtcagcttagctgcctgggaccacggtcccacctgcatcgtcggtcaggttatctttctgggaccacggtcccacctgcgtcgtcggtcagcttagctgcctgggaccacggtcccacctgcatcattgtttaggtttccagcctgggaccacggtcccacctgcatcgttggtcaggttatcagcctgggaccatggttgcattgatgtcaatgacgaactgatttttgacatgattgcatcacgaagagcggaataatcttgcagcagaactgaaatatctggcgattgaatagtaatggatcgggattagagccgagtatactgagtacaatttgtcaaatttcgcagtgtattcggtttaatctcctccagtttttaaaggtcaattgctgccgctacgcgctgttcagaccttcgtccggcaagtaaccaatccaggctattttcacaacccagggtgaataacatcattccgtcatcagcatagccacatcatgcatttcgtcacactgtatgatctggggatttcagagacattacttatcacaggttatgcagatgaataagactcaatagattgtttatccacagtgacggggatatacatgtgggtagcttcttgaaagacttatgatgtaaatccagcctcttgactctcacattgccaatatatagctcgtgacctgctccccgttgattagtacaccccgatgttagtaatgtcttcataagccacatgaggacatccccatgaagaagcgtttttccgacgaacagatcatcagtattctccgcgaagccgaagctggggtacccgcccgtgaactctgccgcaagcatgccatttccgatgccacgttttacacctggcgtaagaagtatggcggtatggaggtgcctgaagttaagcgcctgaagtcgcttgaggaagagaacgccagactcaagaagctgcttgccgaagccatgctggataaagaggcgcttcaggtggctcttgggcgaaagtactgacgacagaccagaagcgggaagccgtgatgctgatgtgtgatgcgaccggtatgtcgcaacgtcgtgcctgcaggcttacaggtttatccctgtcgacctgccgctatgaggctcaccgtccggctgctgatgcgcatttatcagggcgcatcactgagctggcactggagcgcaggcgttttggctaccgtcgtatttggcagttgctgcgccgtgaagggcttcatgttaatcataagcgcgtgtaccggctttatcacctcagtggcctgggcgtaaaacgcagaagacgtcgtaaagtgctggcaacagaacgtctgccgctgctccgtccggcggcgcccaatctgacctggtcgatggatttcgtcatggacgcactttccaccggtcgcaggatcaagtgtcttacctgcgtcgatgatttcacaaaggaatgcctgacggtcactgttgcctttgggatttcaggcgttcaggtctcgcgtattctggacagcattgcactgtttcgaggctatccggcgacgataagaactgaccaggggccggagttcacttgccgtgcactggatcaatgggcctttgagcatggtgttgagttgcgcttaatccagccgggaagccaacgcagaacggatttattgagagctttaacggacgatttcgcgatgaatgcctgaatgagcactggttcagcgatatcgttcacgcaaggaaaatcattaatgactggcggcaggattataacgagtgtcgtccacattcagcactgaattatcagacgccatcagagtttgcagcacggtggcgaaatgtaaaatgtgaaggtaaacaaaccgaccttactaactgacggttgtatctaatcctgggggcaggtcactcgactaacttcataatggcgcgccaaaaattagtaaaaaattaccatatggctgtcattgaatttgtgaaggtgagtaccatgccgacatcggcaaaggtacaaaagagtagtattgttccaatgttagagctaaagcatgtctaaagtagcaattgctgggataatgctaaggcagcatcgtttcttgtttactcatataagtgcgtgtaaggaagtgaatatatcaagcccgggccatggcccggcaggatatatttgattacattgaagtgccctgcaatcatatctgacgccacaacttcctctatggattaagcccgaagactttctaataggcctctctgcgaggatgaaatttgtctacggatgaggggacagtacaacaagcaaacaggacctcatattactggctggaagccaagctttcttttaccgggtattgaattttgttttacagtatatgcaagcgctttaacgggatatcgtccgctttgtgaaaaaagcggaagtagctaatcacagtttgagtggagcaactgaatgaaggtcctgtttgttctgcgtaccagacacaatcactcagacagtggcttatttaaaatatgttaatgaaacctaagcaagagaactgaaatggacaaattgttaaatatgctgcgttataagagtgaggggtctgatattgacttcaaatctacccagtaccgctttaacaatggttctgagggtaatgactccaacttattgatagtgttttatgttcagataatgcccgatgactttgtcatgcagctccaccgattttgagaacgacagcgacttccgtcccagccgtgccaggtgctgcctcagattcaggttatgccgctcaattcgctgcgtatatcgcttgctgattacgtgcagctttcccttcaggcgggattcatacagcggccagccatccgtcatccatatcaccacgtcaaagggtgacagcaggctcataaaacgccccagcgtcggcatagtgcgttcaccgaatacgtgcgcaaaccgtcttccggagcctgtcatacgcgtaaaacagccagcgctggcgcgatttagccccgacatagccccactgttcgtccatttccgcgcagacgatgacgtcactgcccggctgtatgcgcgaggttaccgactgcggcctgagttttttaagtgacgtaaaatcgtgttgaggccaacgcccataatgcgggcggttgcccggcatccaacaccattcatggccatatcaatgattttctggtgcgtaccgggttgagaagcggtgtaagtgaactgcagttgccatgttttacggcagtgagagcagagatagcgctgatgtccggcggtgcttttgccgttacgcaccaccccgtcagtagctgaacaggagggacagctgatagaaacagaagccactggagcacctcaaaaacaccatcatacactaaatcagtaagttggcagcatcaccgaagatcgcgggcggaaacatccagatcaccgtcacctcagttcgcaatggaaacgtgaaattccagcacgttcaggtgcattatgagccgaacacgatctatggccatgcagactttactgcgaacctctctaaagcccagcaaacgacgctgcggcagctctatgacggctgcaacccgcgcccgaggcgcgacctactgcgtggtggagccgatcgcctgcaagtcggggcgatggagtttcagtgctcccctgaagagctattgtcgggattgattgaaacgatctacgctatgcgaaacgccctactacacggcgaagtagaccccgacccgagggtactgtcttgctatgagccagcttatcggatcgtaatgctgtttctaggctgcgtgagataagcaggagatgtaccctgtgttcatattttttagatatggcattagtcatggcattgatattttatttgatatttaatctaagtaaattaatatgatatataggcagttgataatagagtgggagtgaggctattatttagcctattgttttatttgatttagtgagtgccattgatgatatgactgcattatcaatggcattttttatggtttaaggccgacgctgaatcgaagatatagcaaataccatgtgaccgtatcagcaaatgccatggtatcgacaaccgggtgcattgcagcgctgtgctgatgccatcgatgctcgctttgatcagaaccgctctctcgacccttgccccagatcgttaaatatgcgccagaggagcacctcgtgatagaaattgtgaacaagacagccgccactcggaatcgaagtatccatataggtgaataaagtttgcggaaaatacgctgagaaaatagaaaagcgtcaatgaagggacataggaatggcgattaacggagagaacggtgttagtgcagtcaccgtggatgaactactcaagcaaggccttcggataccgaactatcaacgcccatacagttgggatgtatcgactgctctacaactggtggatgatatcagcgaagctcttcgagataccgaacgaaaagatattccctatgttttgggtgcaatcattcttcacgatgatggtgagtatctcaatgtagtcgacgggcagcagcgcctgctgactttgcgaatgattcttgcggccttagatccgataaatcatcaaatttcgatgtctggtaacagcgacactcctgtctccctagtttggatagagcttcaaaggcgcctgtcgcagttggaagataaaaaagagtttttggattttatctgtcacaaatgtcagttggtgcgtattgtgacggacgatattgatgaggcatttcgtgtctttgattcccagaactatcgcggcaaaccgcttgcccctcacgacttgctcaaagcacaccacctgcgcgaaatgcacgatgagtccgctgctatgaaagtggctgtcgttgaggcttgggaagccgtaaacgatgaggatctggacaggcttttttctacttttttataccggatatccaagtggtcacgaggcgaaagctcgctcgaatttactattcgggacatcggcatgttcaagggcatttcatcacgatcccacaggtcattttcgccaaatctgcgatatcaccttgcagcacaagccgctatgccacttctaagtgcatggtcggtatcctctacacatgatgcacgaaacgccgggcgcagccgctttcagcttgatgccccgataatcgcaggacgctcatttttcgagatggtgacattcatgcttgacgaattgaagatactggaacaagaggttattgacagaggtttcaaaaactttggcccatctcaaagtcgctaccgctacgtgtacgaattgttcattgccgcgctgctttgctatacaaacaagtttggcgatgaagatgtagatgaagtgcgaaataggttattcgcatgggcatatgccttgcgggtcgagttacttcgtgtgcaatttgtatctgctgacaaccgagcgcgaggtaaaaacgatgcaaataaatcgccttttgttttgctacgtaatgcgatgactggaagtgttgtccgcaaacttccaataacaagtaagccatacagcgataaccacgaaaaggaactcgttgcttttatcaaggggctgcaatgagcaagaaggagttgaaacctgaactgttaacagtaggcaagttattcactgacaattatctgattcctatttatcaacggaactatgcttggcgggccgaacagattgagcaacttattagcgatattcaagactcggtggtagggggccaggacaactattttcttgggaaccttgttgtaatcaagcggggtagagaggatgagttcgaggtcatagatggacaacaacgacttacaaccctctatctgcttcttaccttcctggagcaagacggtgagggtgagaagccgtcggttggccatgcaggccacttgcaatatgagtcgcgcgcacgggcaactgaggccctgctgcgagtagcacaggaggcggctaaggagcacgttcgaccgcagggctccacgagtaatgcagatgctggcattcatgaaggctacagcatcatcaatcagttcttcaaacaaaatgaaaaccttaatcgctcacgcgaaaaattctccgatttcttgctaacgaaggtgactgtcgtccgtgcctcgctgccacccaataccgacctcaatcgctacttcgagatcatgaacactcgtgggcagcaactcaagcaggttgatattgttaaggctcgcctgatgagcaaactgcccaatcaatatgaacgcgaatgctttgcgtgggtttgggattcctgtgctgacatggattcttatgtccagatgtctctgacccgtggtgacacaagtttgcgaaacaaagtatttggtgatgaatggtcctggctggaggtgaccagcttctcttcgctaatggaaagtcgtccgcaatccggcatcaattcatcaaggcaatcctccgaaggggtatcgttgtccttggatgaggcgttgtcaaaatacgctaaagagctcgagtcaaattccactgaagacgagggcaacgagcggtttcgttcgactattgagtttccggcctttctgctacacgttctaagaattatgaaaggcgatgaggtcgaagacgaaggcctgcttgacgacaagcgcctcatcaagtcatttgacgacgccgtaaataatgtacccgatgctaaagccgattgggtgcgtagttttgcatttatgcttctcaagtgccgcaacctcttcgatggcttcatcttgaagcgtcaattcacggcaaacatcggtgacgatggcgattggtctctccagcgactgaaaaaaggaggcggggacaagaagccaaccccgacgtacatccatgttttctcggccagcaatggaagcttagaggaggacgggagtgctgacccacatacccgagatgtattgctgcttcagtccatgcttcggattacctacacttctccgcgaacgatgcactggattaccaaagttcttcgctggctctccgttaaagcccctcgagacgtgaaacatgcggatcttgccgatttgttgaagggatatgcccgcagcaaggttaaagagacattctcctttgagaaagatcagcaaccacaagggtttggtatcagccgtatcgtcttttcgtatctcgactatcttctgttgagtgactcctcaaaacgagatttcaaatttcagttcagaacttccattgagcacttctatccacagcatcctgacaaagaacagtcgggcgcggttgtttcaggttctagccttaacctgcttggcaacctcgcgctcgtaagcgtcagcgcgaactcaaaattcagcaatagcctccccagagcaaaggccgaaaacttcaaggatacaattgaacttcaaagtcccaagctcaagagaatggcggaaatcacccgaaatacaaactgggacgatcagcagataacagcacatcatgaagcgatggtgacattgcttcgtgatgatgtaagtctggtggaggcaagcggaagatccaacccagggcgttgacttctttgaataactgcttttggatgaatatcctttgtggtgtgcaagttgtcagtctaaaagcgttttgcgtcgggcgacacgatcagtacagtctccaagttttcttaccatggtattttgtatggtatcgacatgcagatataattctattttattgattttatagtgttttaagacagcattgatcatcgagtgggtaacataggcttaatacattccttgctcctcgcaccggagcacatcacagatactgattgagatccacttcacgcagcggctggttttgacgttctgttatcatttgcactaggtctttttcgtccagctcatcgagcatttgttcatacagagccgcgggcacacaataaaaaacagggcggttgcggtcaataatcgcgaccgggtagccgccgccggcactggcggtggccaccggatcgtttttaagttcgctgatgctggcagtcacatcacacagaatgatatttgtcatggtccccccctgagacaagtcatctgtatgatcggtaaagtaagctcttgcggcaagtcccgtctgtcatttcgacggtcagaaacgggcaaccggcagctccttccagcgggtggtatatgccggtgacagcatctcccgtttcatctgccagtccggcgcaataccccgtccggcaaaccagactttcccgagtccggaatgattaatgccgtcgagtaccttcatcagcgcatcgctgtgcggccgtggctgcacgtcatcgaacagattcagctgcgcgacgccgttcggactgaaatcattgagcattatccccgcttttgcgtagcggtggccatcgagccagatcctgtccagagacctgaccgcagccgcgataatgtcccgggtgtcacgggtaggggtgtgcagtttttccgtggccacgttaccgtaatacggctcattaaccgcaaaaggggatgtcttgatgaaggtgctgatatgccggcagtactgtcgctcaccgcgcaacttttccgccgcgcgctcggcatactggcagacggcctggcgcatttcttcgtaggtggtgatccgctgcccgaagctgcgactgcagacaatctgctgtttcggcggcggcgcttcctccagtgaaatgcaactctcgccgttcagctcacgtaccgtgcgctccagcactacgttgaagtttttccggataaatgtagggttcgtcagcgacagctgtagggcggtggtgatccccataacgtgcagctttttcgctatccggttccccacgccccagatttcttccaccggctgcaggctgagtaattttgccgttctgcgtggattatcgggcgacagcgccagcacccccctgaattgtggccattcctttgacgcccactgcgccgatttggccagtgtttttgtggcgccgaagccgacaccgatcgtcagtccggttccactgagaacatgcccacgcagctgcctgccaaaatcctccagatccatacagtggccaattccccgggcatccaggaaacattcgtcaattgagtattgttcgacgcggggcgacagctcttccagcagggcgaccacacggttactcaggctcgcgtagagctcgtagttgctggaaaaaacgtacaatttttcaggaaactgcgcctctttgagctggaaccagggggttcccatctttatacccagcagtttggcttcagcactccgggcaataacgcagccatcgttgttactgagaacgacgacaggtttgccgcgcaaatccggcctgaaaaccttctcgcaactggcgtagaaggagttgacgtcagccagggcgaacatcagtctgccctccgggttttatgaatgaaggctgtcaccacgccgaaaatttgcagcgtttccggatccgggtacagggaagggaagtccgggttcatcgcctgcagggctggccgcggcgtcagaagcaggcgttttaccgtaaattcaccctcaatttccgcgataacaatatccccgtgccgcggctgttctgctttatccacgaccaacagatcgccggaatagaggccaatatcagtcattgagttgccaatcgccctgacaaaataggtggagtggcgccggtgaatgcagtactcattcagatccagttcagactcagtgtagtctgctgccggtgacggaaaacccgcagggcatcgctctgtgaacaaaggaatttttactatgctggcttctgatactgcaggaatgaacttcatcgttttttccctcgcttaaggctgtatatatatacagtgtgcgccgggagaccggtaaagatcaaggggtgaaagtccccgaccattgaaggaccagcaatccacagggtccccgagtcatgcgttgtataccgtgaggtatggggcgaagcgttgacaggggtgttgacaggccagccattgagccacgaaatgtatattaaattcccgggtgccgacgttgtactgtttacggaaggcaacatcatagggtgcgttactgcgagtgccatatggacccggcggggtctgagaccctggcatgtcaatacgatctttacgcgggaaccgggagatctcccctctgaccatctgccagtgccggagatggcccgcaccgggaaggcgaggagccgaagccggtgatgtacggagaggagaagtcggactcgctcatagtagctgcgaatctggcgaacaatccgcaaggagcggagtcagtggagcgaaggagcggggccaagggaaacgcggaacagccacacatgcgccggacgcagagccgggaaagtatgtcacagaggctgtcacgcgtgcgggaagctgcgaagcagcggaagaaagaacggtttaccgcattgttccacctcctgacagcagaggcactggagaacgcattcctctccctgagcaggaaagcggctgccggagttgatggtgtcaggtggaaggactacgccgaaaacctgaaggtcaacatagcagatctgcaccggaggcttcatcagggtagttacagggctcagcccggcaggcggcactacatcccgaaagcggatggaaaacagcgcccgctcggcatcgcctcactggaggacaaaatcgtccagtatgcgctggttaagatcctgaatgcagtctacgaaaatgactttaaggggtattcatacgggttcagacccgggcgaagccagcacaatgcgctggacgcactggccacagggctggttcggaccaatgtaaactgggtactggatgccgatatcagtcagttcttcgacaaggtaagccatgaatggctaatcaggttcatagaacacagaatcggcgaccagagggtaatcaggctcatacgaaagtggctcacagccgggacctcagaggaaggagaatggcgggcatcggaggaaggagaatggcgggcatcggaggaaggcaccccacagggtgcggttatctcgccgctgctggcaaacatctacctccactatgtcttcgatctgtgggcgcatcagtggcgacgccgccatgccacaggcaatgtggtcatggtcagatacgcagatgacatagtcatcgggttcgacaagcgaatcgacgctcaatgctttcgtatagccatgcagcgcagactgaaggagttcggactcacggtacatccgaagaaaacccgactgacggagttcggccgcttcgcagccgaaaaccgcgccagcaggggaaaaggtaaaccagaaacgttcaacttcctcgggttcacgcatatcagtgggaaagatcgtagtggcaggttcatgctgatacgaaagacacgccggggcaggatgacggcgacactgaaagcgatcaaggacggactacgaaagcgctggcattactcaatccccgaacagggaaaatggctcaggagagtggttcagggatacctgaactaccactcagtcccgggcaactatcccatgatgcggaagttcaggatatacgtaacagacctctggcgacgggcgctgaggcgcaggagccagcaggatgatacgacatggacgaaagcaaacagactggcagccgtatggctgccgaaggttcgggttctgcatccatggcctgtggagcggttcaccgccagacacccaaggcaggagcccggtgcgtgaatagcgcacgccgggatctgtgcggggggtacccggtaacgggtatccctaccgcgacattattttgcggaggccgttttttttcaagtcatcttgttgccgttgtctgtaaccatttgctgttcctgcaaaaacagggaaatttcagaaggatcgctgccagtccggagaatcgttatctaataaaatgtaatatactgacgtacagtgcatttattctgagtggagtgattatgaatacgggtttaaggcaggttctgcgatatgcaggcgtcccggttgacgcagctgaaccggtgcgccggcaattcggtagccgcctgattttaatcgtgacggttgctcttcttccgctgttgattgttgacgtccctcagtggctatttgtgctctctcagattatctggggaagcggtatgtacattggtatctccgtggccagtgataaaccagatcgccgataagctcagaacgagaggtctcccgggccgcctggtgacgggcagctgataaactggcgccatgccatcaacaccggataaggacgtcgccggcttgtctttgccgccggctccgctttgtccggccccctccctccggtctgcggcctttatacgcagccatcgcgtcgcgatgccagcttctgcttttctccctgcgctcgtaaaccgcgacaggggacctcatgttgtatctcctgcatcgcttcgggtagtgccgtgccttcactttagcccggccgctgcagatgcaagggttcgctggcgccgccatcctcgcccggtcgcagtttttttaggaagctcgccgttcttcccgtcgttttctcgctcaggttcgctctaaaaccgtccagaccagcttcgtgctttatctgcgctgcggcctccggtgtcgcccttgcatcttccgctttccgccgggctgtcgtgtcggcacggcacaacccggtgccgcaatcttatgaacctgtggaggttgctatgtatcatgcccgtcaaaccatgctgaatgtagaggagtccgaccgtctctcgttcctgccggatctgtttggtaacgattttctggccggagagatgcaggtctatgcgctcgctgagaaacacatcaccgattactgcggaggcttctggcatttcatccgtattccggagggcggcggctacatgatgcctgacggtgaccgtttccatctgactaacccggataactggtttgatcggtccgtcagcgcggatgcggccggagttatcattacggcgctggcgatcaaccgccgtatctggctgcaccatgaacgcggtgatgctgccctgacacgccacctgatgctgcgggaatcgcagctgtggaatttcattgactctcatgacgaatgcgctgctatttacgcggctctggactgatactatatcggggcgcccgacgccccgtttaaggtcagagacggcacgatctgtgaggagcttacccggcttcgcagatcggtgcggccgcgcgaaaatcctggcaggcttcgcctgccagtgaggcggttcgccacacctgcggcgctgcgtactggcctcacctcaacaggtcgccagttaaggattaagagcgtaatatctgcgtaccttttcttcttttgctgattttgcgtatgtcgcagtggaatattgcctctttttcaaaggaggagcaggacaaagttgccgtcgatagggtggctgctgatgttgcctggcaggagcgcatgaacaagcccgtcatgccggaacttgttgaacgggaacagcctgaacacctgcgcgaatatttccatgaacggttccgcgtacatcgactgaacagtcagcagctgccgcgcgcaaatgcacccgaatataataaaccgggcgatgatcagcagaattgattttcttactcagtgtgtccagggagggtaatctgtgcgtatgtctctgatgtttgctgccgtgacgcttttaaccggtattaacctgttttttattccgtttcagcctgttccggctctgtggggggctatcctggccgttgcttttgttctgattaatgtcgtggcggataagctgcgcctctggagtggtattgcgtggattatcgttgccggcatcatcataacgctgatgctgaaggggaaagagccgggtgacgaatttcgtgtcctgatcaccgttttcgctttcctggcttcaatctggtatagcgttgcgcagttcaggaaggaaaataagctccgttcctgacgccccgtctggtatgccgccggtttatcatggcttctttccggcggcatgaaaaacatattctctccagcctgcatctttacgtttccggcttgctccctgctgtctgtctgctttctcttcttcttcctgctgtgatgtctctttttaacccttaaaggctttaaaagcacacccgcactggacaccttcggctcccggccagctgcgctgtccagtcgtcgagccacactccgctaaccgcgaaaagacgcggtaaactccgccgaacccgctacgcggtttcgggcctggcggctagtgtctgatgtctgaagtcaaggtcaacggcagcgcttgctgcgaccgttccggccgcgccgctttcaccgtgccggcgataaagctgccggcactctgcagggcaacgccgtttcgcgcccgcgctcttcgtcattgcggcgggtgcctgctccttccccctggcgccgtatcacccgtttgagtccattcgccggggctgagacaagcacagtcgccatcatccgtccagggtaaatggcacgcggtaaaccgcgccctggacagctgccgtcgcccgtgctcgtttacgcccttgcggcgaacggctctcaaacgggtgaagttaataccagggggcaggttcagcaggtccccgcacaaagtcaaaaccgcggccccggcaactcaacgggtgatgttctttaaaaatcgggaaaaagaaaaatgcaggatccttcattgcgaacgtatcggatcgcatttctgggaagcaatgccagcggcaatctgccgatgtttacccgggtgcaggccacgaccggaaaacgggcgataaaagcgtttattgaacgctgtgaacccgtcaaaggctggtttctgggcgcaccggaagacattaccgatcaggttcagaaggaggaagaagaggcgggaagcaaaccgcaggtatgaaaaaagcagggtaaaccctgcttctcccacgccgtaaaaatcgcacgaacggtttttccggcttcgttaactaccataaggagtcaactttatgatcgtttctattttttcaccttccgcaggcgctgtaaagccccgtcgtcattcgcgcattctgcgcgcagatatcaccgcaccggagattgatcccgctctcagagctttcgggcgtcatatcgccagaagtcaccgcaaagggcgcggtgtccacatccccgcgatgaaaaataccgccctcgggcaggtactccgcacgctggaactgaaacgcgcatttaactgatgaggtgagccgccccgcgaggggcggcaactgcaggaaggagaaaacacaatgacaccgactaccgcacagatcatgacggaaaataccgtcagccagacttaccgggcaacctattcacccgatgataataaattgcgactttacgcatcattacggctcgatgaagaaacgtattccctgatcaacaaagcaggctttcgctgggcgcccaaacagaaactctttgtggcgccagcctggacgccggggcgggaggatgtcctgctttcgctcgccggtgatatcgaggacgaggacagcaccctgtttgatcgccaggagcagcgcgccgggcggttcagtgactacagtgaccggcgggcggttgaatcggagcaggcgcttgcgcatgttgattcgctggcatcggctgtcccgctgggacagccgatcctggtaggccaccacagcgagcgccgcgcgcgccggcatgcgcagaaaattgagagcggcatgaaacgtgccgtgatgctgttcgagcgtgcggaatactgggaacagcgcgcgcaggcctctctgcggcacgcaaaatacaaggagcgtccggatgtgcgttaccgccgtatcaaaaaaatcgaggcggaattacgcaagtcccaaaagcacattgcccggtctgaaaagtatatgacgatgtggcgtgcgcagacgctcgatctgaaaatggcgttactggtcagtaattatgatcatattcatgcctgcttcacgctcgacaaatacccccgcccggcagagaaaagccagtatgagggctcgatgtctctccattctgccctgtcggaggagatcattacttttgaacaggcgcgtgatattgcgatccgctgtcatgagcgcacgattaaccaccaacagcgctgggttaatcattaccagaaccgcctggcctacgaacgcgcgatgctcaatgaaaacggtggcgttgtcacccgaacacaggaatttgaaccaggcgggcaggtactgagccggggagaatggttaaccattctccgggttaaccggagtaagggggaggtgagttcagtcgaaacgcccggttatcgctttctgggctacagcggcacgatgaaactcacgcccgaccgtatcacggactacaaagccccgacagcggaggaagccagcgacgcgaagaaagcggcgaagcgcccaccgatcgtcaattatccgggggaagggttccgggaaatgacaaaagccgagtgggcgaaattacccgctgattataaaggcgtgcggggtgctgcagaaaccgaaacacacggcgcctaccgcttccgccggtgcatgacgcacggttgtacgctcgtgaatgtgtatatcacagacatgaaaaccgttgaaattccgaaaaaatagcaggaaggctccccggcatcttgccggggaggtcagggagtacattcatgcatcatgaccttaaacaccgtattcaggcgatgcgggtcaaactggaagggcgcgcccctgtcgctgaaattcggggtagctcgcaactttttgtcaccccctccccggaatgtcgccggttagttgagctggctgatgtccgggaaaccgatcgcattctggaacccagtgccggaacgggcgccatactgcaggcgatcagggatgcagtcccccgggcgaagtgtgacgccgtggagctgcacgccgggttagcccgtcacctgcaggctcatttcccggaggtccggatctggtgcggagattttctcgaatatcatccggagcgccggtatacacgaattatcatgaatccgccgtttaatcgcggtgatgatatccggcatatccggcgggcattaactctgcttgagcctggcgggattctgacgggcatatgtctggacgggccgcgtcagcaaaaggcgctggagtccctggcggacgtctgggagccgttgccacggggaacattcacgtatacccaggtagcgaccgccattctcagaataaccgtctgatgacacgttaagccggcggggcacctgtccccgtctggccgcgcctcgaaagaccgcgcgcctgcggcgccgggaaaaccgggccgcgctgacgcgccgcccgcatttcctttccgcgtcttccctgtttgctgcctgctgtttgcctgcttcctctccttctccctgctgtgatgcctctttttaaaccttaaaggctttaaaagcatacccacactggacaccttcggctcccggccagctgcgctgtccggtcgtcgagccacactccgccagggcagctgcttcgcacccgccgggctccgccgaacccgctacgcgctttcgggcctgacggctagtgtctgatgtctgaggtcaaagtcaacggcagcgcttgctgcggccgttccggccgcgccgctttcaccgtgccggcgaaggactgccggcactctgcggggcaacgccgtttcgcgcccgcgctcttcgtcgttgcggcgggtgcctgctcctttcccctggtacccgtatcacccgtttgagtccattcgccggggctgagacaagcacaacccgtcttgctgtccaggggacggcagagcctttcgcaataaatttttcccggccattccgctgcgcttcattagaccgaaaaaaatttcccgctcacccccggacatctgcaccgggccgtgctcgtttacgcccttgcggcgaacggctctcaaacgggtgaaggttatatccaggggcaggttcagcaggtccccgcacaaagtcaaaaccgcggccccggcaactcaacgggtgatggttaaaaaattaaacaggtgaaggagaataatatgcgtttagcatcccgatttggacttactcattccattcgtcaggaacgcccactgactaacgatgaattggtcaaggttgtaccttctgtgttttcagaagaaaagcataattcacgtagtgatcgctatacctatattccaaccattacactgctggataaattacgtgaagaaggtttccagccattttttgcctgtcagtcacgagtaagggatgaggataaacgggggcatactaagcatatggtaagacttcgccgtgaaggggccaataaaggaacagaagtacccgaaatcattcttcttaactcgcatgatggatcgtccagttatcaaatgatcccgggtatgttccgttttgtatgcacaaatggccttgtgtgcggtacgtcgtttggtgagattcgtgtacctcataaaggtgatattgtgggaagggttatcgaaggtgcttacgaagttttgggaattttcgataaaataactgaaggcgttgatgtcatgaagtctattaccttaaccaaggaagaacagcgtctgtttggacaagctgcattaacctaccgatatgaagatgaaaataaatctccggtcagtattgaacagataattcatccgcgccgttatgaagataaaaaagatgacatctggactacatatcaaagggtccaggaaaatctgattaaaggcggtttgcctggccgaactgaaaaagggaaaagaacaacaacccggccagtaaaagcaattgatggtgatgtcaaactcaataaggcattgtggttaattgcggagaaattccgcactcttaaaggctaattataagcgccgggcagctgtccggcgttttgatggtgggaatacttatgtttgaatttaaagctgtctgtatcagtatttcacatatggaagaaggtgatatcagagttcttcaggtgctttcatcaacaaccaattatctaacttgcgatagttacttagagtggatacatgatacaccttatggttgtgttataaggatgtatgatttcaaacgccatcttctggcgctaaaaagaggtggggtgtcaaaatttttacgcaaaaatctcatactaatgcaccgggagggcgggtatctgctttttcattttgatagtgatgccgattattatccaggtatagatgccgtagatttttaagaaattcaagccttcttatatcagaaggctttttagttcatggcgattttctgatctttagaagaagttcgtttgcttgctttgatagccgtgtagtagtaatggatcttcttcgcatactcgtaacgtcttgctgcctggcgcggggtctttttgaagcctgcattgtatgccccgactgcatcccacgaaacgccccactttttaaacgcctgagccagataataggctccggtgtagatgttaagacaagcatcgctaagaagatgatccggttttattccatatcgcgacagttcgttgaaatgctgcgagtcaatttgcatcaagcctgatccataacccgtaacaggattacgaccaatcgcatcaattttaaatcgtgattcttgccatgatatagcacgcaggagatccggatcaattttgtaatccctgccagccatatcaaagcagtctgctgccattgatgacaatggtattaaagacaggatgataccaaacgctgctcccttcatgaattcccctccgtgccaaatcccggaataaccttaacccatccaagaccgagactcaacatatatgcactcctcaccacaaaatgaccacacactacgcaaaattaaaattttgcagatttcactttagcttcagtggcttaactgtagttatattacattatgttatttttctttatatatatgtgagttgccggcgagtcagtagtaagtcgtcggtaagtctatagcgactcgtttatgactcactcttttataatcatatatttaaagcgacttaactctagacttaagtcgccatgtgactcgtaatgcaactttcttagactctagacttaagtttagagttgtaaagaaggtaaactcgcgttatcttctcgccataataacttgcttgatgctgtttttaataaaggaaccgatatggccagggtacaagcttatgctagtgatgaagttgcagagaaaattaatgcaatagtggaaaagcgaagggctgaaggggcaaaggaaaaggatgtcagtttttcaagtgtcgcttcgatgctccttgaattagggcttagggtttatgaggctcaaatggaaagaaaagattcagggtttaaccaaactgagtttaataagattttgcttgagaatgtcatgaagactcagtttaccgtatccaaacttttggctattggctctctaagccctcatgttacaggtgatgaacgattcgagttccgcagcatggtgagtaacattcgagaagatgcaaaagatgttatttctcacttcttccccgagcaggaagaagagtaagaactggtgtgtgtttatggtggtttgtaattaattcagtagtaaaaaaagaataatgatctagctttaaaaagtgacatggaagaataaggaatatagaatacttacagggttgtaataaaatttgttgaagcgttgacgtccggggctagtccccccgaacgtcaactatccatagtgtcctttccaggaggcgcctatgtgtgcgaaggatcgtagtcatattgctgtgcgcagtcaaacagattccattcattctatgcgcgagatgcttaatatttcatcttgccctgcttttattcgtgattcccggggcgaagtaattcacaccagcccaacctttgacaaaattttcttaacatctggtggaactggagcatttgatacacccagagcacctggaagctggtttctggatctctccctggagatcaaactggaactgatgcagtcagaactgaaatcgttttcagaaggttctgctgtacttgttaaaaatatttggttggcaggttcactttggactgtttttattgaaacgttctcgattaatgaagatacatacagtaaatgggtttttataaatgaagatgaaccgatgcctcatccttcaatggaatacaatgacttttctataaagatgcaaagatatatcgaaagaattcagcgttcagcaaagtctgactgggctatctttaatctgtatgcggttgggttttctcatgcatctatttcgaagattacaggtgttggggtgcaaacctcaaaaaatacagttagtaaaataaaaaaggaactgagctttgataatcgtgactatatcataatgtcatcgatctatactctaagttatggaaagtttatatcgaatgtggtttcgatattaaacgatggtgttaattttttgttaaatcaatagtaccgtcggtacttttgatttgtgaaaataatttactcaagatttctccttagtttgtttacttttaaatcctccaatgtaagatttattaaaggttggtaatcttactttggaggtcgattggaaagagcgattaggagcaacgcacgacctgcgcctggaaaaaatgtgcttttaaaattagatgaagaaactaatcgtcgactcatcaaagcaaaagacagaagcagaagaagtaaaacagctgaagcttatttgagactgaaagatcatctagaacgttttccggacttttataactcggaactagccgtaccaggaggtgaaaaggaagagtgatttaacatcatagtcaaaaatctgttttatatatcaacctttctttttaaaggaaataaatatgaatgctgtattaagtgttcagggctctgctgtctctgaaaaaaccaaaccgtcttttatgtcccgcgttttcaataaaaagaaagccctgaaagtcgctaaagttgcgctgccggttgctgctgtggcggcgttcttcccggatgctgcgatggccaccaccacggcaaccgacctgatgaagtccggggatgcgaccgttaaaggcacgtttggtaagcaatccagcgtagtcaaatgggttgttctggcagaagtcgtcgccggtggcatcatgtacatgatgaccaaaaacgtgaagttcctgtttggcttcgcgattatttccacctttatcaccatcggtatgtcggtcgccggttactgacaggaaacacgtgatgacgggagacgaattaaagcgataccgtttcccggaaacactgactaaccagtcccgctggtttggtttatatctcgatgaacttatcccggccgtgatttgtctcggctggggtttctggaccagcaagttcatttttggcatagcttcagcggtactggttttctggggtatcaagaaactgaaaaaagggcggggcagttcctggctacgcgacctgatttactggtatctgccaacctcccttcttaaaggtttctttcatgatgttccggactcctgtttccggcagtggattaaataaatcaacggggaaataacatatggaacatggtgccagacaaaataccacccgcgttatcgctgtgggatttatcagtctggggacactcctgaccctcagtcttgcaaccaatattatccaaggcataaataattaccgtctgcagacggaacagaaagtggcggtgacaccgatgttattccgtgcaccctttgcggtgtctcagaaccaggctgacgcctcttatattgagcagctgggcctgtcctttgttgccctgcgtctgaatgtcacgccggaaacggttgatgcccagcatcagcagctactccggtatgtattacctgcctcgcagaacagcctcaaggtccatctggctgaagatgcgaaacgcattaaagacaataacgttaattccaccttttatatgacgtcgatgcgtgcctggccggcagagaaccgcgtggatatccggggtgagctgaaaacgtggattggggattccaaaccctacagtgaaattaaaagttatgtcattcagttcagtcgtgtcgatggtgtcagctggctggcgcgttttggagaaataaataatgaaaaaaattaacccgttatttatttcaggctgtctgctgttggtcgcccctgcgatgtccgcgaccctcagcggtacgctggagccgacagtggttcccctgaccaatggcggtcaggcaaatattgccgtgagtaacaccgatccgaatctgttcacagtacctggcgatcgcatcacggcgataaacagcctggacggcggcctgacaaatcaggagcagaccgacagcggcggcgccattctggcgaccgtcagtaaaaaaccattcaccttcattgtggaaaccgaacgcgggctgaacttctccattcgtgccgtgccccgtgcgggctcaggccggacaattcagctggtcagcgagctggcgggtacccccggtccggcaaaagcctgggaagagtcgaacccctatgaatcgttactggtttcgctgaatcgcgccgtgcgtcagggcagcgtacccggtgagtatcagtctgtccccgtcacttctgaagtactgcaggtgccggctggtctgcgcgccactgccgatcgggtctgggtcggtcatcacctgaaagttgtccgttacagtctggacaatgtctccctgtcggcccgtatggtgcgtgaaagcgatttctggcagcccggaacacgtgccgtcatgttcagtaccccggcgggcctgctgactgccggtggtcgcatgcagatctgggtcacgacgtcagatgaaggagtgaagcgctgatggccaacttcaacacgctgatcaaacgtaagcaatatatctggctgggactcattctggcgggcggcgcggcagccgtcggaggcgggctgtatctgtcagatctgaacatgagctctgatgaggaagccccggctcagggcgaacccgcaccggatatgaccggggtggtcgacagcagcttcaacagtaaggtggagcagcacgcgacaacagaaatgcaggcgactgccgctgatctcaacaagcgttttgactccctgcagggggaagtggacctactgagtaaggcgcgaaccgctgaccagatacgtatcgacaagctcagcagtgacaatgaagccatgcagaatcagctgaaggcgctgggcgtgaaaccggctgtctctggtggcgagcccgcgccgactcctccgtcaccgccacccggtccggaaggggagccgcagccagccagttatccgccgcaaaccggcgccgcggtaccgcctccgacggcattctatccggggaatggtatgacaccgccgccgcaggtcagctaccagtctgtaccggtaccaaaccagatacagcgtaaaacgttcagttacgacaaaggaaaaaaaacgaagtcattgccgtacattccgtcggggagctttgcaaaaagtatgcttatcgagggggcagatgccaacgcgtctgttaccgggaatgaatcaactgtaccgatgcagttgcgtatcaccggtcgcgtggaaatgccaaacagcaaaacctacgacctgacagggtgttttgtgggccttgaggcctggggagatgtctccagcgaacgcgccattgtccgtacccgcaatatcagctgtatcaaaggtgataaaaccatcgatcagcccattaacggccacgtttcctttatggggaaaaacggggttaagggagaggtggtgatgcgtaacggaaaaatcctcggctgggcatggggggccggttttgttgacgggattggtcagggcatggaacgggcttcacagccggctgttggcctgggggcaaccgcaactgttggcgccggtgacgttctgaaaatgggggtcggcggtggtgcatctaaagctgcgcagacgctgagcgagtactacatcaaaagggccgagcagtatcacccgatcattccgattggtgccggcaacgaagtgaccgtcgtgttccaggatggattccagctgaaaacgattgaagaactggaagcggaaaagaacgggcaacagcaggctcagaatcaggaggcggagccggcaccgcaggctgatgcacatcatcagtcaggcggcggtatgaacggattcaatactgacgagatgctgaagaagctgggcaaacttgatccgcgtgagttctctccgggcgcagcgccgcagggggaaaataatggctaagtctctcattactgctgttctgtcagcactgcgctgggctcactggctggttaagtgtgcggtggtgtatccgctggccatgatgatgttactggttgttctggtgttcctgacgggaccgtacacgttcggccagacgctggtgaaaaccgtagagtctgtgcagcagtagggatatgtcattcaggactgcacggggccgaaagaacttaatggtgatgcggtgaacgctccactgcctccggttttacaggaagactgcaccaccgtcagtacggatgcggcagggtatgcagcatatatcgaccagagctatacgcataatattctctggctctggctgctgatggcggtggtgtttaccgggatcgctgtggttttccgtcggactcctgtccgcagggtgatcatacggaaaaacggtgttgtcgtcggagaggctggttcgggttcttcagggctgattctagcccgatctgatgtcagccagattaagcgtgtttactatgaaatgagtccggatgaaggggataaatttgttcgggcgattaaggaaaatacccaaatcaggatgaacctgaagaaataaccgataaatagcgagaaatatcatgaaggaattaatgctgttaattcctctgggcagcgctttgctcttaaccgggtgtgcgggcacagagaccgaatttcaatgtaatgccacgacgtcggatacctgtatgacgatggagcaggcaaatgaaaaagcgaagctgaaggaggtacgcagtgatgcaaagccggctgcggccgggttgccacaactggctgagggtaatttcagaaccacgtcagttaattcgttcccgttgccgcctcaacccaacctgaaccgggccagagtggcagcggagagagaacgagcacgtgcagtgtacctaaataatccaacggcaaagaatgaggcaatatatttcgaaaccgagaaaaggctccagtctttgccggtagtgaaaatgtctttaccagtagtggcgtcaacgtttacgtcaccgtcaacaccgccaggtaattatccccggccattaagaaaaggggaggagacaacgtcattgtggatagcgccgtatgtggattcagatgatgtatatcaccagccggcaacggttctttttgtcgtaaaaccatcggcgtggggacagcctcgccttaattgattcacagcgccattgctggcgctgcagtagtgttccatttctgaattataacgagtgccctctgcgttgaaagggatgggcggtagcgtgtgaaatgaacgtcgataacgaaaaatgaaagaatttgaaaaatgactgactcaatgaaatatctatggctgcttttgcgcgaagattcgtcatatatttttatgttgattcttattgttggttctgccgtaatcgtgtcttccttttttcagagagtaatcacatcctggtggggtaaaaccctcagtgtgatactgtgtatggtgagtatgattactacagcaacaggagttcttgatcctgagtcaacatataaacaaattataaacaggaaagaaaatatcatttatacgcttagaaattgcagagtctccgcatttgaagcgcagcaggcagggtttctggctaaagcaaaagatgcctggtcttgcccggatggcgtaacacggtatatggatgtgagatacagagataaggcagagattaataaacttagtacggaaggtaagtaacgttatggatgaattattcaaatggacgatggcgctggtgtttttattgacaggttatcgcctgcttttttctagtgacagtaatacagtgcccgaagttctttctcatcactggaaaaatgactgccggttgcttgagactaatattgataaagggttttctctccagcgcaaaatagacttcagtgtggtgatgttattgaaaatgtcagcaaggctgattatgacagagcgataaggggcgataagcaaacaactatcgcagaggcaatgaaagaaatattcattcgttaatatataaacagaggcaataaagtatgcatgcctttatttttctggtgctgatgacgccgagtagtggtggtggaatttgggatattactcccatgcctaatacagatgtctgcataaaaatgctacgggtactcgaagcacgtggtggcagaggttacggaagtaatacaggagagtgcattgaaattaaaacccgcgagcctttgagcagcgtgatagaaacattgagtgagggtgggtaaatggctgaataccagttaagttttgatggttttgttcgacttttttttgcaatggcaatcattatctgcggttacggctatgtaattattggtgtttttataagagatgcgcttgcctatattttaatgttgtttgggcttacaggtctcagtgctttattttctttaatggtattcatggataaaaatatgtgggccggttctcctgatttgacgctatcagtaataacgggatttttttcagccacagtgatcttttatatgttttatgtcttgatttattactttgatcggatgggggcgggtgaatagtaagaccggtggtcagtgttaacaatctcacgttatttgaaagtatgcagcataaggaataagaaagtgaaagcgtactatatacttggacataacgttgcatggcttaacggtatatgcctgattctttttgttattggtttggtcggtgcgctggcaatggttgccatccctgaaaaattcaatcttcgagttaacagaggcgatacattcatatactgtgcgcttatagcggtggttgggttttccgggatgttcgttatctccattcactcattttcgatggatgaacttgaagcaggtagacactggaaagatgactgccggacacttgaggtaaacatgccgacaggcgcttttaccagccctgttaataaactggactgtgatggcatcatcattaatgtgcctggtgggcagtattattcctatatccatcagtgggaattatataaagctaactcaaaatgaaatgctgattaataaactggattgaccggtagggatggaacaatggaaagacaacaagaaattgaagagcgctctcgggatttaataagaaaggccgatgaaaaagaaaggcaagaattgaaacgttttgatctgctatatggtattttttgggttcttcttttttttgcttcagctggatgtttttttgttcagtatgaagattttcgcgatatgcagcccgccactccagaacaactgcaaagtattattcatgatgcgccttgtgcgggtgaggcttttcggatggctcttcaaactaataatgtgacttcgtcagcgacattaacttttggtgacgcaaaaaagatggcatcagaatgcaaggataaaaaagagattaaagcagtacgtgaaaaacaacttaacgcactgaacgatatgagcaaataatcaggggatggatatgatgctgtttcttcgaaagtatggatttttgtttacccctccagtctactggctcatctatctgggagccagactgacttacaatggactggcaggagacttttctgctgatttccttcagggtattcgacatgaaggcgtctatattatctgtagtttgtgtgtattttattttttctgcttagaggtggaagttggtgatggcgaattctcagcgaacattctgttcctgattgttttctttcatgtggttttattatttatcactctgcttatttgtttgtggcaaggggaggtgttgttggattcgatctttatgggtcagattatcgcctccatgtgtttattgtttttcattcctgtgctttccattataaggaggagtttctagtgcggctgtgaatattcttcttgccatttattacccttgttattttgaaatgctcttaaaggaacgcctgcatgagtaataacatcatcgatgccgtcacccagactgtgaattcactggtatcagcactgaagctgcccgacgaatctgcaaaagccaatgacacgctgggcagcatgaatttcccccagttcagccgtattctgccctataaggattatgattccgcgaccggtctgtttattaataacaaaaccgtcggttttatgtttgaggcgcgtcctttacccggtgcggataaaagtatcgtcgccacactggagcatttactgcgcagcaaacttccccggggcgtcccggtcagttttcatctggtctccagcaaactggtcggcaatgatatcgactacggtctgcgtgaattccgctggagtggtaaacaggctaaaaagtttaacgccattacccgcgcctactatctccgggcggcggaaacacaatttcccctgccggacaatctggatttgcccctgacgctgcgtaactaccgcgtgtacatctcctgctgcgtgccccggaagaagaactccgccacgcaaattgtggagatggagaaccagataaaaatcctgcgggcgtcactgggcggggcttacattccgacgcgtatccttgatgcggccgggctggtcgaactgatgcgtgagctgattaacccggacccgcacgagatgtaccgcgtaccgtataagctggacccctatcaggatctgaactatcagtgtgtcgatgacagctttgatatgaaggtcacggccggtcatctgaaaattggccgcctggggcgcgacgggaaagagtgcgtgacccgggtgacgagctaccatctggagaaagatccggaaatggccttcctctggtccaatgcggacaactacgccaacctgctgaacccggagctctccatctcctgcccctttgtcatcacgctgacgctgatggtggaggaccaggtgaagacccagaacgaagccaacctgaaattcatggacgtggagaagaaaagcaaaacctcctacgcgaagtactttccgaacgtgataaaggaaatgcaggagtggggcgatatccgccagcgactggcgaccaaccagacctccctggtgtcctacttctttaatatcaccacgtataccgccgataacgcagaggcctctctcgctaccgagcagcaggtgctcaacagttaccgtaagggtggcttccagcttatcccggcccgctaccatcacctgcgtaattttctggccatgatgccgttcaaatgcggcgaaggcctgttcaaagagctgcaggcggcaggcgtggtgaagcgggctgagacgttccaggtggccaacctcctgccgatcgtcgctgacagcccgctggcgccggcgggactcctggcccccacctaccgaaatcagctggcgttcatcgacctgttctacgagggaatgaacaataccaatttcaacatggcagtctgcgggacgtccggggcgggtaaaaccggtctgattcagcccctcattcgcagtgtgctcgactccggcgggtttgcctgggtgttcgacatgggcgatggctataagtccctgtgtgaaaacatggggggcgtatacctcaatggcgataccctcaagtttaacccgttcgccaacgtgctggatgatgctcactttgacatgtcagcagaacgtatacgcgatcagatgtcggtgatggccagtccgaacggcaacctcgatgaagtccatgaaggtctgcttctgcaggcagttcaggcggcctggttaagcaagcgtaatcatgcacgcgttgatgacgtagtgcagtttttacaggacgcgaaggacagcgatgaatatgctgattccccgacaatccggggccgtctggacgagatgataatcctgctcgatcagtacacggtgaatgggatctacggggactatttcaactcagataaaccaacacttcacgatgacgcccggatggtggtactggagctcggtggtctggagtcgaggccctctctgcttatcgcggtgatgttctcattgattatttacatcgagaacaggatgtatcagtcaccgcgtggcctgaaaaaactgaacgtcatcgatgagggctggaagctccttgatttcaagaatggaaaagtggggcagtttatcgagaaaggctaccgtaccgcgcgtcgacataccggcgcatacatcaccatcacgcaaaatatcgtcgacttcgactccccgaccgcctccagcgccgcacgtgcagcgtgggggaactcatcgtacaaggccattctgaaacagtcagcgaaggaatttgccaagtataaccagctgtacccggatcagttcagcaagctggagaaagacatgattaacggcttcggctcggcaaaagagcagtggttctcctcctttatgctgcaggtggaagcgaactgctcctggcaccgcctgttcgttgacccgctcagccgggcgatgtactcctccaaaggcccggattttgagtacatgcaagcgcgccggcaggagggggtcgatatccacgatgcggtatacggactggcgtgccgcaactttaaagacgaaatggcagagcttgaatcccgaataccggtgaatgacatggaggataaacagtgatgaaaaacaacaccgaacaaccggtcagtacgacctctcatacctttcgccggatacctgtcatcgttgctctcgtgcttttcgccctggcaaccagcgcgtttctctcacgcgtggttctggagtactccacgccgcgggtggtggcttttgatatgaagaagacgctcgacagctttatggacagtgtgagtcagaagcagctgacagaggcgcagtccaaagcgctctctgatcggtttaacgacgcgctggagaagagtctggcggagtatcagcagcagcatcatgtggtcattctggtttcacctgccgtggttcagggcgcgcctgatgtgacccgcaacatccagcacgacattgcccgccggatgaaaggagaacagtaatgatacgactgaaagactgtctgctcgccgcctgcctgttatcgccgctgactcaggcggctgatctcggtacctggggggatttatggcccctccgtgagcaggacatgctgcagctcatcacgcagcgtctgcagtcgctgcaatcctctggccagtgggaccagacgatggacgcgtttaagcagcgggttatcgagaacagtcagcgtccggcgccggtggaaggcattaagcgtgcggagaaatacgagcagcgctggtttgatcccagcatccgactgaccgaagacctgaaggacaatgaggggcgggtgtttgcccgcaagggcgaagtggtaaacccgcttaaaaccgtaccgtttgtccagaccctgtacttcatcaatggtgacgatgccgaccagctggcctggatgaagcgtcaggtgccggaaaccctgatgagcaaaattatcctggtgcgtggcagtatcccggacacctccgcagcgctggacagccggatctatttcgaccagaacggtgtactgagcaagcgatttggcctgacggcggtcccggcgcggatcacgccggcgccctccggtgaacggctgaatattgagaccttcccgcccgtcccgcacccctgatctggggctgcgttttattcaaaagaggtaaccgatgccgatgatactggccttaataatcctgctcacgatgctcttgctgacgctaatgtggtccaccatccgtaagcaggagaatgtcatacgggaactcagtacaagagaaagctggctggagagagaggttgagcgtctcaggaccgataacgagaagctgtaccgctggctgagatacaacagtgaaaaggttatcgatgaaatgacttgtgaactcgatgcactgtccgccgttcgccagacgaacagggattcataccgtcgccagctttacctcttcgactgcctgtccctgatggtgtgggccgggatggagggcgccgaagactctacacgggaaaaggtccgcaataaaatcgatgccctccgtcttgttctcagggagaaaactgacgaatgaaagccatgttttttttaatctgcatcgcgttctcaacgttcagtggccgcgccgccgcagacccctcctgtgagggccggtttgttaacccgatcaccgatgtgtgctggcgctgcatcttccctctgtcgctcggcagcgtgcaggttggtaaaggcgacctgcctgataccagcaatcccggcagtcccctgcagctgtgtccggctccgccaccgctttttgttcgtcccggactggccatcgggtactgggagccgatggccatgacggacgttagccgttcgcctggctgtatggtcaatctggggggcttcagtatcaatctcggcaagaccggcatggggaccgcgagaaaggacgacaagcaggtgaacggcgccttctatcacgttcattggtacaagtacccgctgacgtactggctgaacatcatcacttcggcaggctgtctggaaggcggagacatggatatagcctatctgtccgagattgacccgacctgggtggacagcagcctcaccaccattctgaatccggaagcgatcctgtttgccaaccccatcgcgcagggcgcctgcgcagcggatgcgctggccagtgcattccatatgcctctggatgtcctcttctggtgtggtggaagccatggctcactttacccgtttaacggccaggtcagtaatgagtccagcccgctgcagtcgtcggtactggtcagtgagcgtatggccttcaagctccaccggcagggacaaattatggagagtatcgggaaggacaaggcagtctgttacgaatatccctccccgatcatcccgaaagaacgctggcgctatcagatggtgaacatgtatccggacagtggtcagtgccatccgcttggacgcagcgtgatgcgctgggaggccggcaaaaatccgcccaacacccgcaagaactatggctacctgatgtggcgtaaacgtaactgcgtatttttgtaagtcagacaggaaaaggataaatgatggaaaaagaacagaatcaatgttgccagcaacccctcctgcatcaggatgtatctcccactacatcccgggtcactttcagcacggataaaaaggtactaacggcagagcaatacagagactggcaatacattggcgcaaccctcagagaaaaaatgcagtcgaataactgaatatgtgatgcagggctatgcatttgtcatgacctgtagcaatagccaggcacataactctctctaattgaggtaattatgaataaaggaatcaccgggctggcctgggggttgagtctgctctgcactacggcgtcagccgctgacaatattaatactcccggggaccagcagtggctgaaacagcaggagaacctcagcgaacagctgcgccagcatccggataaacagctgcagcaggagcttgaggcgcaaatcagccgcaatcctctgcccaaatcagaccgccagtttatcgataatctggtcagccagcagaaagcggcgaatcaggaaaagccggcagaaggagcgctgtactttgtctccttctcgatacctgaagaggggctgaagcggatgctgcacgaaacccggcagtacggcattccggcgacactgcgtgggctcgtcaataacgacatgaggaccaccactgacgcggtgctgcagctggtgaaggatggcgtgaccgacggcgtgcagattgacccgacactatacacacagtacggcatccggagtgtgccgtctctggtggtacggtgtcaggccgggtatgacgtggtacgtggtaacattcacgtcaaacaggcgctggagaaagtggcacagaccggtgactgcgcacagctggcccggcaaatacttgatgcgcactcgaatgccgccgggagccagccatgaaagacagaccgtacttcatagcgttaccggaaatggtgagggatgagggagggtggaaatgaagacggttatttccgtgctgaccgcgcattttttagtcctgagcgcctttatctggctggcatctcccgcctgcgctgacagtggaagtgactataaagctggttcggattttgcgaaacaggtgcagggcaatggtctgaactcactgaaaaatttcagtggtgagcaaaacctgccggggtataccgccaacccgaatcagacaaaatactacggcggcgtcactgccagcggagacagctctctgaaaagcgattcagccctggagttcagccagggggacacaggcaaagcggttacggagtcgttcacaaaccggccaccggatcagatatctcaggatgcgccgtttattcaggccgcaaaggatacagaatcccgtgccgacagcattgtcggcgataccggacagtcctgtaccgcccaggttgtgaaccgcagcgagttcacaaaccatacctgcgaacgtgatctgcaggtggaaaatttttgcacacgggaagcgaccctgaaggataacgccaccacgcagaaagttaaccgaacctatcagcaggtggtgacgctgaattatgcccggagtacccggcaatggagtggcaacctgacgatcccgaccaatggtcgtctgctgaatgcctcggtggatggtgagcctctggtgatcccctggattgaagaatgcgattccgaagggaaggtgcgggatagctgcaagagtgcagtgagtgaaagcctgaccctctttgaacgaacgttccccattgatgtgatcagctggccacgttcagaatcgatgtgttcaggcggtcagaacacgcattgtacgaaatatacctatgacgggaaggggaagattcatcagtcgtttggtgtggacaaagcggccactgctgggcagaacttttcagtaagcaaaacatcacggaccgtatcatcggccagccagaaacccgtacaggtcacggtcaccctggtgatggaagaaaccgaaaccgtctatgcacctgaagtcgtctgggttgaaagctgtccgttcagtaaggatgaaggaaaaaaaacgggcgaggaatgtatcagcccgggaggaacgcgaaccatcaccctcggaggcagggattactcgttcacggaggcctgctggaaatataaggatacctggctcacgcaaccggcggacaacggctcctgtgaaagcctgatgaaaaatacggcttgtactctgtcatcccgccagtgcgccttctccagcgaggaaggcacgtgcctgcatgaatatgcaacgtattcctgcgaaaccaggacgagtggcaaacaaatgatctgcggcggtgatgtcttctgccttgatggtgaatgtgacaaagccacgtccgggaagagcaacgactttgggcaggcggtgtctgagctggcggcactggctgccgcggggaaggacatcgcggcactgaacggggtggatgtccgggccttcaccggaaaagcgaagttctgtaagaagtttgctgcgggcttcagtaactgctgcaaagacagcggctggggccaggatgtggggctggcacgctgcagcagcgaggaaaaggcgctggcaaaagcgaaaaaagacaagctgacggtcagtatcggggaattctgctctaaaaaggttctggggatttgcctggagaaaaaaaggagctattgccagttcgactcaaaactggcgcagatcgttcagcagcagggaagaaacggtcagctgcatatcggttttggcggagccagcagtcctgactgtcgggggattacggttgaagagctccagaggatcgactttaacatgcttgatttcaccaactttatggacgacctgatgaaaaatcaaaaaataccggaaaacgatgttctcaccaataagaccaaagaacgaattaaggaaatcatgagtcagcaatccgcgcaataaaccatgctgcctaataaagagaccgataatcatgaaaattaattttcacaaacagcctgccattgattttgtcctgagattaacactgacagtaatcattatttctccggtgatttatttctcctgggatgcagtcaaagggacgtcgggaagtgattatgtcgaaagtgtggtctttattcttatggctgggtttgccatgtctgtgtgttatttgtttttctcagccctggagaaagttataaatgcaaggaaaagcaaagatgaatcgatatatcacgattgagaaatttatagacattctgaatgaagagaatttaccccaggagcatcatgttatggtgctggctgttcttgcggatatctctctgcatacagacaggttcctgattaactcgtccgaactggttcagatggccgctcagtactcacctgctttccagaaactgccagcggaccggcaggcttttatatcttcagtactgagcatgccgctattccttattatgtgaccaggagagtcaatggaagagaaaaaagcatacgggctggtcatggtgtttgtcggggtgtttgtctttctcctggtcagcattatgtcgtacagcctgtggcgggacaggcaggttaacgcatttatgacaaccaaccgggcctgggggatccagtgcgacactgtttctcagaccgcgtgggtggtcagggacggggagcgggtggaccttcagataaatcatctgcctctgtactgcagcggttaccgctttgaagcccgtgatgatgcaggaaaggtacagcgccagctcgataaatacagtgtctatcagcatctgtcacgccagtcgcaataattcataaaagggtatttgtcatgcgaacaatacatgccgccatgctggcggggtgcctttactgcgccctgatgccggctttcgccaaagatgcgggctggcagtggtacaacgagaaactgaagccccgtgatgaggaaaggccagccgcaccagcggcaccaccgccgcaaatggatattctggagaaactcgccacactccaggcggccaccaaacggtcgctgtacgaagccattctgtatccatcgtctgaaaacttcgtgaagtacttccggctgcagaactactggacgcagcaggcaagtttgttctcgatgagtgcgaagaaagcgatgctggaaaacccggaactcgattacaacctgcagtacagccactacaacggcacggtaaaaaaccagctcgccgccgactatgccgaacagcgtcaggctatctccaccctcgcacagcactacggcgtgatgttcttctaccgggggcgcgaagcgatcgatggccagctggtccaggtgattaaaaacttccgcgaaacctatggcctgagcgtcataccggtgtcggttgacggcgtgattaaccccatgctgcccgacagccggacggaccagggccaggctgggcagcttggcgtgaagttcttccccgcgatgatgctggttaacccgaaaagtggccaggtgaagcctctcagttacggctttatcagtcaggacgacctggcgaaacagttcctctatgtctccagcgactttaaaccgaatttctaaggagtgtgtcatgcgaaagattcgttttccggatttagatatcaccgggatgtgggtgctggccgtgggcgtgtttttccacctgatagcccggcttgtcagaaagcagcctgagctggccgtccaggccggggaaatcttcgggctgggaatggtggtgttcgggggataccgcattcttaacgccctcattgctgaagccgaaaaagaggagaaagcctgtgaaaagcatcctgaagaacatcgctaagacgccgctggcggcgctggctctttcccttgctctggccggactggcacaggcgggaacgttcgatgaggtgaagtcgctctgggatccgcggggaatctccggtactgaaacggcttccccgcagagcgacactccccaggtggagagcggggcatctcagccacgctggttacgactcagcaacggaaagcaggtggacctgcgcgactggaaagtggtgctgttcatgcagggacactgtccatactgtcataaatttgacccggtgctgaagcagctggccggacagtatggcttctccgtgttctcttacaccattgacggacagggtgatgacgcgtttcctgaagcgctgccggcgcctcctgacgtgatgcagacctttttccccaatatcccggtggccaccccgaccacgtttctggtcaacgtgaacacgctggcagcgtacccgatcctgcagggcgccacggatgcacagggctttatggccagagtggatacggtatttcagatgatgcactgagtctctgttatatccggtcttagcaagtgattaaggaaaatagccatgaacaaatatatacgttcgacgggactgtatgcgtttttatttccagccagtttaaaagcacccgggcagacagcagcagaaaaaatagaacaactgaagccggaatttgtccaccgggaaaggcgtatggaaatctatctggaattattcattgtgtttctgactgcaggtgccctgctgttatggataatgagatttttatttaatctctgcgtggctgactggatagccagcggtgacctgcgagtaaaagacctgtggaatattatgatgtacgccatcccttatgcgctgatggctgtcgggatggggttctttgttgccggagtgacattagcaatcctcaattttttcagtcatcacctgaaaatcctttttattctgagaaataacagagttaaaaataatgctgtgcgtaatggaggacaggatgcgaattaaacttctgtcactcttctgcggtgccgcgcttggcctgtcatttagtgccgccgccgacgtgaatggcgacatgaaccaattcttcaataagcttggctttgcgtccaataccagccagccgcaggtctggcagggacaggcggcgggttacgcctccggcggttcgctgtatgccagaacgcaggtgaaaacgatccagctggtcagcatgaccctgccggatattaacgccggctgcggcggcatcgatgcgtacctggggtcgttctcatttatcaacagcgagcagctgcagcgcttcggcaaacaaattatgtccaacgccgcgggctacttctttgaccttgccctgcagaccacggttccggagatcaaaactgccaaagacttcctgcagaagatggccagcgacatcaacagcatgaacctcagctcctgccaggccgctcagggcattgtgggcggtctgttcccccgcaaccaggtggcgcagcaaaaggtctgccaggacatcgccggtgagagcaacatttttgcggactgggcggcttcccgtcagggctgttcggtgggggggcagatggacaaagtgcaggataaagccagcgataaggacaaggagcgtgtaatgaagaacatcaacattatgtgggatgccctgtccaaaaaccggctctttgacggcaataaggagctgaaagagtttgtgatgaccctgaccgggacgctgatttttggtgagaacagtgagatcaccccgttgccggcacgcaccactgaccaggatctgattaaagccatgatggagggcggcacggctaaaatctatcactgcaatgattcggataagtgtcttaaggtcgttgctgatgccaccgtgaccatcacctccagtaaggcgctgaaaagccagatttccgctttgttaagcagtatccagaataaagcggtggctgatgaaaaactgacggatcaggagaaagggtttatctccagcaccaccattccggtgttcaaatacctggtcgacccgcagatgctcggtgtgtctaactcacttatttaccagctgacggactatatcggctacgacatcctgctgcagtacattcaggaacttatccagcaggcccgggcgatgatctcaaccggtaattatccccagtcgacaatggatatgatcatggaaaacctcaaccaggcgagtgtccagattgccgctttccagtcccgcgttcaggttcagcaggacgccttgctcgtggtggacagacaaatgagttacatgcgccagcaggtctctgcccgcatgatgacccgctaccagaataactatcattttggggggaatcagtaatgcttgaggtatatgccattgcaggcggtgactggttacggggcaacctgaacgcgattgcggcgtttatggagaccggcacatggtcgaccatagaaaagatgtgtatcgccatctcggtactcattgtggcggggaactgggtaaaaaaacacaacgtgatggaccttttgggctgggtcttttccctcaccctggtctctatgctggttgtcattcgcacccctgtgcagatcatcgattacagtaacgttgcgcaggtctatgaagtcgataatgtacctattggtctggccattccggcgtcgctgacaacgcgggtaggaaacgcgcttatccagagttatgagatggtcttcgcgctgccggacagtgtcacgtacagtaaaacggggatgttatttggcagtaatctggtcgcgaaaagtacggattttttgtcacaaaatcctcagattacgacgctgttttccgattacgtacaaaactgtgtgatgggcgatattttcctcaatcataagtactcttttgaggaattactgaattcacctgatccgtataccctgatttttgcaaacccgagtccactgcgtggcgtgtttgacaaaaacaaccagttccagacatgcgaggaggcctcacgggatctgaaatcggctctcgcgctggatactcagacaggcggtaaaacctggaactactatgttcgtcagctgtttggcggcaaacctaatcccgatctgcttttcagccagatgattggcgacagctacaattacttctacagctcgggacagagcgccgggcagattatccgccagaacgtcacgatgaacgccctgcgcagtgggatccagagttatgcggcccgcagcggggacaccgccagtctggtcaatatggctaacacatcatcccttgaaaagcagcggctggcacaggccacaatggggcaccaggcgcttcgcacacttccgctgatgcagaccgttatcatggggataatgattgggatgttcccgatcatggtgatggccgccatgtttaatatgatgactctgcaggtgctaaaggggtatgtgtttgcgcttatctggctgcagacgtggccattactgttcgccatcctgaacagcgcaatggcctactatgcgaagcaaaatggcgtcccagtcgttctctctgagttgtcgcaggttcagctcaaaaactcggatattgcgaccaccgcgggctatattgccgtgatgataccgcctttgtcgtgggggatcgtgaagagcatgggagcagccttctccagtgcctacagccatttttcttcatcggggctcagtgcaacatcgcaggctgcctccggcgtggtggacggcaattactctttcgccaacatgcagatggagaacgtcagcggctacagctggggtaccaacagtacaaccagtttcggacagatgtcacggcagctggcgaatgggggcatgagcacgcagacgagggatggatcgatggtctgggacagtggtggtgcaatgtcaaaactgccggtggatatcaacgtcggtcgtcagatagccagtgcgcagcaacagatggcccgtgaggctgatgtccaggccgaaagcgcgctgcatggctataacagcagcgtgacaagtgcctggaatagtctgcagcaatttggcaccaataaagggaacagcgcctcaacaacgaccggagctgatactaccgattcttcgcaggactcgatggccagaagcaagatgtggaatgcggttgttgctaatgcgaaagccaacaacatcagtaatgaggagtctttccagcagttgatggatgattcagctaaaagtacgcagggagttgatttatacggatctggtaagtggagttcaggggatcagctgtttggtaagctaggtaaatggggaactgggttatctgctgaggccggagttaaaggcagtgcgggttggacccacagctcgggtaacacagataatgttggcacttccggtcgtgaatcgaatgacagccgacatgataccagtagtcaggcggccaaagactttaaggaagcatccgattactttaccagccgcaaaaccaccacatcgggcaacattaccgataataatgccagctcgcgtgttgaccagtttgccgcgtcactctccagtgccaaaaacagctatgaccagtatacaagcagccggacacgcagccatgagtacagtgagatggcgtcacgcacagagagcatgactggccagatgaacgaaaacctgactcagcagtttgcgaactttgttcagcatcgtgctccacaggatgccgaggccattctgaccaataccagttctcctgaaattgcggcgcagcgtgaagccctggcgcgtgaattcgtcaaagagcaggtagaacccagggttgatgctgcgtatcaacagggtcgtgaaagcattggacagaatatggctggggtgtcaggtggtggtgacaatggatcggtaatggccgactaccgacaaaattctggtcgtatcgatgctatgacgcaagatgcgggtattaaggataatgtggatcagaaagttggtgggatgattacagagaataaacaacagcagcaggaaacccgcgaaaacatacaacggcaaggcgcagaggtgaaaaatgagaatactgaaatggaaaaggaccataaaacaaaagcaaatgagtttaaaggtgattataatgaaagaaagagtaaggtgaaatctttaccaggagctgactcgcctactgagttagaggcaaaagcggcgaaaattcaaaaggattatcttgatggtaaaaggtaaaaatgatgattacgaacaaactacttattgaggaagtggaggagctgaaaaatctactttcacaagggaaggctgaaattccatctttttgggagtgcctttggcctggcgtagtgttagttgcatggaatatgctttgcgctgtaattagtgtggatgctgtttatttgaccggaaagtatatatttcatgttttggtttttcctgtcggggtcagtatcattatgctcctaggtattgccagttcacgctctctctttttgtcagtccctaaaaactttagagaaaaatcgaatatatatcgctttttttctaagaaggtttcgatttatgctgttgtgtacatggcagtgattatgttattagctatttgtaatagagtggtttatgacacgccattttcttttgcatttatggttattttaacgtctgttttttttggttttgtcatgaatctggattttggacgctatcagctatcattgctcacctctgcaataaactctttccgagcggaaaagttgggggggtaatcatccagaagcgacctatcaattatggtggtttattaacagactaaaaatttcttttggttattattatctgtctaggttgttattggtttttacatctcgcttaaaattcgtatatagtgaatgcgcattccgaaatcataagagaatgtgtatttactcgtattgattatgtcacaaggattcaggatgaagcttaataaagtcatggctgtgatggtcgtcagctctgcgctggtgttatctggatgtagtgcaatgggaaccgccattaaaaagagaaatctggaagtaaaaacccagatgagcgaaacaatctggctggaaccttcaaataataagacggtttatctgcaaatcaaaaatacctccgataaggatatgagtggcctgcaggcaaaaattgccagcgccgtcacttcaaagggatatcaggtcgtcagtaacccggatacggcgggctactggatccaggcgaacgtgcttaaggccgataaaatggaccttcgtgagtctcagggctggttaagccggggttatgagggcgctgtgactggcgccgctttaggggcagggattaccgcttacaactccagttctgcgggagcaaccctgggggtaggacttgcagccggtctggtggggatggcggctgatgcgatggtggaagatgtgaactacaccatgatcaccgatgttcagatcgcggaaagaaccaaaactcaggttcagactgataacgtggccgtattacgtcagggaacatccggcgcaaaagtgcagacaagtactgaaacgggtaatcagcacaaataccagactcgcgtcgtctctaacgctaataaagttaacctcaagttccctgaagcccagcctgttcttgaagaccagctggcaaaatcgatcgctaatattctgtaagctttctattccacggcccggtccccgggccatactggcatcacctttctggtgtgtcagaattcattcgtcaaataatctatgaattccagatctgaacggtgaacagttgcgcaattcatttgtgcatctgtgaggcgttgccgccttcggcggaatattttcgtctttatttgatcagaggttatttatggcaatatctgaacctgtcatgtctcttgaaacacataaactgatgcctggcgatatttatccacaccctgctatggggggcttattccctgcaaccccgtgaggtctgttttcgctgattaatttgtccttccgaccctaataatttactgacggattagtgccatgagtttcaatgccaaagatatgacgcagggcggtcagatcgccaatatgcgctttcgcatgtttggtcagattgccaatattattttctacgtgctgtttattttattctgggtactgtgcgggctgatgctgatgtataggcttagctggcaaacctttgtgaacggctgcgtatactggtggtgtacgacgctgggtccgatgcgcgatattattcgttcccagccggtatacaccattcagtattacggccagtcgctggaatatacctcagaacaaatcctggccgataaatatactatctggtgcggagagcagctgtggaccagtttcgtctttgctgccgtggtttctcttgttatctgtatcgtgacgttcttcatcgccagctgggtgctgggccgccaggggaaacagcagagtgaggatgagaataccggcgggcgccagctttccgataagcccaaagaagtggcccgccagatgaagcgtgatggtatggcctccgatattaaaattggcgatctgcctattcttaaaaactccgaaatccagaacttctgcctccacggtaccgtaggctccggtaaatcagaagtgatccgccggctactgaactacgtgcgtgcacgtggcgatatggccatcatttatgatcgctcctgtgagttcgtcaaaagctattacgacccgtcactggataaaatcctcaacccgctggactcgcgctgcgcggcctgggatttgtggaaagagtgcctgacgctgccggacttcgacaacatctccaacacccttatcccgatgggtaccaaagaagacccgttctggcagggctccggtcgcactatctttgccgaaggcgcgtatctgatgcgcgaagacgacgatcgcagctacgagaagctggtcgataccatgctgtccattaaaatcgacaagctgcgcgcctatctgcagaacacgccggcagcgaatctggttgaagagaaaattgagaaaaccgccatctccattcgtgccgtgctgaccaactacgttaaggctattcgctacctgcagggcatcgagaagaacggggagccgttcactattcgggactggatgcgcggtgtccgtgaggacagacccaatggctggctgtttatctcctccaacgctgacacccatgcttccctgaagccggttatctcgatgtggctgtcaattgccatccgcggcctgctggcgatgggtgagaaccgtaaccggcgcgtgtggatattcgccgacgagctccccacgctgcacaagctgcctgacctggtcgaaatcctccctgaggcgcgtaaatttggtggttgttatgtgttcggtattcagtcctatgcccagctggaagatatctatggcgtcaagcctgccgccacgctctttgacgtaatgaatacccgggccttcttccgttcacccagcagggagatcgcggagtttgctgccggtgaaattggcgagaaggaaatcctcaaagccagcgagcagtactcttacggtgctgacccggtgcgtgatggtgtatcgaccgggaaagaaaaagagcgggaaaccctggtcagttactccgatattcagacgctgccggacctgtcctgttacgtcacgctgcccggaccgtatccggccgtgaagctggccctcaaatacaagccgcgtccgaaaattgccgagggatttattcagcgccgactcgatacgcgtgttgacgcccgcctcagtgcgctgcttgaagcgcgtgaatctgaaggcagtcttgccaggacgctttttatgccggatgcgccggcatccgggcccgcggatacaaacagtcacgccggtgaacaacctgagccgatcagtcagcctgcgccagcagacatgacagtatctccggcaccggtaaaagcgccgccgacaacaaagagtccggcagcggaaccttccgtcagagcaacggagcctcccgtcctgcgggtcacgaccgtaccgttgatcaaaccaaaagcagccgcagcggccactgctgcctcaacagcatcctctgccggtgcccctgcagcagctgcaggcgggacagaacaggaactggcgcagcagtccgcagagcaggggcaggacatgcttccggccggcatgaacgaggacggtgtgattgaagatatgcaggcgtatgacgcctgggcagatgagcagacacagcgggatatgcagcggcgtgaggaagtcaatatcaaccacagccaccgccacgatgagcaggatgatgtcgagattggggggaacttctgatgcttagtttcagccaggttaaatcagctggcagtgccggtaattactatacggacaaggataattactacgttatcgggagtatggacgagcgctggcagggtaaaggcgcggaagcgcttggtcttgaaggaaaggtggacaagcaggtcttcacggagcttctgcagggaaaactacctgatggcagcgacctgacccggatacaggatggcgtgaataaacaccggcccggttacgatctgaccttctcggcccccaaaagtgtatcgatgctggctatgctgggcggcgataagcgtcttatcgatgctcataatcgcgcggtgacagtggctcttaaccaggtggagtcccttgcctccacacgggtaaagagagatggcgtttctgaaacggtcctgaccgggaatctgattattgcccgctttaaccacgatacatcgcgcgctcaggacccacagatacacacgcacagcgtggttatcaatgcgacacagaacggcgataaatggcagacgctggccagcgataccgtcggtaaaaccgggttttccgaaaccatactggccaaccgcatcgcattcggaaagatataccagaactctctcagggccgatgttgagtctatgggttacaagacagtggatgcgggtaagaatggcatgtgggagatggagggcgtgccggttgagtggttttccacgcgcagtcaggagctccgggaggctgcaggacccgatgcctccctgaagtcccgggatgtggccgcgctcgatacccgcaagtcgaaagaagccatcgatccggcagagaagatggtggagtggatgaacacgctgaaggagaccgggtttgacatccgggggtaccgtgaggccgccgatgcgcgggccgcagagctggcccgtgcacctgccgcgccggtgaacactgacggtccggatatcacggatgtggtgacgaaagcgattgccggtctcagcgaccgcaaggtgcagttcacgtatgccgacctgctggcacgcacggtcggccagctggaggcgaaggacggtgtctttgagctggcgagaaagggcatcgatgccgccattgaacgggagcagcttatccctctcgatcgcgagaaaggcctgttcacctcaaacatccacgttctcgatgaactcgccgtcaaagccctgagtcaggaggtgcagcgccagaatcatgtctctgtcacgcccgatgcgtctgtggtgcgccaggtccctttcagcgatgccgtcagcgtgctggcgcaggatcgcccggtcataggtatcgtttccggtcagggcggtgcaaccggccagcgggagcgggtggccgagttaaccctgatggcccgggagcaggggcgtgacgtccatatcctggcggccgataaccgttcacgagattttctcgccggtgatgtgcgtctggccggggaaacggtgaccggtaaatccgccctgcaggacgggacggcgtttattccgggcggaacactcatcgtggatcaggcggagaagctgagcctgaaggaaacgatttccctgcttgatggcgcgatgcgccataacgtgcaggtcctgctctccgacagcgggaagcgcagcgggaccggcagcgcgctgacggtgctgaaggacagcggcgtgaatacgtatcgctggcagggtggccatcagaccaccgccgacatcatcagtgaaccggataaaggagcacgctacagccggctggcacaggagtttgccgtcagcgtgcgtgaagggcaggaaagcgtggcccaaatcagcgggacgcgtgaacagagcgtactcaacggcctcatccgagactccctcagacaggagggggtgctgggtgagaaagacacgaccattacagccctgacgccggtgtggctggacagcaaaagccggggcgtgcgggattattaccgggaggggatggtgatggaacgctgggatccggagacccggacgcacgatcgctttgtcattgaccgggtgaccgcgagcagcaatatgctgaccctgaaagaccgggaaggggaccgtcttgatctgaaggtttccgcggtcgacagccagtggacgctgttccgggcagatacactgccggtggcagagggggaacgtctggcggtgctcgggaagataccggacacacgccttaagggcggggagagcgtcacagtgatgaacgtggaggacgggcagctggcggtacagcggccgtggcagaaaaccacgcagaccctggccgtgggtgcgggcgtgtttgacggtattaaagtcggccacggctgggtggaaagtcccggcaggtcggttagcgagacggcaacggtctttgcgtcggtgacgcagcgtgagctggataacgccaccctcaaccagctggcacagagcggaagtcacctccggttgtactcggcgcaggatgcggcgcgcacgacggagaagctgtcgcggcataccgcgtttagcgtggtctcagagcagctgaagtcccgatccggcgagacggatctggatgcggccattgcgcagcagaaggccgggctgcataccccggcagaacaggccattcacctggccatcccgctgcttgagagccaggacctgaccttctcccggccccagctgctggcgacggcaatggaaaccgggggcgggaaggtttcgatggcggacatcgacacgaccatccaggcacaaatcaggtcggggcagttgctgaatgtaccggtggcacccgggcgtggcaatgacctgctgatatcccgtcaggcctgggacgccgagaaaagcatcctgacccgggtgctggaaggtaaagacgcggtggcccccctgatggaccgcgtgccggacagtctgatgacggaactgaccgccggacagcgggcggcgacccggatgattctggagagcacggaccggttcacggtggttcaggggtatgccggggtggggaaaaccacccagttccgggcagtcatgagtgccatcagtctgctgccggaagagacccgcccgcgcgtcatcggtctggcgccgacgcatcgcgcggtcggggaaatgcagagtgccggcgtggatgcgcgcacgacggcgtcgttcctccacgacacgcagctgctgcagcgcaatgggcagacacccgatttcagcaacaccctgttcctgctcgacgagagctcgatggtggggctggccgatatggcaaaagcccactccctcatcgccgccggcggtggacgggcggtgcccagcggggataccgaccagctgccgcccatcgcgtcgggccagccgttcaggctgacgcagcagcgcagcgccgccgacgttgccatcatgaaagagattgtgcgccaggtacctgagctgcgaccggcggtctacagcctgattgagcgggatgtgcaccgcgccctgaccaccattgagcaggtcacgccggagcaggtgccgagaaaagaaggcgcctgggcgccgggcagttctgtggtggaattcacacagaagcaggaaaaggagatagaaaaggcactgagcgaggggaaaaccctgccggaaggtcagcccgcgacgctctacgaggcgctggtgaaggactataccggacggaccccggaggcacagtcgcagactctggtgatcacccatctgaataaggaccggcgggcgctgaacagtctgatccatgacgcacggcgggagaacggggaaaccggcaaagaggaaatcaccctgccggtgctggtcacgagtaacatccgtgacggtgaactgcgcaaactgtcgacctggacggctcacaaggaggcggtggcgctggttgataacgtataccaccgtatcagcaaagtggataaggataatcagctgatcaccctgacagacagtgaaggaaaggagcgatttatctcaccccgggaggcatcggcagaaggcgtcacgctctatcgtcaggaaaagatcaccgtgtctcagggggaccgaatgcgcttcagcaaaagtgacccggagcgcggctatgtggccaacagtatctgggaagtgcagtctgtttcgggtgacagtgtcacgctgtctgatggcaaaatcacccgtacgctgaccccgaaggcggagcaggcacagcagcatatcgacctcgcctacgccatcaccgcccacggcgcccagggggccagcgagccgtatgccatcgcgctggaaggggtggccggtggccgggaacagatggccagctttgagtctgcctatgtggctttatcccgcatgaaacagcatgttcaggtctacaccgacaaccgtgagggctggataaaggccatcaagaattcacctgagaaagcgacggcgcacgatattcttgaaccccgtaacgaccgggcggtgaaaacagccgatctgctgttcgggcgggcaaggccactggatgaaaccgccgcgggccgggcagccctgcagcagtccggtctggcacagggaagttcaccaggaaaattcatttctccggggaaaaagtaccctcagccgcatgtggcgctgccggcatttgataaaaacgggaaagccgccggtatctggctcagcccgctgaccgatcgggacggacggctggaggctatcggcggagagggacgaattatgggcaatgaagacgcccggttcgtggcgctgcagaacagccgcaacggagaaagcctgctggccgggaatatgggggagggcgtcagaatggcccgcgacaatcccgataccggggtggtggtgcggctggccggtgatgaccgcccctggaaccccggggccatgaccggcgggcgggtatgggctgatccggcgccggtgggtccggtaccgcaggccggggctgacattatcctcccgccagaggttctggcgcagcgggcggcagaagaacagcagcgccgcgaaatggaaaaacaggcggaacagactgcccgggaagtggccggggaggcgcgtaaagccggcgagccggcggaccgggtgaaagaggttatcggggacgtcattcgcggactggagcgtgaccggccgggtacggagaaaacgacgctaccggatgatcctcagttccggcgccaggaggcggcgattcagcaggtggcctcagaaactctgcagcgtgagcgtttgcaggctgtggagcgggacatggtgcgtgacctgaaccgcgagaaaaccctcgggggcgactgacgcgcctgcggcttgtctgccccggcagggcctccggttaacaccggacaccctgccggggtgcggaaaaaagagagaaggatacagagatgacagcacacacaatgggtttcagagccgctgaccgctggctgcaggcattactgacctggacaccgggtcagacggatatgattaaaacggtggccctggtcctgatggtcaccgaccatgccgggttactgctggcacacaataacgagataatgcggcttctgggacggggctgttttccgctgttcggtctggcatggggaatgaatctggcacggcacgcggaaatacgccagtcgcagctcaacagcctgtgggtctgggcgctggttgcccaggtgtcgtttatgctcatcgggtacccgtggtataccgggaatattctgtttgcctttgccgtcacgggccaggtcctgcggtgggtcagccagccgtcctggtattacaccctcccggcggctggactgctggtcgcctggatacccctgtcaaccgccagctacggcatggccggagtgggtatgctcaccgccagctggctgctttgtcgcgcacagcatgcaccggaacggctgggatacggtgtgctgtgggccctcatggtgttgctgatgaatatgaatgacgtgagtgaatcagtggccgggctggcgattgcgctgctgacgctgatggtgtgctcatctgccggagagcgtgtgaaacgcttctggccgcggcagttcttcgtgatgttctatgcggtgcacctggcggtactgggtattgtcgtctcaatgtgaaaccaagagcaggaaagggcgatgtcgttcaggtatagtagctcttattagctgaacgataggcaattgttatggcagaagaaaaacgccctgtactgagcctgaaacgaaaaccggcggagaacagtacgacccccgcagaggcgacccctgctcctggtgtggtgcgccgtaagaaggtcgtggtggtctcgtccccgccggcctggaaggcaaagaaagcgaaacttgagaaggttaaacaagtggccgaagccgccgcgcgcaacactgcgccggcgccggttaaagcggtaaagacgccacctccggtgcgttatcttcgcctgctgccgccggaacaggccattatgacgctgaaggctttctggccacagctgttcgacggaaactccccccgtctgctggtaacgggcatgcgcgaacagctgtttgccgatattgtgaagcgcgacctgccgctgtcgcataaacaggtgatcaagtgcctgaagagtctgacccggtctgcgggctatctgtcccggatgaaggtgggggcctcccgctatgatctgcaggggaatgccgtcgcgaccgacaccgcagaggaagcgcagtacgccagtgagcgcatgatgaaagaactcctgcgaacggagcgtatgcggagccagtctgctgactgaatacaatcggggagaggaaatggattttgaagcgcggaaacaaaaggcgctggcgataatggccagccgtaagatgtggaaaagcaattatgcaccgcttctgatacgcctgctgtggcggctggggataaagattccccctctgccgtttgctccgctctggcaggtttttggcgtgatgacagcctctttctccgtcggatacgggctgtggatgtactggatggtgtggcgggcccaggggatgtcccccctgttcgcttgtaaaatcagtcttatcgccggcgtgttatttggcctgacgatggcgttgtttcatctgtggcgccgaaaggtgaataaattacctgactggaaagatttataacggaatcagaagaacgccggaaacaggacttaccctggctgaatggcatgaattttcgcgctatgcacttgcgtgcatactcatgcatgccgtaaaaacagagcctgcgcgtttctggcgggttttcgggtggtttgttgcctgttttaccggttttccgtcagaaacgccctgaggccgttttagcggtgcgtacaattaagggattatggtaaatggtgacttggttaatcataaacatcctgggggatggcatacaccagctggatatccggtgcatcgttgagccatcgacctgattttttcatcaggtagccaccaatttcttcggtagtcagccgagcatgaaacaatgcttcatcattgaaccagcagtcagggtgatagatgagatccagtgggtttgccctgaaattaatctccagtaactggagtgcatagctgtggtcagatgcactaccttctgctttgcgtataaagttgataacgtcgttcagttctgtccatgtaaagtcatcaaggtatttttcctgattaagcgccatcctggtgaaatctagtgcacttgtccaggatgaaaaatcacgaaaatcagagaacccgcagggcatgacgacctgtgcattccagtctgccatcatctgttttagttcttcattgttttcgtccatcccgttatcgatgtgatcgagaatgccattcagctgactgaccagttctttcatctgtttacgggtgacccgtgcgggtttcattcgctcaggtaatggcatcagaaatactctcttttttatcgtgcactcgggggaactaagtaatctatcgggctatgaatcagagctcaaatcgtttttttttctttctgatgatccgcattcagcgcttttgtggctgtaggcccatcagaagcagaaaaagctgcacgagcggagaaggtagctaaggaaaaacagcaagcagaagaggctgcaaaagcattcgcagcgaaaacagcagcggcatccgccgctgcggaaaaagaacgtcagaatgcgatttctgctgcggctgctgcaggtcaacatcaaactgttcctgatgcgcgtaataatctgaatcaggcgactgctgaagcatcacgcctgaaaacagtggcagataatgcccttaatacagcgaagaataagcgaaaggaagctatcgatgccgtaccagtagcaactcaggctgagaaaaaatatcaggatctgcagcaaagcattaaaggcctcacgctgaataataacggccaatacggtacccaaaaatgggaggttatcagttcgaataaagagcatgaccactggggataccggttctatccatctgggatcacaaaagctcaggttgatgcagcgcagaatgatgcggtgaacaaacgaaatgctgcctccagtcttgccagccaggcaacggccgctgagcaggccagtctgcaggcatcagctgcctataatgctgcagaaacgcgccgtcaggctgcccaggttgcattagcgtccgcagaacaagccgccgctgcggcagaaaaaaacgacaggctgatgcagcagcgaaagccgctgaggaggccagaaccattgccgaaaaagcaaaagcgctgctggcccgtcgtacagccgcagataaactgaaatcttcagagattcaggctgtcaggggtatcccggctacagcggcaccttttgctattcctctgacctggtcaactgcgtcacgtggaggttttactctgtcggctgatgctgcggccagcctgggagctttcatcagcgaggctctggcgacgttacgtgtcgctgtggtggctaacccggtagcattaaccattgccggtcttgtgttatcgaaatcagttggcgtcggtagtgatatggtgcccggtcgggatatcagttcgatgatgcctggcgatgcgtttagtctgcctgataccgcggcattgaataaagcagcagatcagaaaacatctgtcagtatgccggttcgtggccgtctggttatgaatgatagcggcattctggatgttcagctggtcaaaaccaatactgccggtgccgtgaaggtcgctcgtgctgtactggataaggaaaccggctactggggctatactcttcccgttgtcgcagatgttccggcgcaaactatttttgtcagcccggctgacgcacctggtgcaaacggaccactgacgctaagcgggccggtaccactaccggagcgtattctgcataccggtgatcagatttcggcgccacaggctacagataaaaccgtgacgccggtagcggatgacctcgattttgaagatattattctggtgtttccaccggagtccggcctaaaaccgctgtatatgatgtaccgtagccctcgtaacatgcccggtacagtaagcggcaaagggcagaacgttggcaataactggatggggggggccagtaccggggatggtgctcctgttccttcccagattgcggataaattacgcgggaagactttcggtagttttgattctttccgtcgggcgttctggaaagcggttgctgacgattctgcactaagcaagcaatttagtgaagctgatattaatcagatgaaagctggaagggcacctactgcggactttttagaatcagtagggaaacgtgttaaaattgaattacaccacgaaaaagaaatatctcaaggaggggctgttatggatgtcgataacattaaggcgctaacacctaaaaatcatattgagacacataaaggaaaataaaatggctggtaataaaatttcagattttacggaagaagaatttactgcttttgttagtaaaataatcgctgctgattttcaaactgacaaagagaacgatgatgctatttattcgttcgcccaactaacagagcatcctgctggttggaacctcatcttcaagcctaaggtaggcgaagattcttcggcgaaaggaattgttaaaaccgtaaaggaatggcgagctgctaacggtaagccaggttttaaaaaatcgtgattgaatgtgcgggttcaggtgatgaatccgcacatttttaactctggatttgaagaataattactagatatccattattttttcctgtctccaaactgaccccatgatggatggtttatggctctgtccaagataccggcgacggacccgtctgctactggtttcggcataccacaaaatcctgacgcctccgcatggcgtcgttgtccaaccccgggaacggggaaaagccagtttcccccgctcccggcgtttcttaaacacccgttaaggaaatactgtgaaaaaaatgaaccgtacgctccgcagatgttgtctgtccgggcttatcagcctgtctttgtttgcaccttttccggttgtgtatgccgacagcatcgagacgggatattcgccggaaggaacggctctgcagctggtcctgaagactattaattctgcacagcaggaaatccggctgatgggctattcctttacctcacccgaagtcgccggcgcgcttgtcagggcaaagcggcgtggcgtcgatgtgaaagtggttctggactggaaagccaataccggcaagcaaaaccaggcgagtctggcggccatgaatcttctggtcaatgccggcatcccggttcgcacagtgtcgcagtacaaaattatgcatgacaaagtcatcattgctgatggccgcaatattgaagtcgggtcttttaactacacccgctccgccgatcgggtcaattcagagaacgtgctagtcgtgtgggatgttccagtcgttgctcaacgctatctgcagcactggtcgacccgctggtcgcagggaacggactggaaacgggcttattaacgcacctcagccataaaacgagcatcaatacggttcacttacgtccatgctaaagcgcctgaaccacccgtcgctcgtatcttacctcttaagtcttgcccctgaaggtactcatttttagttcaggatggggctactctccatctctcttacaagaggacatgggcatctcatttagttgaaatttgtacgccaatacaaatgacaatcttagaaaggatctcttgcaaattgaaagtaagttattgatttgcaggatctgagagttctgtagtatcctccgttccgaagacatttctgaggtgtcaggagagcgataaatgtcacgtccagcagataaaacaacttcctctgcgaatgcaaaacgtgcataccggaaaggtaagccaatgtctgccagtgagagacagcttgccgcgattgcgcggaaacgcgaaacgcataaagaagttaaggtttttgttaaaaacccactaaaggacgtgatgatagcggtttgtgaagaagaaggtctgacacaagcccagtttatcgagaggctccttgagcgagagcttacagaacgcggtcttttagatgtaaagacttcacattcttgatcatgtttatattgagtgctagattgttgatggtctgaataattttgggtgtgccacgccgtaaggtggcagggaactggttctgatgaggtatctacccgggaccagaaaagcaaaaaccccgataatcttcttcaatcttggcggaacgaaaagattaacggggccttcataaactgcatagaacgtgttgctctatgcagggagtatatgtacatgctcagaaaacttcaagatcagtttctgtgtcattcgctccttccgtgcaacataagcgcaggaagcggtgactgatatccttcaaaaccactattcacaagttaaaaacccgaacccggttttcacgccgcgagaagggaaaaagaccctgccgttctgccgtaagctgatggcgaaagccgaaggcttcacgtcccgttttgatttttccattcatgtggcgtttttgcgttcgctgggtaagcggcacaggatgccaccactgttgcgccggcgtgcaattgacgcgctactgcaggcaatgtgttttcactatgatccactggccaatcgcgtgcagcgctcgattaccaatatggccatcgagtgtggactggccaccgagtccaggagcggcaacctgtcagtcagccgtgccacccgggcgctgaagtttctggcggagctggggctcatcacctatcagacggaatatgacccgcagatcggctgtaacatcccgaccgatatcaccttcaccccggctctgttttccgcgcttgacgtttctgaggtggctgtggtggccgcgcgccgcagccgtgtggagtgggaaaacctgcagcgcaaaaagcagaaactgaaaccgctggagatggacgagctgatcgcaaaagcgtggcggttcgtgcgtgagcgttttcgctgctatcaggctgagcgtaaatctcacggccggaagcgggatactgcacggcgggatgcatcacggcagcgtcatgacatcgagacgcgcgtgcgtcagcaactgacccgcgaatacgccaccggacgcttcaggggagataaagaagcgctgaagcgtgaggttgagcgccgtgtgcaggagcgcatgctgctgtcgcgcgggaacaactacacgcgactggccactgtgcccatataacattaccttccttaaaaaatccggccggcgccggaggctttcgctcgcctgttgcccggctactacgtattatcttatcttcaggcctgcattcctcaccataattccggtcttcctggcgtcaacgtggccttaaatgttatcgccggcgtcacttctgacggccgatttctgttatccacatataactgcaagggagtatttcattaggctacaaccgtgatacgcacaaagcacatgccgtcggactttcaaggcgcgtggttccttttaaacaccagctctgtacctcttttaaagatcctttaataaatcctgtaaacacataacctgttcatcgcctgccctgtggacaggctcctgagaatggccgcccttgcagcgacctgacggtcgcgccggttcggtaacaccagtgagagctcccatcgcttcgcgacgggccccggccggagaattaaattagttacagcattcaaaaggaaatccatcataaaaccggcgccggtttgccagccaggagcccctccccaccactgaaaagcgccgccgcccccggccgaaggccgggagtagtgtcgcttttaatgatgggtgttgtaactactcttcttcatcgctgtaggtggagctgcggtcagttgtctggtacacgctcgtaagcggccctccggcccgctaacgcggagatacgccccgactgcggctaacgccttgccgggaccactccgaccgcgtacagaggctcctgagacgttttgagcgggtatggctttgcagctaccgtgttaagtttcctggtgtcgctgaaatagttgatgaacatccccctaagcgtcagcagcaagctgccgccgctaaggccccggaaatcacgccctttacgtcgtaaacgccgtaaagcccgctcaccggggttaaaagggattactttgacttcttcattgctgttagatggttaaggctaatcagggcagggggtagggtggcagaatttatagcccggtaaccggctacgccgggctttcggcgccatttgacgccacagacacatgtaacctcatctggcgcctccatgccgctgacgcggcatccagaagtttcccgatgctgtaagtcttaacgtctgctttgtgccaaaggcggaagtaactaacagcagtctgtgtgaaaatacggggagcaggtcagtcagagtgtaccgcagaagtctacttttcaaacgtacattttaataagtagaaaagttattgagtccagtctctgttgcctatatctttaacaaagataaaacatttgaattatctgttaaatgatatggctatcagacatgatgatctgagggcggtagcattccaaaaacaagagcagaagaggcggaagttcaagttgagcatgggcaaaacgatttcaagaaaaaaacgtctatctcagtactatacaaaccgggatgtggcagagttgcttatctcatcattaccatcagacgaagcaagtacaatcattgacttaagtgctggtgaaggctcgttgttgatgacagctgcgctcaaatacgacaacgcaaagctctacggaattgatattgatgatgaaaactgcagaaagttagacctattacaaaacacgacgagtatatgtttagatgcaacccattcagccagttttgataaaataaaggcacaaaacagtacatatggcatagtcattggcaatcctcctttttatacagctgaacatactgcctatacaaggttcttatttaaggagtgggcactaaatcataaaacaaaatattacagagctgaggttttgttcttaatgttatcgcttaagttgcttgatcgagacagttgttgtggaattgttgtacctgatacgatattttcaagcgagaaatataaaccactcagagaaaaaataacctcattatttaaatatatagatgttatagaattagataataaggcatttttgggaactgaagcaaggactcatattctcactgtcagtaacaaaaaatcaataagcccatcaataacaacaagaagttcaaaaaaaaataaagcgataaggcttaaaaaagaagagtttattgaaagggccgaccatcaatataactcttttaaatataacaataacgaaaaaacgattgaaacttcaggtataaaagttatgagagggaatatcagcaaaacgaaaaaaactcaactgcatgatgcgataatccattcatcttctttttataatgatttttctttatttgaaaataacaatgacagtgcagaaaatggttcagccgtacaggcggtgaaaggagatgttgttgtaccccgtgtaggaacaagatgtttggggaaagttgggatcatacgaaacggttctttttccattacagattgtgtttttgttatcaaagcttctgagtacgaatgtggtgaaatggttgccgcggcattaaaatcgaaatttggagtcgactggattaaaagtatttcgaaaggcattggagcgcagtacataacattaaatgacataaaaaaactacccctgcgataataacatcatgaaaatagatcatattacagcaagagatactgaagcgattattgaacaatccaaaaaattaatcaagattggttactgggataatgtaaaagtatcagtactgcaacgctggttagataatttcaaggatgaaaaggaaaaatatcttgcagcctctgtgttaagcgagttgatatatcgtaacagagaaactgttacatctatgggctataatatattctcaattattctcccacagatcttagaggagttagatatttaccatattgaggatattgaaaaatggatgaatgacatcaactcgccaaaacatgcaaggaatcttccgtttcgaacgtccgtaataaataatgtggatagtaaagtcactaaaagtggtgatgtaatacacacattcctacaaagagattttttcgataaaaacttaggggtaaaagttgaaaatatagaaaaattgccaccaagaatcaaagcgatagttttttttgatgatatgcttggttctggcactcaaattgacactttcatgaaagaaacaaatcttgatgaacttggaaagaaaataatattcattccatttgcggctctacgcgattcaacaataaggatacaatctaaatataaaaacctaattattaggcctgttgagtacttggatgaaaatcatagtttctttagagcatccaacaggagaataaatagagaatatttctatacacataatgatttcttaagattgtacattgatatatgtaataagaactcaataagcaatccattagggttcggtaatttggggcttagttatgtcttggcaaactcaactccaaataataatctttcattcctctggtttgaaaatgaaggatggaataggttattcaaaaggtaaaatatgaaatttaacgagattttttcgaaaaaccgtgccgaagaattacctgatgatctctatggtaaatatgttcttcccttagggtacgaagatgtaaatctaaaaaaaacgacaaaagcaagtatagttattggggggagaggatatggaaaaacgatgttcttaaagtatcattgccaccagacagctctaagtgtgaataaagatacgattggtattgaggatctttccaatctgggtatatattggcgcccggatacatcctttagccagttattaaccgaagcttggctcggaaaattttggtcaacagctttcaaaacgtacatgagtctatcgctgattattgagtttgttaaactaaccaataatttattgtccgaaaaatctcctgttttttcgttgaaagagaagattaataatctgaaattgccagatacaatttctgaaggtttgggcattgataaaaatgcgaaacttgttgatgttagcgatcttttacatgaaagactgtttactctttgcaattggataaatgccccagttactgaaacaccaccgttttctcttgatacaaaattttcattacagaatatcattagcaaactacatgcaataactggatgcattataaagcctaattttcaagtttacattgacgagttcgagaacttgacatcagaccagcaggcaataatcaatactttaatgaagcacggatccatgccgttactgttcagtgttgcctataagaaaaatgctaatatttcacataaaacgttaggcaacgaaagcattgttgagcagcatgatttcagatatatagacttagaagaactgtatctcaatgactttgatacatttgctggtgagatattagccctgcgcttttcagattatatagaaaacactgatcatgaaaaactccgttccatatttacgtcagaacatcaaatcccgcacagacaaacgaaggagtatcaggattcaattaaaaatctggccagtaagtttcttcctgaaaaatcgacaaaagagatatcacatgaaatattcagtgatgacgcattaactaaaaaattacattcaatgattgaaaccggtttgtctaaatcaaagtcaaaattgcaagttcaatattttatagatgataaatttcctgaggcaagcctgataaatggtgcattgctgaataggaaaagtattaccccagacgaggtgttagaacaatatttgcaatataaagcaggacatacaacaaaatataaatcatggatacctaacaatctcgtcggtgtaattctctatctttataataaattaccaaccagaatctgcccactgtacgctggctataaacagtttgtatatttatcaagagggaacatcagacattttctggagttatgtcaccagtcggtaacaaaaacaaatatcacgtctccactgccgccaaaaacgataccatccatgacaatcgaagctcaattagaggccaccctgaagacgagtgaactcgaaattgaaaaaataggagattttggtgctcatggaatgcatctaaaaagagtggctaaaagacttggtgcgattttcaactattgccaatctcgacgttctcagagcgaatcagaagtaaaccatttcactttagatttaactgatataaatcttcttgcttataatgttaaggaaatcctaaatgaatcattggtgtggtccgtgctgattgaacagaaaggaacgaagagtaaatcaactgacaacctggaactcaatgattacgtcttacatccagttcttgcaccatattttggaataagccacagaaaaaagaaaaaaataaaatttagcaaaggtgaggttgaaaccatttttgtaggtagtgatgaagatttttcatccttgttaaagaaatatggagcccggtgggatatcgatgactcatcttttgatgtttctagttcagtcacatcataccagttgggcctgttatgataaaattcaaacgtatcagaactcacaacaacttagattttactaatcgccatcatgacatttttttctatggtgaagagttagatgagagaactggcctggcgataaaaaaagtaaacgcaagcaatgcatttcaggttaaatatgtaaaagatgaatatgcattaaaactcaatggtaataaatacaaattgttagcattgaaggatgcattaatctctatgtcgcctaaaaaagtaataatagactctacttctcttgatttccctgaaatattgtatcttttttactccattaatatgattgaaggtatagaatcatttactgttctctacattgaaccgaaagaatacagtaagtcgccttcgactgagggcggggatgaggagtatcaattaagcgatggccgacagccattttcttctcttcccgtattttcactgaatacaatcacatctggcttacaaaaaaccagcctggtttcattcttaggatttgaaaactctcgtctaggccagattttaagtaatgatgatggggcaagcttcaataaattactggcttgtatatcagtcccagcttatatcccaggctgggagaacaaatcactcagaaagcatttattacatttcgacagcatggagacagatctaagaacctgtcctggtgcaaacccttacgccgtatatcagaccttattagatatatatgcagaaaacccaagactggtgctgacatccttaggtacaaagcctacggctatcggtatctgcgttttcttaattaacaatcatccaaataatagcgttgaaaaacaattgggagcaatatatgactatcctataaaatccatcaaccgtacaattggaattggtgagatttactcctacgaactatcaataagctaacgtcccgcctacgttcatacgtttgaagtgttcggtaccaccggctctgtgacagttcaagctcatcatcaaaatcttcggctacaggcctagttttattgtggagagtaattacggtgattgaataagtcgtgaaaattggcaacctccattcggcttgttccaactgatgcagagccgggctattgatccactcaaagagatggctcatgcatcagttgtattgttgtaaagccacaccgtcatattgtatttgaaaagaaaacgctttagtcaatcccagccttaataactgtttgatgttcaatataacgttctatacttgaaaagactatttagatgattaaaactgttataaatactggtatgtataacacgaagtcgaatgagtaaggtattttttgtgtgggatttattcattaagataatgctgctgttaccgattcccttgataactgtttttcccaacattattccttttctgacttatagacaaaatggtgataaaaacaaatccgccctgatggatacactagcccgagagatggataaacaacaaccctgtgcgtatcttgtggagtcatgcgtttctcgaccgcataacatccggccaataccttgggcgtttctgcgggtggtactacattacagtaattcgatggaaatcattcagctagtatcatctgggaggagaatactggcactgttgcaaatataggcttggagggagatggtaaatgttggcttcaccgggagcgaaacgacggtcagggatgttgtggctaagtggcgtaagcaggttaacagtcccgttatcgccccagttcgactcccctcagcatccagggtaagccgctggttaatgccctggcgaatgatcagaggagaagaaaactatgcatcccgcttcatcgaatcgatgtgccagaaagaaccgcaactgaaaatggcgcaacagctgtcgctcgacttctatcgaatgctgaaaacgaagaataaatcgcagttaaatcaatcgttcactgacgtaagtcaaagtgggctcattgaccttcagcgtgttgcggccagtatggaagcggatgcaacagcaatacacgaagcgataagcagcagatggagtaatggcgttgtggaaggccatgtaaaccgcctgaagatgctgaaacgacagatgtacggtcgagctggcttcgagttacttcgacgacgagtcatgagccctctggcttaaacaactccacctaagttgcggaagacccagttttgcaccgttggtaacaatgatgatatcttggacatgatcggatggatgagccctgaccggaaaaccaattttctgagtcattctgcgaatctgcgattttatgcattgtgctctgtggaagggttgaatagctatatagccccggaaaaaattaaggcgcagataaaggtttcacgtggtggaaaaggtatcagcaggttaatcagggtgctcgggaaaaatgagttcatccgaattgtgaaagatagccagacggtactcactatcggcatggacaattccattgcgactggctaggtcaattcatcgccgttgctgtcattaattccgggtttagcacaagagttgtttattagtttaaatattaataactggatgataattagatgaataatatcgagataattgaatcaggatacaatgcgttatgtgatgcttataataattccgttatcagtcttaagcgctcctccctatatgaagatttactagtccatatggatattcctgaaaaaaacaggagccgattcacttatgctactttgaatgatcgcgacgaaataatcgcaatatgtgtgtttattgtctctcttgatgagggaacaactgatgtaggatggtttgttagagcggactttagaggtaaaggggttggtagagatacagtagaaaaggcattcaacgagtttaagaatggtctcaagggggctggagttgaggctatttttattggcgccactgttgataatggtaatactccttcaatttcattggggcagaggtttataggcggagaagaaataatagaaaaagaagacgggactaccatctactcatacctcaatcgtttcacgctttagttaatgggagagggtcaatggaaagagtgagtacctatgtcatggggtagtgaccgggtagctgcgataactgccaacttttcatccctccaccttcacgcacaaacgaacgtatatgtgacaggtacgacatgctgataggctacatgcgggtatcgaaggcggacggctcccaggctaccgatttgcagcgcgacgcgctgattgccgccggggtcgatccagtacatctttacgaggaccaggcatccggcatgcgcgaggatcggcccggcttgacgagctgcctgaaggcgttgcgaactggcgacacactggtcgtgtggaaactggatcggctcggacgcgacctgcgacatctcatcaacaccgtgcacgacctgactgggcgcggcatcggcttgaaggtattaaccgggcacggcgcggccatcgacaccacgaccgccgccggcaagctggtctttggcatcttcgccgccctggccgagttcgagcgcgagttgatcgcggagcgcacgattgccggcctagcctcggcccgcgcgcgcgggcggaaaggcggccggccgttcaagatgaccgccgccaagctgcggctggcgatggcggcaatgggtcagccagagaccaaggtcggcgacctgtgccaggaacttggcgtcacgcggcagaccctgtatcggcatgtttcacccaagggtgagctacgtccagatggcgagaagctactcagccgaatttgatgccggcatgaggcaacgtagcgacagcgtggtttgtctcaatgggaagcgctcatgatcgatctttgaaggcccgcagcagtcgtgtcacagacaggacgaacaaaccggtcagcgtgagggctgcgataccccagtactctccgatgaacgcgccggccgtcgtgccggccagcacaatggcgagaatcggcaaatggcagggacaggtgagcacggccagcgcgccccacaggtagccggtgatcggtttgtgcgtctcggacggcaagcgctcggggctgttcatggcagactctccgcgtgctgtgccggctcggtcggcatggtggccaactgcacctccagatcggccaacgcttcgcgccgacgctcgacgaactggcgcagaacggcaagctgcgcggccgcttcatcgccgtccgcagcatccagcgcccggcacagccgcgccagcgcgtccaggccgatgcccgcctcgaaggccgcccgcacgaagcacagccgttgcaaggcggcatcatcgaacaggccatagccgcccggggtgcacgccaccggacgcagcaatccgcgcagcaggtagtcgcgcacgatatgcacgctcaccccggcatcaagggccagccgggacacggtgtaggcgctcattgaaaacctcctttttttatccagcgcagcaggaaagctgcttcacgtccttgttgaaggtctgcgccgcaagcttcaacccctcgaccattgtcaggtaggggaacaactggtcggccagttcctgcaccgtcatgcggttgcggatggcgagcaccgccgtctggatcagttcgcccgcttccggggccaccgcctgcacgccgatgagccgtccgctaccttcctcgatgaccagcttgatgaagccgcgtgtgtcgaagttggcaagcgctcgcggaacgttgtcgagtgtcagcgtgcgactgtcggtctcgatgccatcgtggtgcgcttccgcctcgctgtagcccacggtggcgacttgcgggtcggtgaacaccactgccggcatcgcggtcagattgagggctgcgtcgccgccggtcatgttgatcgcggcacgggtgccggcggccgctgccacgtagacgaactgcggctggtcggtgcagtcgccggccgcgtagatgttcgggttgctcgtgcgcatgccttggtcgataacgatggccccttgcgcattgacagtgacccccgccgcgtccagcgcgaggctgcgcgtattcggtgcccgaccggtggcaaccagcaacttgtcagcgcgcaattcaccgtgtccggtggtcagcacgaattcgccgttcacatgggcgacctggctggcttgcgtgtgctccagcacctcgatgccctcggcgcggaaagcggctgtcacggcctcgccgatggccgggtcttcccggaagaacaaggtgctgcgtgccaggatcgtgacctggctgccgagccgggcaaaggcttgcgccagttccaacgccaccaccgacgaaccgatcacggccaggcgtgcgggaatggtgtcgctgacaagcgcttcggtggaagtccagtagggtgactctttcaggcccggaatcggcggcacggccggactggcaccggtggcgaccaggcagcggtcgaacgttacctcgcgctcgccaccctcgttcaaacggacgaccaggctctggtcgtccttgaaacgcgcttcaccgtgcaaaacggtgatggctggattgccgtccaggatgccttcgtatttggcgtgccgcagttcatcgacacgggcctgctgctgggccagcagtttgctgcggtcaatcgcaggcacagttgccgcaataccgccgtcgaacggactttcccggcgcagatgggcaatatgggcagcgcggatcatgatcttggacggcacacagccgatattgacgcaggtgccgccgatggtgccgcgttcgatcagcgtgaccgtcgcgccttgctcgacggccttcagcgccgccgccatcgcggccccgccgctgccaatgatggcgatatgcaaaccggcgccctcaagtgcatcacggatttttggttcatctttgaaatcaccaacccggatcgagccttgataacccaatgcggcgatggcggccagcagttggttgtggctcacggcggtgtctgccatgacttgcgcgcggctttctggataggacaccacagcggcattcacgccgggaatcttttccaaagcatctttgacatgggtggcgcaggatgtgcaggtcatgccattcacggtgatttcggtcatttttttactccattgaatttcggggtgcagcaggcatcggcttggcgttttcgttggatggcgtagatggtcaagccgatgaaaatcgccagcgcaggcagcagcacatagtccagatagccggtcagcgcggacaagccgaccacaccgagcaaaatgaccagaacaggggtgaagcaacacagcgccacgagggttgtgccaatgatgctgacccgcagcagtgtcttcgggtctttcatgatcagttcttgactgatgatgggtagcccgcatcctcggtagccttggtcagtttctgcacgctggtcttggcatcatcgaaggtgaccaccgcttcgcgcgtctcgaaggtcacgtcaactttactgacgccatcgaccttggaaatcgccttcttgacagtgatcggacaggccgagcaggtcatgcccggtacggacagcgtaacggtctgggtggcggcccacacgggggcaacaacggcagcgagggcaagggcggaaagcagctttttcatggtgaactcctgtgatcaatagaaaaatggcacgacgtagggaaatccgagcgcgaccaaaaccagcacggccacgccccagaaaatgagcttgtaagtagctcgcacttggggaatcgcgcaaacctcacccggtttgcaggcggctgacggccggtagatgcgccgccaggcgaagaacaacgccaccagcgccacgccgataaagatggggcgatagggttccaacaccgtcaagttgccgatccaagcgccgctgaaccccaaggcgatcagaaccagcggcccgaggcagcaagccgaggcgaggatggcggccagcccgccagtgaagagcgcgccgcacccgttttgaggttcagacatacgtttgtcctttcgaatctgaattggatagcttaagcttacttccgtagttatgtacggagtcaagcgatatggaaaacaatttggagaacctgaccattggcgttttcgccaggacggccggggtcaatgtggagaccatccggttctatcagcgcaagggcttgctcccggaaccggacaagccttacggcagcattcgccgctatggcgagacggatgtaacgcgggtgcgcttcgtgaaatcagcccagcggttgggcttcagcctggatgagatcgccgagctgctgcggctggaggatggcacccattgcgaggaagccagcagcctggccgagcacaagctcaaggacgtgcgcgagaggatggctgacctggcgcgcatggaggccgtgctgtctgatttggtgtgcgcctgccatgcgcggaaggggaacgtttcctgcccgctgattgcgtcactgcaagggaagaaagaaccgcgcagtgcggacgcggtgtagcccgagggaactacgccttagcgtgctttattttccgttttctgaggcgactccaacgtcagaaaagaccgtgcggtcgacttttgatatttcgtgctgtcgccttctgaaagtgacatcgggatcctcggccgacaaggtgcaacagccgacgatgccgtcgctgcaactcgcgactaggagctcggatctcaggacgaaggtctccgcgaatgtccggtcgatccgcgcgacgtcccaggcgggcgttcccttggcggacatccacgccgcagcgtcgtgcatcagccgcacaacctcgtcgatatcacccgagcaggcgacccgaacgttcggaggctcctcgctgtccattcgctcccctggcgcggtatgaaccgccgcctcatagtgcagtttgatcctgacgagcccagcatgtctgcgcccaccttcgcggaacctgaccagggtccgctagcgggcggccggaaggtgaatgctaggcatgatctaaccctcggtctctggcgtcgcgactgcgaaatttcgcgagggtttccgagaaggtgattgcgcttcgcagatctccaggcgcgtgggtgcggacgtagtcagcgccattgccgatcgcgtgaagttccgccgcaaggctcgctggacccagatcctttacaggaaggccaacggtggcgcccaagaaggatttccgcgacaccgagaccaatagcggaagccccaacgccgacttcagcttttgaaggttcgacagcacgtgcagcgatgtttccggtgcggggctcaagaaaaatcccatccccggatcgaggatgagccggtcggcagcgaccccgctccgtcgcaaggcggaaacccgcgcctcgaagaaccgcacaatctcgtcgagcgcgtcttcgggtcgaaggtgaccggtgcgggtggcgatgccatcccgctgcgctgagtgcataaccaccagcctgcagtccgcctcagcaatatcgggatagagcgcagggtcaggaaatccttggatatcgttcaggtagcccacgccgcgcttgagcgcatagcgctgggtttccggttggaagctgtcgattgaaacacggtgcatctgatcggacagggcgtctaagagcggcgcaatacgtctgatctcatcggccggcgatacaggcctcgcgtccggatggctggcggccggtccgacatccacgacgtctgatccgactcgcagcatttcgatcgccgcggtgacagcgccggcggggtctagccgccggctctcatcgaagaaggagtcctcggtgagattcagaatgccgaacaccgtcaccatggcgtcggcctccgcagcgacttccacgatggggatcgggcgagcaaaaaggcagcaattatgagccccatacctacaaagccccacgcatcaagcttttgcccatgaagcaaccaggcaatggctgtaattatgacgacgccgagtcccgaccagactgcataagcaacaccgacagggatggatttcagaaccagagaaagaaaataaaatgcgatgccataaccgattatgacaacggcggaaggggcaagcttagtaaagccctcgctagattttaatgcggatgttgcgattacttcgccaactattgcgataacaagaaaaagccagcctttcatgatatatctcccaatttgtgtagggcttattatgcacgcttaaaaataataaaagcagacttgacctgatagtttggctgtgagcaattatgtgcttagtgcatctaacgcttgagttaagccgcgccgcgaagcggcgtcggcttgaacgaattgttagacattatttgccgactaccttggtgatctcgcctttcacgtagtgaacaaattcttccaactgatctgcgcgggaggccaagcgatcttcttcttgtccaagataagcctgtctagcttcaagtatgacgggctgatactgggccggcaggcgctccattgcccagtcggcagcgacatccttcggcgcgattttgccggttactgcgctgtaccaaatgcgggacaacgtaagcactacatttcgctcatcgccagcccagtcgggcggcgagttccatagcgttaaggtttcatttagcgcctcaaatagatcctgttcaggaaccggatcaaagagttcctccgccgctggacctaccaaggcaacgctatgttctcttgcttttgtcagcaagatagccagatcaatgtcgatcgtggctggctcgaagatacctgcaagaatgtcattgcgctgccattctccaaattgcagttcgcgcttagctggataacgccacggaatgatgtcgtcgtgcacaacaatggtgacttctacagcgcggagaatctcgctctctccaggggaagccgaagtttccaaaaggtcgttgatcaaagctcgccgcgttgtttcatcaagccttacggtcaccgtaaccagcaaatcaatatcactgtgtggcttcaggccgccatccactgcggagccgtacaaatgtacggccagcaacgtcggttcgagatggcgctcgatgacgccaactacctctgatagttgagtcgatacttcggcgatcaccgcttccctcatgatgtttaactttgttttagggcgactgccctgctgcgtaacatcgttgctgctccataacatcaaacatcgacccacggcgtaacgcgcttgctgcttggatgcccgaggcatagactgtacaaaaaaacagtcataacaagccatgaaaaccgccactgcgccgttaccaccgctgcgttcggtcaaggttctggaccagttgcgtgagcgcatacgctacttgcattacagtttacgaaccgaacaggcttatgtccactgggttcgtgccttcatccgtttccacggtgtgcgtcacccggcaaccttgggcagcagcgaagtcgaggcatttctgtcctggctggcgaacgagcgcaaggtttcggtctccacgcatcgtcaggcattggcggccttgctgttcttctacggcaaggtgctgtgcacggatctgccctggcttcaggagatcggaagacctcggccgtcgcggcgcttgccggtggtgctgaccccggatgaagtggttcgcatcctcggttttctggaaggcgagcatcgtttgttcgcccagcttctgtatggaacgggcatgcggatcagtgagggtttgcaactgcgggtcaaggatctggatttcgatcacggcacgatcatcgtgcgggagggcaagggctccaaggatcgggccttgatgttacccgagagcttggcacccagcctgcgcgagcagctgtcgcgtgcacgggcatggtggctgaaggaccaggccgagggccgcagcggcgttgcgcttcccgacgcccttgagcggaagtatccgcgcgccgggcattcctggccgtggttctgggtttttgcgcagcacacgcattcgaccgatccacggagcggtgtcgtgcgtcgccatcacatgtatgaccagacctttcagcgcgccttcaaacgtgccgtagaacaagcaggcatcacgaagcccgccacaccgcacaccctccgccactcgttcgcgacggccttgctccgcagcggttacgacattcgaaccgtgcaggatctgctcggccattccgacgtctctacgacgatgatttacacgcatgtgctgaaagttggcggtgccggagtgcgctcaccgcttgatgcgctgccgcccctcactagtgagaggtagggcagcgcaagtcaatcctggcggattcactacccctgcgcgaaggccatcggtgccgcatcgaacggccggttgcggaaagtcctccctgcgtccgctgatggccggcagcagcccgtcgttgcctgatggatccaacccctccgctgctatagtgcagtcggcttctgacgttcagtgcagccgtcttctgaaaacgacagcgcggcacgggaatcaaggcattgcgattctcgaaaatagttcttgaaattctattcttgattgcatatcatctcaacgagtttcgataagaaaggatgcgcatgcgaccgtctgttgtgcttgacatgaagcgaagcgcagtgcgtgaagcggtaggccgctttcgcgccgcgaacccgcgcgtcttcggctcggtgctgcatggcaccgaccgggatggcagcgacctcgacctgttggtcgatgcgctgcccggtgccacgttgttggacttgggcgatttggaagaagaactgaaatcgctgctcggcgttgacgtcgatctgctgactcccggcgacctgccgccgaagttccgggccaaggtgctcgcggaggcgcaaccgatatgagcgagaaccgcctgcccgattacctcgaccacattcagcaggccgcaaccgatgcgcgcagcttcgtggaagggatggccaaggacgacttcttggccgacaagcgcacccagcaggccgtcatcatgagcctgatcgtcatcggcgaggcggccacaaaggtgatggatggctacgtcgagttcacccaggcgcatgccgacgtgccgtggcgcagcatgcgcaatatgcgtaatcgcatggctcacggctatttcgacatcaacctcgatgtggtgtgggagacggtacaggaatggctgccggcgttgctccagcaattgcccgccgtgcgtcaggatgccgacgatgaagaccgtaacgacaactgtgaaagagggatctccgatgactgttgaatcgagaatattttctgtagccgagtatgttcagccgtccgaaggcgagcctattcgttccgttgtgcttgaaacccgagactcaattatcgtggtttggcatgtccatcccgggcaggaaattgcggctcacattcatcctcacggccaagacacgtggactgttttgtcgggaatggctgattactttcagggcaatgggattgttcgtgccctcagggaaggtgagatagccgtggcaagaccgggccaagtgcacggggcgcgaaatacaggtaccgagccatttgtgttcgtctcggttgtggcatcagccaatgccggtttcgtattggctgagcgatagagcccaatctctggagttggtccaatgagcggtcggggagataggtaacagacatgcagcggacacggctgctaaaccaggtcgcaaacctccttgcgtcgcagcgtgccgcaagcgacgcgatcaatcgaatggggtcggcatgagactgaacaccatccagttcccgaccgcgtagccgcctgtcctgccgatcaggtcttgaccatcgacgcctgggatcagtcctgaatgttcttggagaccactacgttatgagccgcagccgccgcaaaacacccatcgtcgggcacacgacctgcggcagcgagcgcgaggacaagaagctctggcatcagcgctggcgcacccgtgagcgcacggcgctgaccagcgcgtcgcccgaagccctgagcgcccatctgcccctgctggaaaaccaggccagcagcgtctggtcgatgggcaaggatggccgctcctactggcccgtcaagcgccaggccgccacggcggatcgcatcgccaatcacaagggacgcaacccgcaagaacgcgcctccctgaaaaagcgcctgctgcgcaagtggatgagcaaatgaagctctccttccatcagcacattgcgctgttctggatgatcggtgctccgggcgtcttcgcgcccgtgatcgagaacgccaagcggcccgatgccggcgccgtcatggcgtggggtgtcgcgatcgtggcggtgatgatcctcttcacccctttgctgctgcgctgtccaccattccggcgctggtatggccggacggatgcgctgtcggagcggcagcgccaggcgcttgccgagcgcggcctgcgccgctactaccagaccgctttcgatgacggctacgtgccccgcgtgatgccctacgtgtggcgcatcatctggacggtcggcgggttgatggctgtgaccgccgtactgcctaccaacaccggacggccagccttcgatgccttggtggtcttctcgacctggtatccgataggcgtgatgctgctggttttcgcgtcgaggccccttggccggttgattcgccaaagagcacaggagcggcggaaatgagcacgtcaaccatcgaggcgctggccagcgcctgggcaaggattgccgaggaagcggaattccccgctgactacgaggggactgccacaccacaagcgcatcgggctagcgaagctattcaggagcagattcgggagcgcatcgtcgccaccaacgacatgcggctgttcagcctgctgcacctgctgggtcaggcgtcgctgcgcatggagcaagcgctgtggccggaggattacgagcggatgacgcgcgaggttgaggaagccctgcggcaagccaccgacgccaacgccagatcgtacacccacgaagaagtgatgcaggcgatgcaggaacgcatcgaccgggcgcgagacaagccatgttgattggctatgcgcgcgtctcgacgcaggatcagaacctggagctgcaacgcgaagccttgagcaaggccggatgtaaaaaggtcttcgaggacaaggtgagtggcacgcgggcagaccggcctggcttggccaagacgctcgaaatgctgcgcgaaggcgatactttggtcgtctggaagctcgaccggctgggccggtcggtcaagcaactggtcgatctggtcggcgatctgcacaagcacggtgtccagttcaggagcctcaccgactccatcgacaccggcacaccatccgggcggttcttcttccacgtcatggcgagccttgccgaaatggagcgcgagctgaccgtcgagcgcacccgcgccgggctggaagtcgccaagcagctcggccgcaaaggcggccgcaagccgaagatgaccgacagcaagatcgagtcggccaagaagctgctggccagcggggtgccgcccaaggacgtggccaagaacctcggcgtgtccattccgacgctgtaccgctgggtgccagcctccacgcacgcttagcgtgctttattttccgttttctgggacgacccccgtcacagggaaaaaccctggccgtcaggcaggtcagcggcggctcacagtcgttcaacgctgtaaatcagatgcgtattcttggacgctggatgcggatgatcaccatcccgaatcagtcatccgtggcaaaagcctgggccgagtttgatgaggatggccgcatgaagccttcttcgtattatgaccgcatagtggacgtcatggaggaactgatgaagttcaccctgctgacgcgcggtcgcagtgattatctcaccgaccgctacagcgaaaggaaagagagtgccgcgcagctttctgagcgggtcaaccagcgcagcatataaaaaagccggcagatgccggctttttccacactgttatgcccgcagcctggtaaaaaatcagtggctgacgcggttcccgtgctcatcaatgacggcttcgccgtcctctttggtaaacgcgccctgctgcgggtccggcagtatgtccagaaccacttcggagggacggcacagcttcgtgccgagcggtgtcactaccaccgggcgattaatgaggatcggatgagccagcatggcatcgagcagttcgtcattgctgaagcggtcttctgccaggccgagctgttcgtacggttcggtatttttgcgcagcaggtcgcgcacgccgatgcccatatccgcaatcagcttcttcagctcatcgcgtgacggcggcgtttccagatacagaataaccgtgggttcggcgccgctgttacggataagcgccagggtattgcgggatgtcccgcaggccgggttgtggtaaatggtaatgtcagtcataagcggtactccgtaaaggggctgcacgggcgcagccccggggttaaagttaaacagacaggcgcagggccagcgcggccagcgtgacaaaaagcaccggcagggtcatcacgatgcccacgcggaagtaatagccccagctgatggtgatgtttttctgtgccagcacgtgcagccacagcagggttgcgaggctgccgataggggttattttcgggccgaggtcacagccgatgacgttggcgtaaatcatcgcctgcttcaccacgccctgtgcgctactaccgtcaatcgacaacgcgccaaccagcacggtgggcatgttgttcatgacggacgagagtgccgccgtcaggaagccggtgccgagcgttgcgccccatacgccgtgctctgcaaaccggttcagggcggcggaaaggtaatcagtcagtccggcgttacgcagtccgtataccaccagatacatgcccagcgaaaagataacgatctgccagggcgcgcctttcagcaccctgccggcgtcaatcacgtgtcctttgcgggcaaccagccagagaataaacgccgccaccgccgccaccaggctgaccggcacgccgagcggctccagagcaaaaaagccaaccagcagaagaaccaaaaccacccagccagccttaaaggttcgtgcatcccggatggcttcccgcggtgccttcagcttcgccaggtcataggtgaccgggatgtccctgcggaaaaagagatgaagcatcaccagcgtggccgcaatggaggcaatgttcaccggcaccatgacggatgcgtactcgctgaagcccagcgtaaagaagtcagccgttacgatgttcaccaggttcgatacgatgagcggcaggctggaggtgtcagcgataaagcccgctgccatcacaaacgccagcgtggagccgggagtgaatcccagcgccagcagcatggcaataacgatcggcgtcagaattagcgcggctccgtcattggcaaacagcgccgccactgcggcacccagcagaacgatatacgtgaacagcagccggcccctgccgcctccccagcgggaaacgtgcagcgcggcccactcaaaaaagccggactcatcgagcagcaggctgataatgatgaccgcaatgaacgtgcccgtggcgttccagacaatctgccagaccaccggaatatcaccgatgtgcaccacgccggtcagcagcgccagcgccgcaccgatgacggcactccagccaatgctcagccccttcggctgccagatgaccagtaccagcgtcaggatgaaaatcgcacctgccagaaacatacccgctcctattgaatacaaatgcctgttaaaccggactgataaattttcgatgcgtaatatattcgataatccagatatataccggtaaatttttaaatgcagacaggcttgccgttggtggtggcgttatcgcgttcagcctgccggctgagctggcggatatcatcccgctggcagagataagcctgttcgataaccgccgctgcccacgccggcatatgaggcgacagacgatagtggatccattttccgtcccgccggtcggtaagcagcccgttttctctcagcagagccagatgccgtgagattttgggctgagtttctttcagcacggacgtaagttcacagacgcagagctcccctttttcgcgtagcagcagcacgaggctgagtcgggtttcgtcggaaaggcttttaaaaagctgcaggggggacacgggtggcatggtgactccttattgtgactgacctgagtgtacctgtgaaactttctccgtcaaatttatattcacttaatcatatgtatgtgcgaacgccggacgagcctgagcatgcagaaggactttccgtccggatgcgcctgaccggcattccatgaacagcgtttttgccctgcgcgttgaccccgttaacaattcgtgtagagtaaaaagcgctttttgccgtggttcatctgcccggcgggcatttgtggccggtactgaacgtctgttcatccggtctttctgattacccgcgctgctctgtcagccgtgaaggagtgataaacaccaccatgcgtcttacgccaccctgagtcgtacccctcctctgtcgcactgaataaacttcggcgcgcactcaaaaacatcccgtctgcggatgtgctttttcgtacgtaaaatttttgccctcacgggctgaccgtaatcaaaaactgagaaatgactatgctgctgtcctcgacgcgtaaggactggctgggtaacgtccgtggtgacgtccttgccggtattgtggtcgcgctcgcgcttattcccgaagcgatcgccttttccatcatcgccggagtcgacccgcaggtcgggctctactctgcgttctgtattcccctggttatggccttcctcggcggccgtccggcaatgatatcgtccgccaccggtgcgatggcgctgctgctgatcacgcttgtaaaagaccacggcctgcagtatctgctggcggcctcggcgctgaccggcgtactgcagctggcggccggctacctgaagctgggcagcctgatgcgctacgtctcccgctcggtggtcaccggtttcgtgaacgcgctggccatcctgatatttatggcgcagctgccggagctgaccaacgtcacctggcacgtttatgccctgaccgctgcgggcctgggcatcatttatctcttcccgtatctgaacaaaaccattccctcgccgctggtctgcatcatcgtgctgaccgccatttccatgtggctgcacctggacgtgcgcaccgtgggtgacatgggcaaactgccggacagcctgccggtgtttctgatcccggatatcccgcttaacctcgacacgctgatgattattctgccgtactcggcaggacttgccgtggtggggctgctggagtcgatgatgaccgccaccatcgtggacgacatgaccgacacgccgagcgataaaaaccgcgagtgcaaggcgcagggcgtggccaacatctgcacctcctttatcggcggcatggcgggctgcgcgatgattggccagtcggtgatcaacgtcaaatcgggcgggcgcgggcggctttccacgctcaccgccggcgtggtgctgctgctgatggtggtgttcctgcgcgactgggtgtcccggatacccatggcggctctggtggcggtgatgatcatggtctccatcggcaccttctcctggcgctccatcagcaacctgcgcagccatccgctgtcaaccagcgtggtgatgctggccaccgtggtggtggtggtggcgaccgataacctggcgtttggcgtgctcaccggcgtgctgattgcctcgctgaacttcgccaccaaggtcgcccgctttatggcggtctcctctgagctgaaggacgacacccgcacctataccgtagccggccaggtattctttgcctcatccgatcgctttatgagccacttcgacttccgtgaagcggtggagcgcgtggtgattgacgtaacgcacgcccacttctgggatatcacctccgtgagcgcgctggaccgggtggttatcaagttccgtcgcgaaggcacggaagtggagatcaagggtatgaatgacgcgacccgcaccctcgttgaccgcttcggagtgcatgacaagcctgaagaagtggaaaagctgatgggtggccattaatttactggagaaagcatcatgaataacaccgttattgcctgcgttgacggctcgccgtcaacccggccggtctgtgagtatgctgcctgggcagccggtaaacttggcgcgccgctggcgctgctgcacgtgctcgaaaagagtgagactcccgccgtgtctgacctgaccgggagcattggtattgacagccgggagcagctgaccgaagcgctggtccgcgtcgagggtgagcgcagccggctgctgatggcgcagggcaaggccgtgctggccggctgtgcggagctcctgaagcagaccggacagccggacgcacagctgctgcaaaagcacggcgcactggacgaaatcctggcggagctgggcgaagtccggctgatggtgctggggcgccgcgggacgcagaatcaggtaggcagccatctggaaagcgtcattcgcctgcagaaaaacccggtgctgattgtgccggagacgtttacgccgccggcgcgggtgatgtttgcgtacgacggcagcagtgagagccgtaaaaacctgacgcgcctgacggtcagcccgctgctgcacggcctgagctgtcatatcgtgatggtcaacggtgacatgtcagccctgcaggatgcgcaggctgttcttcaggaagccggtatcacgaccgagacacgcctgctggaagacgagtccgtaaccggggcgctgtgccgctacgcggacgcccatgatatcgacctcacggtaatgggggcctgcgggcactcccggttacggcgattctttattggcagccacaccacggaaatgctgtctgaaagccgtcagcccctgctgatgctgcgatgaaacaggcgggcctgatatcaggcccgccttcacaggggaaagaggatgacgggtatgaaggtaaaggcgcgttattgcggcgcatccgtcctgataccggtggccagcaggctggcgccaagaatgtagaccaggcagaacagggcctgaagatgcagggtgacatggttatctatcagcacgcccatgattaccggggatgccccgctggcaatcaccgtccctgcctcaaccgccgagcgcaccctggccagctgcgccggaccaaacagctgtacccagagcgcggtggcaagcgttgaggcaatggccgacgatacgccggtcataatcaggtaaaaaggcgtcacccactgaccgttgctgagccatagcgccagcatggccagggcctgtggcatcagaaaccacggcagcagcctgcgtggtgagagccggtcaatcagcgggccaaacgacagcagcgataccgcctgggtaatggcataggcaataaaccataccgccacccacgacagctcccagcctttctcctgtgccagcctcgcctggtggaagaagaagccggtggtgataaagggggaggccagcacgacaggcagcgccagcagcaggttgcggtttcgccataccggcgcctctttttctttctcctcaccccgctttctgaacgtacgcagcggcttctctttcccgcggggcaaaaacatcagcgcgacccccacgccggcaacaagcattccggcattgatgccccaggcagcgcgccatcccgtcagcgcgcttatctgcaccgcaatcacaggaaaaacggcctgcgccagcgagagccccagcgcgatggcgccgagcgccttgcctgcatcaagggggaactggcgcgccgttgcggtcagcgcagtatgcaccatcagtccctggccgccgaggcgcagaaagtaaaacccgatgcacagcatccacgccgcctgtgcgccggaaaccagcaggcaggccgtgagcagcaaaagggtgaccgccagcgtgaagcggcgggtcgtggtgtagtcaatcagccgtccggcccaggtcagcgtgatggcgctcatcaccgttccgattgcgtacaggccgcccagtccgccgtcggtgagcccaaaggcctcacgaaaatcctgcccgtaaagtgagacaaaataggtctgtccaaagctggacatggccatcagcatcgcaccgaacgtaaggtgagaggcgtgatgaaacataaaccgaaaaagctgacgcatgaatatccctgaaggcgggctgcagcccgccgattaatcacgacgtgtccgtaccggctgctgcggacacggcgcctgcgtccctgaagcaggtacacgcgggttcaccgtgaaaggtggcagtcccgtaacggatatgagagaacggtacccggcgcggactggctgtcgcggcaggctctctgataaaggacgggcgaagagaaactcagggtggcgtaatgtgcatgactcacagtcagatataaaatgctgccgaaacgataatttttaatgctcttcaggtcaagcctgaaaacgggctcctcatgcccgccgcagggggagtcgcacaaaaacagtggatagccgcttgattaacgcccgtgaccgggccagaattgcggcgaggtgatggcgttccaccttacccaaccgcttcccctgagaagctgatgacgcctgatattactcccctttaaccgggagtaggctttgttgaataaatcagatttcgggtaagtctcccccgtagcgggttgtgttttcaggcaatacgcacgctttcaggcatacctgctttcgtcattttgttcagcgctcgtaccagggccat

SEQ ID NO: 142 - DNA, 94632 bp, Unknown
  source: /note="Description of Unknown: MKP2_2161_1 Mutant Bacteria sequence"
gggtaaaagtagtattgaagatattcagccagccgcgcatgggggccagcttttccagggcgccggtaaagatctgcacgcagccgcgattgccgacgaaaatcatgatttcattgccctcctggcgcaccgtctccagcagcgacggcagcgcatggcgatccacgcggcaggcgaggtcgtcgctcaccagacggaaggcctgctggcgggaaagctgatatttacgcagcagaccgaagaactggtgaacgtcggtcatcgcgcgccagtcgttctccagggcggcgccgtcggcggtatcggcatatttcaccggctccagcgggcgcagggtcagcggtgccggcgccgccacccgatattccgcgatcagggtctcccaggccgccatgtcggtctgcgtggtcgcatagactttcagcagggcgtcgccgtggtggtcgaaaaactggatgctctgacggccattatcgttcagatggaaggcgctggcccactggctgaggaacagacgcaggtcgagcgcgcgcgggttcagcaccagcccggcgtggccgctgaggtgctggtgcgtgaactggcccacctgctcatgcacggcatactcgttgcggcagatgcatttggtttcgccgacgcgctccagggcggcaatcagcgcccgggcgtcatcgctcaggcgcacggcatcatgaccgaggcgggcggcggtcagctcggcttcgctgatccccatttccgcggcgatatcgcgggcatatttcgcggtactggccgctttggtggcctggtagcgctgccacaggtcagggtgtgcatttggcataatcatatccttctcgacgatgaatatccccggccggcgggccgggggcaggtgcgttattattcgggcaatcagaagtcgacgttgacgcccagctgccaagtgcggcccggcatcaccgccagcgctttatcgttggcgtcctggttggtgccggtctcgatattgcggctgctcaggtaatcccagtatttacgatcggtgaggttgtagaccccgccattgaggcgcacgtttttcgccacctgccagtacgtggtccagtccagcatgccgtagcccggcacgcgcatatagtcgctgctggcatcggtgatggcggatccgctgttgctgtagctttcgcggttggtggcggtcgcctgtttccctttgacaaaggtcgccgtcagggcggtgccgtagcgtttcgccggatcgtcccacgccacgccgacgatggctttcattggcgccacgctgtcgaggtcgacgtatttatcgccgctgtagctggatttcgatttcccttcgctatagccgagggcgagggtggcgctcaggccgtccacctgctcaaaccaggtgccaaagttaaatttggtgctaatctcaccgccgtagatataggctttatcgcggttttccgcctgataaatggtgtagatgttcgacggcacattcgtgaactggcccggattgttggcgcgggtatagcgggtataggcgataaagttcttatagctgttgtagaacagcgccgtgcgcagggtgatgccttcggtaacttcccctttcagcccccactcgagattatcgctggtttccgtcttcagatcggtattgccgatcagggcatactgctggctgccggcgtagctggagccgaggttccaggagccatacagctggctggcgttggggaactgcgccccgcgctggtactgcaggtaggtcatcaggcgcggggtgaggtcgtactggaaggtcaacgacggcagaacctgggtatcgctgtttttgccgtacagattcgccaccgacgattcgctcagcacgctgctgttggcggcgagatcggacagattttccggcttagtcgattgatgcaccacgcgcacgccgggaataacggcgaagttgtggctgtcgagatcgaagttgatcttatcctggacaaagccgccgagggtgtagctgcggctgtctgcctccggctgcatgatctcgctgtaaacgctggggatcggcgactggctgaacggccgctgggttttgctggtgctggcgttgaaaccggcgctcagatcgtggcggcccagggttttcgccagcgcggtctgcaggccccaggtgtcggtatcgtagttagagttcaccgtctgcattttgcgggtgacgctgtccggcatataagtccagtcatgggcttcggtatgctggtagtagatttttgtggagacgctgtcgaggtagtcgttcatcggcgtccagtcatccttcaggctcaggccccagcgccgggtctggctggtctggttggcggtgccgatggtgctgttgccgctggagtcccaggtatcgtagtgggtgtggttggttttatggtaatagtcgaaggtgctggtcagcttgtgctcatcgttaggctgccagatcccggaggccagaaaagcatcggagtgccagttcgccgggtaggcgtcgacggtgccgctgttgttttcggtttcctggccgtcacggcggctatagaccaaaatcccgcgcaggaactcatcgccgccggcgacggtcaccccgttgtgccagctgcgatccgcagagtcgtaaccgctgcggtagccgaaggcgctggtcttgcccgggcgcaggtaatcatccgctgatttcgggcggaaggagacattccccccgatagcgctgttggccgtttccgtcgaggtggcgccggactggatatccacgctgccgtacatatacgggtcgatataatcgcggccgatgccgaaggtgttgagcccggcgcggccgacgtagccgcggccggtggcgttgggttgcgcgataccgtccacgtcgatgcctacgcggttgctctccataccgcgaatgttgtagccggtgtaacctccgcggtcgaagccgcttttgccgttgccggagccgccgctggccccggtggcgctgatgagcggctcatagcgcatgattgagccgaaatcgttagcgcctttattctccagctcccgggcgctgatgctgtgttcgctaccggctttctgcaccggcgcgggggcggtgacggtcatttgttccgaggtgtcatccaccgcctcgccgctaacggcggaagtatctgctgcgatggcagaagtctgataaattgctgcaaacaaagaggtcaccagcaggcgttttttacaccatgctgctgacggagtcgatttgtacatagtcgccacgccttgatcgttattagtatcggctcacgcgttacttccagagatgcaggttgctccgtcttttccgttgcggatggggtcttactccatttgttgattgcgaatggtaatgataggtattatcgtttgcaacaaaataatcatgtgttcttcatttaaactgcactttgtttacaatttgccctttcagacttagcgagacgacgatgaactcaaaagcggccatcaccatcacctactgttcccagtgcaactggatgctgcgcgccagctggatggcgcaggagctgttatataccttcagcaccgacatcgcctcggtgacgctggtgccggggaccggcgggatcttcacgatcgatgtcgacggtcagcagatctgggagcgcaagcaggatggcggttttccggatgcggccgagctgaaacgccgggtgcgcgatgtctgcttcccggagaagccgctgggccatgtggataaaggtgaccagaaggggtgacaaccccctccggacgacaagcgcccggaggagaagccgttagtgggctaactgcacgtcaaccagcacgctttgtcggcgagtgtgtatgagggataccgcttcttccagcacgccggggagatcttcggcccgggaaaccgacagggccgccgcgcggctggaggcggcgatcgcggcgaaatccggcgaggtggtaaaggcggtggccggaatggtttccgcgcgggccgcgtagccgtccgggtagagcgctttggtgccgcccgcgacggcgccccatccgccgttatttccgaccacgacgaggacaggaagcttcattacctccgcaatatggtggcagaccgcagggttggcgaacaggtacgacccgtcgccgacggcggcaataatcagctcttcccggcgcgcaagctgcagccccagcgcgatgggcagggcttcgcccaggccgccggccagcgcttcctggtaatagctctcggcatgggtcagtccggcaaactgcggcagcgtggtcagttcagaaacgatccggccgcggtgttgattagccagatggccgaggcagtagctgagccagggtttggtaatggccccggtctggctggcatggagaagcgcgtcgcgctggtttttctgttgctggatgcggctctgcgtatatgccgcccgctccgccacatgctgctggcgggcggcctgcagcgggcgcagcgcctcttccagcaggctgaagacttcatcggtctcgcccgccaggttgatgtccgcgcgatagccgcgcaccgggtagcgggagaagagcggatcgggccccatctggatcacggtgcagtcctggcgacagtcgccctcggcgatcatccatggtgcctgcgagtcgaccaccagaatcacatcggcgtcagcgagccagacgctgggatcagccccggcgagcaggggattatcggcgctcagggtaacctcggtgccccagtattccaccagagggatcgcccattcgcgcaccagactatcgaggcgcgcaaagccttccgccgttcgggcgccgcgctgggcgaagatgaccgggtgtctggcgcaggcgattgcctcggctgcgcgggcgatatcttccctgactggcgcatagcggaccggctgctgcgaagggccagcctgcagcgcggcctcatcgacggcaaaggtttcgcacagtggctcacgcggtaagctcaggtagaccggccctttcggcagggagctggcgatcgcccaggcccggtcaacatgctcgccgatctgatcggccagccgcagttcaaaatcccacttcacggattcgcggatcagcgccgcctggtcgcgcatctcctggccgtagccaatcggcgtattacggcagccgaagtgggaatgttcgcttatcggcgtgcggccgccaaaaatcagcaccggaatattgctgttcgccagattgatgacgccgcaggcggcgttggctagcccgacgttggtgtgaaccatcaccgcctgcaccttgccggtgccgaggtaatagccatgggccatgccgatggcggcgttttcatgcgggcagatcactaactccggtaccttttgcccggtcgcccgggcctttgcccaggcttcaatgactggaggataatcggtgcccgagttgataaaaatatacgccacgtccagcgcctgtagccgatgcagtaaaagttcagcagccgataatgtgatagaggccatattctctccgtattcacgcggtgtaatcgcggtaattaaaaggttaagaaaataaatccgcccatcgtaatgatggaggcaataatactcagcgccatcgtcgaggccatttcctgctcgccggttttatactgcatagcaataattatcgcgatggagcctaccgggatagccatcgtcaatacgacttcctttatttgctccatgctgaagcccatttttaataaaatgagatagcaggcgccggggaccagaatattgcgggcgataacggtgataatggtagcggtggtgataacaatgctgcgcgtatagagcacgatcccggcggcaaacagcgccagcccgccagaggctttgcccagcagacccagcgacatcgagatagtctgcggaatatggatatccgccagcacgatgatcagggcgattaccggcgaccagaccacgggttgtttaatggcgttcaccacccgtgcgccaaaggaaatatgctggctcttatcgccggtggcgaccgacatcagtatcatcaccagcggcagctggaagacgttttgcgtgatgctggacacggtgatcagcgacgcgctgacggtgccaaataaaaaggccagcactgaggtgccgataaacgggactgccggcgagccgatggccagcgcctgcagcgtactgagggcgaggtcgcgtcgaaacagatagcgggcgaccagtaagggaatgacgaagctgagaatcagcgccaggatgatagccacggcgaccgggcccatggtcatgacgatgtgtcgcggcgtcatcaccatattgctgaaaatacttagcggcaatgcgtagagcatcacaattttattgatgtctcctgcctgctgccagttaaagtcttttcgtttaccgctaatatagccgatgatgacggtaatgatgaccggtaatatagcgcctgaaattaatagaatattgttctgtgtcatggtgatatattctcattataaattatcttcggttcaaaaatgtgttttgccgtgggtggtgagataaataaatccttttgaagtatgcgttccggtgatttttgagcgtattgatagcgatatttattcgctaaaaaagggcgcaggggaaatgcaaaaaccgtttattcaatgagtaaatatcatgccaatgaaatttaagcagattcaggcatttattaccgtcgcccgcgaaggcaatatgaccctggccgcagagaaaatggggatcacccagtcgggactgagccgactgctattgagcctggaagcggacctgagcgcatccttattcgaacgacataagcacggcatggcgttgagcgaatatggcagcgcctttttaccctacgcgctgacgatgctgaataccgaacaaaaggcgcgcgaggaaattgagctcatccgtggcgccgggaaaggcattctgcggattggctgcgtttccagtctgctgaccagccatttcatcgataagctggcggctttccatcagcaccatccccagatccatctgcggatcgtcgaccgcattgactccgagctgtataagctgttgctgatgcacgacatcgatatcgccctctgcggtcccttaccgcatgatgagaaaatcgtggtgcggggcaaaattaactggcaggaccggatctgcatcgtcgccaggcagcaccacccgctgcatcaggcggcggacgtcaccctggaggcgatgctggactatccgtggattatgccgccgccgtctagtacgccaatgaacatcctggcggatatctttcgcgcccggcagctaccctgtccgcagccggttattgagtgcgcctcatcctcggccattaaggcctttctgtgcgagagcgatctgttaacgtcgatgccggccccggtttaccgacacgaagaagcgcttggcctgctgcgcccgtttgagctcgagggcagcgtttttatccgggatttctatgcctacagccatttcggggttctgtccggggcagccctgcagttgattcagcatctgaagcagtgagtctggtcgggtatggatattaaggtgtatgataaatacaccttaagagcagacgaaaggcggggagatggggaagcgtatcgaacgggaaaaaatgacgattcagcggatgattgccctctaccagcggcgcagtcccgacgcgcaggccgataatgcgcactatcaggcgctgaacgcctacgctgacaagcgccttgataagtgcgtgtttggcgagaacaaaccggcctgcaagcagtgtccggtgcattgctaccagccggcgaagcgcgaggagatgaagcagattatgcgctgggccgggccgcggatgctctggcgccacccgatcctcactgttcgccatctgctggacgacaggcgcccggtgccgccgctgccggaaaaatatcgaccgaaaaagtagcggctttccctggtcagcgctgcgcagccgggcgacaagtcgtgctcttgtagccccggcaaggcgttagccgccaccggggataattgctgaagttttctgtttctgactatcgcggatcgtgcttgcgacaaaggcgaccacaaacagcgcggtaaacagcactacgatagtcggcgctggcgcgctgtcgagatagaacgccagccacacccctcccgccgagcagccgatggccaccgctaccgccagcagcagggcgtggataaagcgtctcaccagcagaagcgcgatcgccccgggggcaatcagcagcgaaatcgacagaataatccccaccgactgcagcgtcgcgacgatggtcagggcgatcatgcacagcaggccgtagtgcagcagtccgccgcgcaggccgctggctttagcctgcgttggatcgaaggcgtgcagcaaaaaatcccgccatttgagaccgataataaacgcaatcaccagtgcgatcgccgtcgtttgcccaatatcgctgagggagatccccagcatatcgccgaacaggatatggtcgagatgaacatcggactggatcgctacgtacagcaccagtccggcgccaaacatgccggagaagacaatccccatgatggtatcgcgcttgagtcggctgttatcgtcgagaaaaccggtcgtcacggcgcacagcagaccagcgataaacgcgccgatggcgaaggggatgccgataatgtaggccagcaccacgcccggaaagaccgcgtggctcatggcgtcgcccatcagcgcccagcctttgagcaccagaaacaccgacagcagcgcgcagggaatggcgacgacgatcgatatcgctatcgcattgaccataaaaggaaactggaacggggcctggaacaggttcagcatgcggcctccctggcgcggcggcggctggccagcaggccgtgcttcggcgcgaagataaaggtgatgaggaacagcagcgtttgcgcgaccacgataatgccgccggtggcgccgtcgagatagtagctgagccaggcgccgaagaaactggtcaggctgccgatagccacggcgatggccagcaggcgcgggaagcgatcggttaacagccacgcggtggccccgggagtgaccaccaggcagatgaccagaaaggcgccgacggtctgcagcgccgccacggtgcaggcggccagcagggtaaagaacagcagcttcaggccgcgggtgttcaggccaatcgagcgggcgtggtgttcatcaaagaaggtcaccatcaggtctttccacttcagcagcagaatcgccattgagataaagccgatcgctgccagctggataatatcctccggggcgatggccagaatattgccgaggatgatggtctggatattcaccgacgtcggattcagcgacaccataaacagcccgatcccgaagaaggaggagaagatcagcccgataatggcatcctcttttagccgcgagcgctgttgcaaaaacagcatgctgcccgccgccaggccgccggagagaaacgcgccgagcgcgaaaggcaggccgagcatataggccccggcgacgccgggcacaatcgagtgggagagggcgtcgccaatcagcgaccagcctttgagcatcaggtagcaggagagaaacgcacagacgccgcccaccagcgccgacacccacatcgcattgagcatatagtaatagccaaacggctccagcagccagctcatcgtgggcctcccgccgcgcgccggctgataaacggccgctcgtcatcggtgataacctgcgcttccccgcctgtgagcgcgacgtggcgcagcacgccgctgaaagcccgctccagattctcggcagtgaaggtggtttctgtcgggccgctggccagcacggtgcctttcaccatcaccgtataatcacaaaattcactcactgacccgaggttgtgggtggagaccagcatggtacagccctcatcgcggagctcgcgcagcaggctgatgatccgcgcttcggtctgcacatcgacgccggtgaaaggttcatccagcaggatcacctgaccctgctgagcgatggcgcgggcaagaaagacgcgctttttctgcccgccggagagctcgccaatctgccgatggcggaactcgctcatgcccacgcgggccagcgcggcatcgacaatctcgcgatcgcgcggctttgcccgccgcagccagcccatatggccgtagcggcccatcatcaccacatcctccaccagcaccgggaaggaccagtccacctcttccgactgcgggacataggcgaccaggttctggcgcagcgcgcggttgaccggctggccgagtatggcgatctcgccgtgaccaacgcggacaaagcccatcagcgctttaaacagcgtggatttacccgagccgttaacccccaccaacgcggcaatggagccgcgcggcacgctgaacgaggcgtcgcgcagggcagtgtggccgttgcgccaggtgacggtgagctggttgacatacagtcccgcttgcgctgcattcatggctgcttcctcatcccgtcctggataccgttgacgatggtttcggtggtgacgcgcagcaggtcgagccaggtcggcaccgggccgtcggcggcgctcagcgaatcgacatacagcacgccgccgtagtgggccccggcttcccgcgccacctgacgcgccggtttatcggagatggtgctttcgctgaagatggtcgggatgcgttctttcttcatggtgtcgataaccttgcgcacctgttgcggggtgccctgctggtcggcattgatcggccacagatacagttcgcgcaggccatagtcgcgggccagataggagaaggctccctcgctggtgaccagccagcgcttatccgccggcagctgcgccagtctggcctgcagcggcgccatcgtctgacggatcttctctttgtaggcctcggcgttacggcgataggtgtcggcgtgaggcggatcgtacttcaccagcgcatcgcgaatgttatcgacatagatcagggcgttatctgccgacatccaggcatggggattgggcttcccgctataggggcccgcgctgatgcccatcggctggatcccctcgctgaccaccacctccggaacgccctgtaagtgctgataaaaacgggcaaaccaccgttcgagattaagcccattgctgaggatcagctgcgccccctgcgcgcgtttgatatcgccgggcgtgggctggtaatcatggatctccgcgcccggtttagtaatggagctcacgtcggcggcgtcgccggccacgttctgcgccatatcggcgataaccgtgaaggtggtgataaccctgaatttctcctgcgccgaggccggcgtcgcggccagcagagccagcgcgctggccagcagcaatgatttcagcggtgtcaggtgtagcataggatccctcgcaatggtgtggttaatttcccagcgtttatagccattgctatgttatatagcacaagctatttataaatgaaaataattcttatttgcatgcgtgggtaataatgagccgggaaacgaaagcgcgaaaaggggaggtaagtctggcccggcgccaaccgggcgaagatcaagagatatcggcgaccgactggcgcgggatcaggcggccagccagcgagcggccctcggtggcgaaggttggccggtcgtcaatcaggctgcgaatacgctgaatacagttatccagcagcgcctccagtggccaggagatgcaggtcagcggcgggtagagcagcgaggcgagcggggaatcctcaaggctcagcagggagacctcctgcgggacggcgatggtgaattcgcgcagcagacgcatcgcctcagccgcgtagcggtcgcgtttaacgataatgactgagtatttactgaagctgttaattaaggtcagcagcgcctgctcgacgtcatcgttggccgtcagcaccagctgacggttaaaaggaatggagtagttctgcaggacgttgcggtagccttccagcatctgacggctggcatcgtcgctatcgctgtccaccagcagggcgatgttgcggtgtcccttgccaatcacatagcggcaggcgctttcggtggcaaaggcgaagtcatagccctggctgttgctcccggcgacgccgaagcggtcaaaggcgataacgttgcgcggcgcgtcggcggcaacggcgcccagcaccaccaccgccacgcactggcgctgcagatcgtcgattaccgccgcctgctctaccgggtcgctgacgtactggaccagcaggcttttattcagccctttcagcgcctgagagagcagcggcagcagacgtgcgccgtggctttcgtcctgcgcggaaatcaccagaccaacgtggctggatgtctgactggcgaggttttgcgcggcaaagctcgggcgatagttgagttcttcaacggcccgcagcacagcttcccggctctcttcgcgcacgccccgggtgccggtcagcacgcgggataccgtcgctcttgagacattcgctaatcttgaaacatcatcaatcgttggcatggctttttctgtctgaacattttcgcctagcttaacatacctgctgaaaaaagtgtctaccgctgcccttgcgcggcgccgggaagccggggcagccaggccgcgccgcgcacgccgctggcgtcgccgaaacgggccggtttgatctgcgtgcggcaggtgtcggagaagatccacggcacgatggcggcaggcagatcgcgatagatctggctgacgttggacagaccgccgcccagcacaatcacctgcgggtcgagaatattgatcaccgacgccaggctgcgggcaaaggcatcgataaagtgtcgccagtgggccagcgcgcgcggatcgccgttttgcgccgcggcgacaatggcttccgcacgggcttgttccccatagcggcgggcgaagccggtactggagagaaagctttcgatgcagttcgttttgccgcagtagcagggctgcggcgggccatcgcgctcaggagtatagcccggcagcggattatgcccccactccccggcgatagcgttggggccgctgagcagctgttgatgaacggcgatcccgccgccgcagccggtaccgataatcaccccgaagacggtggtagctccggcgccggcgccatccaccgcctccgaaagagtgaagcagtcggcatcgtttgccatccacaccggctggccaagctgctgcatgatatcccggcgcagatcgtgaccgttgagcaccaggcagttgcagtttttaatgcgtccgctttgcggatcgatagccccgggcaggccgatccccagggtgaacggctgcgggctgaccgcgcgaatatcggcaatcagggtcagcagctgacgcataaaggcgtcatagctctctttgtgggtcggccggcgcaggcgctggacgcattcgcccgccgggtccagcagtacggcttccattttggtgccgccaatatctattccaagatgtaacatagtgacctcggggaatcaggcccggccagcgcgtctggccgggcaaggcgctaggcgtgaagcggctgcgcgcggtaaatcgcaatcagttcggcaatcagctctttcgccagaatggatgtcatcaggtgatcctgagcatggaccattaccagcgtcattttggtttttccctcgccttcgtcagcttcgataagctgggtctgtacaaggtgagcttcgcgggaatagtgcgccgcttcctgcattttggcgtcggcggtggcgaaatcacccgctttagcggcgtgcagcgcttcgtagcacaggctacgtgactggccggcgttgatgatgatccccatcacctgttcttctaattccatgattatcctctgaatcgttagcgttaagcggtttgcgccgcgttgtcagcctggccgacggcgttttcacgctcctgggccagcagctgtttttcgtaagctttgagaaatggcaggtacatcaccatggcggtagccatacaaatgaggcacaggatcaccgggctaaagctccagttcgccgcccacgaggcgccgataggcgccggcgttgtccacggcgtcatcgacactacgcggctgaccaggtccagcttcagcgcgaagtacgccagggtcgcgttcaccatcggcaccagcacgaacggcaggaaaaacagcgggttcatgatgatcggcgcgccgaacagaatcggttcgttgatgttaaatacgcccggcacgacccccatccggccgatcgtccgcagatgcacggccttgctgcgcagcagcatcagcgccagcggcagggtggagccgacgccgccgatcagcagatagtgatcccagaagccctggacatagatgtgcgggatagcggtgccagcggccatggccgcctgattgaccgacaggttggccatccagaacgggttcatgatcccggtgacgatcagcgcgccgtggatcccggcgaaccacagcacctgacagaccagcaccgacagcaggatcgccggcagcgtatcggaagccgcgaccagcggcttcaccagcgacatgatcgcttccggaatgatcatccccagctgggcttcgataaacaggttcagcggatgcagcgtcagaatgatcgccagcaccgggatcaggatttcaaacgagcgcgccaccccggcaggcacttccggcggcaggcgaatggtgatgttatgccgtttgaggaaggcgtacagctcggtggaatagatggccaccagaatggcggtaaagatcccctgaccggagaagtaggcagtagagatctggccatctttcagcggcgcggctaccagcagaaacgacatcagcgacagcatcccggcggtcagcgagtccagatgatggtgtttggcgaggctggcggcgatcccgacggcgataaacagggtcatcacccccatgctgaagttgaacggcagcatcagcgcatcgcgatgatcgagcgaaaattgcagccaggcgcgggcaaacccccacgtcgtatccggagaaaacggcgggaagataaacaccaacaggaacgagccgacgatcataaagggcagggcagtgataaagccatcgcggatcgaggtgacatatttttgctggccgatcgcgccggccataggcgtgatctgccgttcgatcacgtcgatcagtttagcgtacagagagctcatgatctttccttagttcttgttttcgataagggaaagggcgaaatcaaggaccgcggcgcctttttgcatgccgtagtccatcatattgatgggttcgacgcggataccgtatttatccgcctgtttttgcaggtcctgctgcatgtatttcacctgcggccccagcagcaccacctgataatggccgacctgttcggcaaactccgctacgccataggcgttgatctctaccggcaggccccgctgttcggcttccgcaatcatttttttcatcagcaggctggtggacatgcctgccgaacaacacaacataatttttttcataattaccgctcctgatgaggttggatgagcggactatagtcaaaatggatgcattacggaaagcgctttccgtttgtggatttattaattgtgaccatgatcacctatggcaggctttcactttccggtgttgtgggcgatcatcccggcgagacaaccattcgcaaaggtaggagtatgaacattcagttaatgaatgtggccgtggacatcatcgagcagcggctggcgccgctggcgaacgttctgacgcgcaacaaccacattacggcgatgcgcgatagctttgcgctggctatgccctttgtgattgttggcagcctgttagttcccattttgtttccgcccgtttccatcgacggcgcctcgcgtttcggccaggtctatttgctgctgcggcctatcctgctgccgacctttcagctaactattggcctggtggcgctgattgtcgccttcggcgccagcgccagtctcgccaagcagtaccgtctgccggaacggctctgcggtttaaccgggtgtctggcttttctgctgtttatcggctttcgcgagactgcggtgagcaatgtttatctcggcggtatggggatatttaccgccctgatatccagcacctattccattgagataattcgctttttctacaaaaaaggctggtgcattcgcttgcctgatgaagtgccgctgatgacccgcaatggctttcaactgctgatcccgctgctggtggtgatgctgtcgataagcgtgatgaatgccatactgctgcagaccaccggacgcatcgtaccggagttgatcagcgaagcggtgcggccgctggtgctggcgtccgacacgctgatggcggtacttatctctttatttatctgtaacttactctggtttatcggtatccacggcgcgctgatcatcaccgggatcatgaaccccttctggatgacctatctgtttgaaaatcagcaggcgctggcggcgggttcgccaacgctgccgcatatttatctgcaggggttctgggatttttacctgctgatcggcggtattggctccactttgccgctggtgctgatggcgatgcgcagccgctcgcggcagctgaaaagcgtggccaagattggcctgctgccgtcgctgtttaatatcaacgagccaatactgtttggttttccggtgatcatgaacccggtttttttactgccgtttctctttgttccgctgataaatgcctgtatcgcatggtatttaactcagctgggtatcctcgaccgcgcggtggcgatgctgccatggtcgatgccttccccgctgggggcggcatggtcggcgaacggcagctggaaaaatttgtgcatgagcctgttcgcgatgtttaacgcctggatgctctatcgccccttcttcaaagtgtacgaacgccagctcgcggaaaccgaacgctgaccccctcgccgtcggcggcttatcccccggcggcacctgctcatctcctcctccttccgctccactgccggctcccggcggcattcttgtaattttatgtgatcagtctcacgaatatattcgccgcagagctaattttgtgaaccagataggcaattatggaaagcgctttccgtaagtggatgtacatttccgtttttgatccgtaaatttcccctccgttatcggttcgtgttaacaaacataacgtgggaaaaaaataatgataaagctgaaacactcaatacctctggctctcctctcgctggcaggggccagcagcccggcctgcgccgatccgaagtatgattttgcgctgcatggctatatccgctccgggatcctggcgaactccgatggcaaccgcgcggactccgtcggcctgatgccggacggtaagtggcgactgggcaacgaagaagacaccaagatcgaactgatccccaccgtgacgctgacggcggacagcggcgtggtggcgaaagtgcaggccaacctcactcaccagtcgaaatgcacctccgactggaactgtcaggatgacgatggccatgacgtacagtttcgtgaagggttcgccgagctgagcaatctggattttgcgccggagatgaccttctgggccggtaagcgctacagcagctccaacacctccagccatcagttcgactgggagtacattcagtacaacggcaccggcggcggcttcgataacatggatctcggcttcgcccgcttcgacgccggggtgtacgccttttcacccaccgatgaaaccaaagcctacccggtggataagggagatcagggctacccggatgactattccctcaacctgtggctgaaaaagatcgcggggacaggcttcgatctggagctgatcggccaccacatgaaccgtaacgaaaaccatccgacttccgccgagaagggctatggcgtgaccggtatttataactttgacggcttctatggtctgaccggaggctactcccgcctcgcattgcagtacgggaaagggctggcggcgggtgactcgctgggtaaaaacggctggggctgggccaacctggaaaacacccagtcctggcgagtggtgctggatagcgtggcctcgatgggcgacctggagatctcgaccttcgctttctggcaaaaagataaaaactaccgctggtggacggaagatgaaaatggctggggacgctcgatgtgggtcgctggtatccgcccttatcatcagatcacccgcaactttgccatgcagtacgagctgggctacgaatacctggatgacaaaaactacaaaggagtaaacggcaaaggcaaaggcggcctgaccaaagtcaccgttgcgccaacgctgacctttgactccggtttctgggcgcgtccgcagctgcgcttcttcgtcacctacgcgaagtgggataaaggtgtctccgatgcattagacggtaactacaactgggataccaataccatcaccgccggcgggtattcccgcagtggctctaccgacaccgttaacttcggcgtacaggccgaggtctggttctaaggagagacaacgatgaagccgatgaaaaacctgctgctgatggggctgctgtccgcgctgggggccggcggggcgctggccgccgagcgctcgcactttacgcactttatcactcgcgacggcgccaccctcaaggacggcgacaaggtgtttcgtttcgccgggatccacgcgccggagctacaccgcattgaagacgacgcccgcggcccctgcagggcagatccgcgcggctgggggcaatactttaaatggccaacggcccaggagcagcaaaactggatccaggcgatggtgcaaaccggggcgaaagcccagcgcgtctacgtgctgtcggtgcagcaggaatttgataaggcctgcgggcgtgagacccatattctggcgccggaaacggcggacggcatgccgcggctgaatgagaaagccatgcgggtgtatgacaacatgattgccgaagcggataaacagggattgcgtctgatcctgccgtttatcgaccactgggggtggtggggcgggcgcgagcagctggcggcgttctatcatgaaaaagcggaagacttttatcggaccgatagcaagaccttcaaagcctatctggatgtgatccgccaggttatcacccggacaaataccgtcaccggccgcgcctattatgatgaaaaggcgatcatggcctgggaaaccggtaacgagctggaggataccaacgccgatttcctgcatcagaccgcggcgtggattaaaaaatgggcccctcatcagctggtggtggatggcacctataagaaaattaatccgtttgcgttgaccgaccccaatgtggatatcgtcagcaatcactattacaccaatgccgataataaccatcccgggcaggtgacgcaggatctgcgcgccgtcggcggacaaaaagtctatctcgtcggcgagtttggcctgctgccggcggatcaactgaacgccattatgcagtcgattgttcacagcgacgtcaacggggcgcaagctgccggcgggcttatcgggggcttccgcggccatcgtcacgacggcggcttctactggcataaggagtcgaccgggcactatagctaccacctgccggggtttgccaaagaaggcgaagcgaaccaggagcaggcggtggtcgatctggtgcgcaccgccgcggcgcagatggccgggcagcagacgatggcaccgctgccgaagccggacgcgcctttgctgcgcgaaaccacctcgcccttcgcgatcaactggatgggcgctgcggtaggacgcagctacgatgtcgaacgcgccgcctcaccgaccgggccgtggacggtggtgggccgggatatctccgatggcgttaacgaatggaatccggaaaccatggttctgttccgcgacgattatcgtcagcttcagctcgggcacacgtattactaccgggtgacggcgaaaaacgagagtggtcgttcggccccttccaatgtgattagcgtgcagcatagcgaggagaatcagccaccggttgtcacgctggaaccggccctaaccaccacgcaggaccagggcgtcgagcttacggccagctggcaggacgatggcctgccgtcgcgagaggttaaggtgggctggcagcacgccggcgatggccaggtgcatttctgccatgccgatcgggctcaaaaccgggcctggtttacggcgccaggcacctatgcgctgacgttcacggcggacgatgggctgttgaaaagcagcaaaaccgtgaccgtgacggtgggcgaggcgacggggaaagcgccagcggatttttgtcgttatcacggcgaagtttatggcgtggctgaggggcggctgacggtgatgaagagtgataaagacgcgctgacagttggtgaggacggcttcctcggcccatttgccaacgagggggataaggtcagctggcaggtgcaggcgccgtggagcggtcagttcctgctcaatgtaaccttcaacggcaaatggggcggtaagcagaactcgtttgtcgtcaacgggggcgctcggcaggcggtggccttcccgcagacggatgagcagggccagcagctgcggataccggtgacgcttaaagccgggagcaagcagattgacttcggccgcttcgccggcgactggggctatatgttcattaaatcgatcgaagtggtcgctgagtagtacgttcaggctgcgccagacgggcgcagccttttttcgaaggagaggttatgcagcagtatcagtttccgcaagggttcctgtggggggcggcggcgtccggcccgcaaacggaaggggtcaccaataagcgccatcgttccatctgggacagctggtttgccgaacagccggagcgattttatcagcaggtagggccgcagaccgtgtgtgatacttatcatcagtatccgcaggacgtggcgctgatgaaacagaccggcttcaactcatttcgtacctcgatacagtggtcacgactgatcgctgatttggaaaccggcgcgccggacccggacgcggtgcgtttttatcacgcctatctggatgagatgatcgccaacggcattgagccgatgatcaatctctaccactttgatatgccggaagcgctgcagaaacagtacggcggctttgaatcggcgcacgtagccgagctgtttgcccgctttgcccgcaccgcctttagcctgtttggccataaggttaaatactggataaccttcaacgagccgattgtgccggttgagggaggctacctgtacgactttcactatccatgtaagaaagatggccggctggcggcgcaggtggcgtttaacattatgctggcgcacgccaaagcggtaacggcttatcgtgaactggcgctggcgggcgagatcggcgtggtgctcaacctgaccccgagctataccctcaccgacagcgacgcggataaaaaagccgccgggtatgccgacctgttttttaaccgcagcttccttgacccgctggtaaaacatgaattccccaaagcgctgtgcgagatccttgccgcccacgactgcctgccgacgaccagcaaagacgacgcggcgttgatcctcagcgcggatatcgattgtcttggggtaaactattatgtgccgcggcgggtaaaagcgcgtgagagcgaatatgacctcgattatttcaccccggaatactatttcgaaaacgcggtgaacccgcagggccgctttaatccttatcgtgataacaacgagatcctgccgcaggcgatctatgacattgccgccaatattcgcgataactacggcaatattaagtggtatctcgcggaaatcggcatcgcgatggatcgacaatcagagggcgagcccggggcggacggggtgatagacgatactttccgcatccagctgatggaggagcatctggtgcagctgcatcgggcgatagccgacggcgcgaactgctttggcgtgcaccagtggacgtttatcgacaactggtcgtggatcaatgccttcaaacggcgctacggcttctggcgactggatctggagaccggcgagcgacagataaaacgcaatgcgctgtggtttgccgaactggcgaccagcaacggttttaccagcgataaatagcgcgctgcgccagcgctccctctcaccggcgcggaaagggggagcgcgcgaggttacaccagttcgtctttattaatacccagccgcttcatgcgtgacaggagcgtggtgcgcttgagccccagccgctgggcggcgcctttcggcccggccaccacgccgttgctctccttcagcacccggacgatcagctgatattcatcctcaccttcctcaggcaggaccgccggcgtccgcggggcttccacgatatcccgctccggcagggagagctgcagtacgttgccgcgggtgagcaataccgcccgttcgataacgttttccagctcgcgcacgttgcccggccactccatacgcgtcagagtgcgcagggtttccgccggaatgctgtcgatattgcgccccatgcggcgggcgattttaaaggtaaacgccttcaccagcagcgggatatcgtcgggacgttcgcgcagcggcggcaggtggatcgggaacacgttgagccggtagtagagatcgctgcggaattccctgtcgataaccatctgcttgagatcgcggttggtggcggcgatcaatcgaacgtcggtctgaatcagcttgttgctccccagacgttcgaactcctgctcctggaggacgcgcagcagtttgggctgcagttccagcggcatatcgcccacttcatcgaggaacagggagcttttgtccgccagttcgaagcggccgatacgctgggcgctagccccggtgaacgcgccgcgttcgtggccgaacagatcgctctccagcagcccggcgggcatcgccgcgcagttcatcttcaccatccgccgaccgttgcgtccgctgaggttgtggatagcgcgggcgataagctctttgccggtgccggtttcgccgaggatcagcacggtgctgtcgctctgcgccaccatctctacctgcttgagcacattgttcatcgcctcgctgcggccgataatctccccgaattcgctctcgacattattgagctgctcggtgagggcgaggttctcatccaccagccgctctttcaggcgctgaatttcgcggtaggcgagggcgttatcgatagcgatcgacacccgctcggcgatctgccgcagcagcttgagattggtggtggtgaagacctgttcgtcgcactgcgccagcttaagcaccccgagcagggtattgccggacatcagcggcagcaggcatagggtctggatcttattgccccacatctcgaagagcattttctcatacggcgcgagagtgtcatgttcgtgcagattaagcagcagcatctctttgcttttgaacacgcgctcggtgagggtgccggcttcatccacctcgctctggtcgtgaaccgggtggctggcgtcaagataatgcgtggaatagatgttgagcttccccttgcggtcgctgcgcagcaccacgctgatggcgtcgatccggaagtagcgatggatctctttcgccacctcgctgaccagctcgtcgatatccagtcgcgagagcaccgcgttggtgatcgccaccaggatgcgaaagttgtcgcgctcgtggcacagcagatcgtaatcgacgttattgctgacccggttctgaatctgttcggtgacgacggcgacgatctgcgcgaaggtatgcagccgctggaactctttctcgctccacggccggttgtcacggcggaggaattcgcaaccgccgaagatccgcccgtccgccgccagcggcagcagcgaatagtatccgaacgggcgatagagcccgctgcggataagctgcggccaggtgtcggcaaaggtttcatgatcgcaatgcagggcatccggccgggagagtaagcgacgcaccggaccgtgggccaggacggtttcatcctcgtagcttaccggatggccggcctcatcgcaggcgtacctggccgcgcggtgattacccgcgttccacaggatgatggccgcctcatcggccagcgcggactgttgcaccagacgggtcagggtttcgcttagcgcggccagatcgggctgctgtaataaaagccgggtgatatcgaacagcccctgctggccgagatcgctcatcggtgtatacgacattgcttacgtccaaaacgcgccgacaacgcggcgcataagaaaatgatggtacaaataatagtatgttaataaagcggttattgccgctttaacccatccatgggcgcccgctggtttgggcaaaataattacgctggctttttcccggctcgcgctgcgcttagccgggctacatgtgcgcgcagttctgtagcccggaaaaggcgccagccgctatccgggacccgacgccgtcgttaacaaattctcggcagcggttcggcgtggggaagatcgagcgtccgcttcacgccgtacagcccaacggaacgtacgcccgggcggacgaccacttcgccgattatcgccgcatcgcgtcctaacgcgtgagaccgcaaatgcgccagcacgttttccgcctcgtcgcgggcgacggcgagcaccagcttgccttcattggcgaagttcagggcgtccagaccaagcagctcgcagacgccgcgcaccgtgtcgttgaccggcagcgttgcctcctgcagttcgatgccgcagccgctggcggcggcgaactcatgggcgaccgcgttaaccccgccgcgggtggcgtcgcgcagggctttcactccgctcagcgggcgcagggtctggataagcggcgtcagcaccgcgcagtcgctggacagcgcgccgtccagccccatctgctcgcgcaggttaaggatggtggcgccatgatcccccagcgtgccgctgaccagcagcacatcaccggcgctaatctgctgcgtcccccagtgaacgtccgccgggatggcgccgatgccggcggtgttaataaacagcttatccgccgcgccgcgcggcaccactttagtgtcgccggtgacgatggcgatccctgccgcccgggcggtgtcggccatgctggcgaccaccgcttccagggtggccatctccagcccctcttcgagaataaagccgcaggaaagatagcgcgggatggcgccgctgaccgccacatcgttggcggtaccgcagacggcaagcttgccgatattgccgccgggaaagaacagcgggtcaatcacgtagctgtcggtggagaaggcgaggcggtccccctgggcggcgagcgccgccagatcgaggcgcgcctgatcctcctgctccgccagccaggggttggcgaaggcctgcataaacaggtcgccgatcagctgctgcattgcctgtcccccgctaccgtgggctaactggacgcttttcatacttcattttcctgactgcgatattgataccaggcggcgcaggccccttcagaggagaccattagcgcgccaaaggcgctttgcggattgcaggtgctggcgaagagcgggcactggtgcggtttacagcggccggtcagcacctcgccgcagcgggcgcgcgggtcgtcgcacacgcgctgcggcgccgggcgaaaatgcgcctcggcatcgaagcgctgataggctggcgtaagctgcacgccggagtcgctgatgacccccaggccgcgccattcgctgtcgccatccaggcggaagacgtcggccatcgccgcctgcgccagcgggttgccctcatccggcaccacgcgacggtactgattttccacatcgctgcgctgcgctattgtctgctcaaccagcatcaccgcgccttgcagtagatcaagcggttcgaaaccggcgaccactaaaggacggtgatagtcgctggcgataaagccgtaggcctcggtgccgatcaccatactgacgtggcccggggcgagaaaggcgtcgattccgttctccggctggtccagcaggctgcgcagggtcggcagcagggtgatgtgctggcagaaaaagtagaagttatcgacgttgcgctctcgcgcctgacgcagggtcagggcggtagcgggcatggtggtttcgaaaccaagaccaaaaaagaccacctcgcgctgcggattttgctgcgccagccgcagagcgtccatcggcgagtaaacgatgcggacatcggcgccgcgggctttcgcctgcagaagcgagccgtttttacccggcacgcgcatggcgtcgccgaaggtgcagaagatcactcccgggcggctggcaatctcaatgcaggcgtcgatgcgccccatcggcaggacgcacaccgggcagccgggcccatgaataaattcgatgttctccggcaacagctggtcgagcccgaatttaaaaatggcatgggtatggccgccgcagacctccatgatgcgcagcggtcgcgcggcggtgtgcggcagcagacgagcacgctgctgaagatgggccaccagctgcatcacctgttcgggggcgcggtattcatctacgtaacgcattatcgctcctcgccgtacagcagcgcgccgacgtccggctccacgtcaaacatattttgcagcgcctcgagggtgtcgcgggcttcggcttcattaatgacgctcatggcgaagccgacgtgcaccagcacccactggccgagccgcggctggccctgctcatctacggcgccgaccagcgtcaggtcgacgtcgcgctgaataccgcaaacttccaccttcgccagcacgccgtcgatggcgcaaatttgtcccggaatgcctatgcacatcgctgcgtctccagccaggtgagccactgctccatgccttcgccgctggtggcggagacaagaataatgtcaatatgcggattgacctcgcgggcgcaggccaggcaccgctcaacgtcgaaattgagatacggcagcaggtcgactttgttgagcagcatcaggctggcggcggcgaacatatgcggatacttcagcggtttgtcttcgccttcggtgaccgacagcaccgccaccttatggcgctcgccgagatcaaagctggccgggcagaccaggttgccgacgttttcgataaacagaatgccgcggtcagccagcggcaggcgcggggcggcgtcggcgatcatctgggcgtcgagatggcagcctttcccggtattgacctgaatcgccggggtgccggtggcgcgaatgcgggcggcgtcattgaccgtttgctgatcgccttcaatcaccgcgcagtcggcgcgtcctttcagccgggtgagggtttcggtgagcagggtggttttgccggagccggggctggaaaccagattcagcaccagctgctgttttgctgcgaagcgtgcgcggttgcgtgccgccaggcggttgtttttatccagcacgtcgatctccacttccagcatccgccgctggctctgccccggggcgtgggtacccgcttcgccgtggccgtaatgcaggtcgccctctggcgtgcgggtgggggcgaagtggtcgattttgacaccggtgatggtcatcgtctggcgtggggcgggcgcgaagggggcgctgcggaacgcggaatgcgggtttcgttcgtctccttcaatatagaggttgccttcgccacagccgcatgttgtacacataatttactccaattctaaacgctgaatctgtaagccgtcatccgccacgatctgcagctggtcgttattgcagtgcgggcagcggcgaacgtgctgcgagacaagatggacgtactgctgacagcgatcgcaccagcattcagcctgttgttcggtgatatgcagttcgcacccctccgccagcgtgccgcggcagaccagctcaaagcagaaggtcagggcgctggcttccacgcaggaaaatgcgccgaccttaagccacacgccggtaacccgccgcgcgccggcctgctgcgcctgttgttcaataatttccagcgcccgctggctgagggtgatttcgtgcatagtcgcctccgtatcgcgatgcgccttctatgcaataacgatgccagaatgaaatcgtcgtggcagtcaatgtcgatgtcgacgccccggggctgtcatcgacatgtcgcatcggcagaggtcgataaaaaaaacatagttaaatcaattaaataaaacctagcatgaaaaatgcttagagggtgcatctcatgctacggagaaaccgatatgactatttgggaaataagtgaaaaggcggattacatcgccgaccgtcaccggcagcagcaggagcagtggcacatctactgtaactcgctggttcaggggatcaccttgtcgaaggcccgcctgcatcacgcgatgagctgcgcgccggacaaagagctgtgcttcgtgctgttcggccattttcaggtgttcgtcgccctcgcggaaggcttcaacagccacaccatcgagtactacgtcgaaaacaaaaacgggggtgataagtatctgattgctcaggccaccctcgcaatggatggcacggtggacggccgcatcagcaaccgctcccgcgaccaggtgctggagcactatctggcgattatcgccaccgtctatgaccgtctgtatgacgccatggaacaagaccaaccggtggatttaagccatctggcgctgacccactgatcgtaaggtgtcgacacgtgtcgaaaatgacacctgcgcaaccttatttcgtcaaaaatgactttcacccgaggatgacccggtgaaccgttttgtaattgctgactccactgtctgtatcggctgccgcacctgcgaagccgcctgctctgagacgcatcgccagcacggcctgcaggctatgccgcggctgcaggtgatgcgtaatgaaaaagaatcggcaccgcagatgtgccaccactgtgaagatgctccctgcgccaccgtctgcccggttaacgccatccaacgcgtcgatggcgcggtccagctcaacgagagcctgtgcgtaagctgcaaactgtgcggcattgcctgcccgttcggcgccattgaattttccggcagccgcccgctggatatcccggcgaatgccaatacccggctggcgccccccgcgccgccggcgccggcgcgcgtcagctcgctgctcgactgggtaccgggcgtgcgcgctattgccgtgaaatgcgacctctgccacttcgatgaccagggcccggcctgcgtgcggacctgtccgaccaacgcgctgatgctggtggatagccgtgatatcgcccaggccagcaagcgtaaacgccagctgacctttaataccgaccttggcgacttgtcgctgttccaggcgcaacagggggagagggaatgagtgtaattggattagtgaatcaggcggtggcgtggtatgccgccagcgccgtactggcctttctgtttgccatgcgcaaaccgctcagcggcgccattgccgggatcggcggcgcggtggccagcgccatgctggtggtcaccggcggcgccgcgctgctgatgccggagcggatccacggcggcatgctgcagtttctccacctgacgatacgggtggggggcgtcaacgcgctgtggctgctggccatcggcctgtcggcgctgccggtgtcattgttcaatattagctggcatcgccacccgcaggtgaaggccaacggcccgctggtcaacctgctgctggccgccgcgacctgcgcggtggtggtgaccaatatcggttcactggtggtgatggcggagatcatggcgctctgcgcggcgtttctcaccggctgcgccgcctccggtaagctgtggtttgcgctggggcgtctcggtactttgctgatggcctggacctgctggctggtgtggtcaacctacggcaccctcgagctggcgcagatcaaccttcaggcggcggatatgatgcagaacccgctgctctggctgccgggtctggtggggttcgccctgctggccggggcgatcccgctgcacggctgggcgccgcaggcccacgccggggccagcgcgccggccgccgcgctgttttccacggtagtgatgaaagtcggtctgtacggcatgctgaccgtttcgctggccggcggcgtgccgccgctgtggtggggcgtgatgctgctggcgctggggatgatcaccgcctttatcggcggactgtatgcgctgatggagcataacattcagcgcctgctggcctatcacaccctggagaatatcggcattatcctgctggggctgggcgccttcgtcaccggcgtggcgacccgcaacagcacgctgatggtgctgggctttatcggcggcatgtatcacctgattaaccacagcctgttcaaaaccacgctgttcctcggtgccggagcggtgtggttccgcaccggccatcgcgatatcgagaagctgggcggcatcggtaaaaaaatgccgctgatctccctcgccatgctggtggggctgatggcaatggcggccctgccgccgctgaacggcttcgccggcgaatgggttatctatcaatccttcttcaaaatgagcactggcgacctgtttattggccgtctgctggggccgctactggccgttggcctggcgatcactggcgcactggcggtgatgtgtatggcgaaagtctatggcgtgaccttcctcggcgcgccgcggacgaaagaggcggaaaacgccacctgcgccccctggctgatgaccctgagcgtggtgctggcggcggttttctgcctcgttggcggcatcgccgcgccgtggctgctgccgctggtgggcggcgccttcccggtgcaggctcaggtatcgagcgtggtgtcgcagccgatgatcgcgctgctgcttatcgcctgcccgctgctgccgttcctgctgatgatcttctttaaaggcgatcgcctggcggcgcgctcgcgcggcgcggcgtgggtctgcggttacgaccacgagcagtcgatggtggtaacggcccacggctttgccatgccggtgaaagaggcctttgcgccgttgctgaagctgcgtcactggctgaacccggtgcgtctggtgccgggctggcaatcggcctcggcgccggcgctgctgcgcgggatcgcgctggttgagctggcggtgctggtggtgattgtcatttcgcgaggagcctgagaatgagtctgttaattgcattgctacaggcgctggtgctgtttgccgtcgcgccgctgttgtccgggatcgttcgcgtcgcccgcgcgcggctgcataaccgccgtggaccgggggtactgcaggagtatcgcgatatcctgaaactgctgggccgccagagcgtcggtcctgacgcctcgggctgggtgtttcgcctgacgccgtacgtcatggtgggcgtgatgctgaccatcgccaccgcgctgccggtggtgacggtagactccccgctgccggtgctgggggatctcatcaccctgatctacctgttcgccatcgcccgtttcttctttgccatttccggtctggacaccggcagcccgtttaccgcgctgggcagcagtcgcgaagcgatgctcggcgtgctggtggagccgatcctgctgttgggcctgtgggtggcggcgcaggtcgccggctcgacccatatcagcgccatcaccgataccctttaccactggccggcggcgcgcagcattccactgattctggcgttatgcgcctgcgccttcgccacctttatcgagatgggcaaactgccgttcgatctggcggaagcggagcaggagctgcaggaagggccgctgtcggaatacagcggcagcggctttggcatcctgaagtggggcatcagcctcaaacagctggtggtgctgcagatgtttgtcggggtcttcttcccgtggggccagatgaccagcttcagcgtcggcggcctgctgctggcgctggtggtcgccatcgttaagctggtggttggggtgctaattatcgcgctgtttgaaaacagcatggcgcgtctgcgtttttgtgccacctcccgcgtcacctgggccgggtttggtttcgcctttttagctttcgtctccttgctggtggcgtgattaagagagtttgagcatgtctgaagaaaaaatcggtcaacactaccttgcggcgctgcaccaggcctttcccggcgtggtgctggacgaagcctggcagaccaaagaccagttaaccatcaccgtgaaggtcaactacctgccggaagtggtggagtttctctactaccagcagggcggctggctgtcggtgctgttcggcaacgatgaacgtaagctcaacggccactacgcggtctattacgtgctgtcgatggagcagggcaccaaatgctggatcaccgtgcgcgtggaagtggacgccaacaaaccggaatacccgtcggtgacgccgcgcgtcccggcggcggtatggggcgagcgcgaagtgcgtgatatgtacggcctggtgccggtcggcctgccggacgaacgccggctggtgctgccggacgactggccggacgaactctatccgctgcgcaaagacagcatggattatcgccagcgtccggcgccgaccaccgacgccgaaacctacgagtttattaacgagctcggcagcaagaaaaacaacgtggtgccgattggcccgctgcacgtcacctctgatgaacctggccacttccgcctgttcgttgacggcgagaacattatcgacgccgactaccgcctgttctacgtccatcgcgggatggaaaagctggcggaaacccgcatgggttataacgaagtgaccttcctgtcggaccgggtgtgcggcatctgcggcttcgcccacagcaccgcttacaccacctcggtggagaacgcgatgggcatcgtggtgccggagcgggcgcagatgatccgcgccattctgctggaggtggaacgcctgcactcgcacctgctgaacctcggtctggcctgccactttaccggctttgactccggctttatgcagttcttccgcgtgcgcgaaacctcgatgaagatggcagagatccttaccggcgcgcgtaaaacctacggcctgaaactgatcggcgggatccgccgcgacctgctgaaagaggacatgatccagacccgtcagctggcgcagcagatgcgtcgcgacgtgcaggagctggtggatatgctgctcagcacgccgaatatggaacagcgtaccgtcggtattggccgtctggacccggaaatcgcccgcgacttcagcaacgtcggcccgatggtgcgcgccagcggccacgcccgcgacacccgcgccgaccacccgtttgtcggttacggcctgctgccgatggaagtccacagcgagcagggctgcgacgtgatatctcgcctcaaggtgcggatcaacgaggtttacaccgcgctgaatatgattgatttcggtctcgataacctgccgggcggcccgctgatggtggaggggttcacctatattccgcaccgcttcgcgctgggcttctccgaggcgccgcgcggcgacgatatccactggagcatgaccggcgacaaccagaaactgtaccgctggcgctgccgggcggcgacttacgccaactggccgaccctgcgctatatgctgcgcggcaacaccgtttccgatgcgccgctgatcatcggcagcctcgacccgtgctactcctgtactgaccgcatgaccgtggtcgatgtacgcaagaagaagagcaaagtggtgccatacaaagagctggagcgctacagcatcgagcgtaaaaactcgccgctgaaataaggaatcgccatgtttacctttattaaaaaagttattaagaccggcaccgcgacgcacgcctacccgctggagccgatgccggtggacaaaaactttcgcggcaagccggagcatacgccacagcagtgtatcggctgcgcggcctgcgtgaacgcctgcccgtcgaacgccctgacggtcgagatcgatctggccactaaccagctggcgtggcagtttaacctcgggcgctgcatcttctgcggtcgctgtgaagaggtctgcccgacggcggcgattaagctgtcgccggagtatgaactggcggtgtggaagaaagaggatttcctccagcagtcgcgcttcgctatctgccactgccgggagtgccagcgtccgttcgcggtgcagaaggagatcgactacgccatcgcgctgctcaagcataacggcgatacccgcgccgagctgcaccgcgaaagcttcgaaacctgcccggaatgcaagcgccagaaatgcctggtgccgtccgatcgtattgaactgacccgccatatgagggaggccagctgatgagtactttacttggcccgcgcgatgaaaacggcattcccgtgccgatgacggtggatgaatccatcgccagcatgaaggcctcgctactgaagaagattaaacgttcggcctacgtctaccgcgtcgactgtggcggctgcaacggctgcgaaatcgaaattttcgccaccctttcgccgctgttcgacgctgaacgcttcgggattaaggtggtgccttcgccgcgccatgccgatattctgttgtttaccggggcagtgactcgcgcgatgcgctccccggcgctgcgcgcctggcagtcggcgccggatccgaagatctgtatctcctacggcgcctgcggcaacagcggcggcatcttccacgacctgtactgcgtctggggcggtaccgataaaatcgtaccggtcgacgtctatattccgggctgcccgccgacgccagccgccacgctgtacggcttcgccatggcgcttggcctgctggagcagaaaattcatgcccgtctgccgggtgagctcgacgaacagccgaccgagctgctgcatgccgatatggtgcagactctgcgggtgcgcatcgatcgcgaagcgcggcgtctggcgggctaccgctatggacggcagattgccgatgactatatgcgtctgcttggccagggcgacagccaggtgctgcgctggctggaggcggagaaagatccgcgtctgaccgagatcgtcacccatctcaaccaggtggtcgagggggcgcgtatccgatgagcgagacggtggtgttcagtcagctgagccgtaaatttattgatgagaacgacgccacgccggatcaggcgcagcaggtggtctattacagcctggcgattggccaccacctcggcgtcatcgactgtctggaggcggcgctgagctgcccgtgggacgcgtatctggcatggatcgccacccttgaggccggaagcgccgcgcggcgcaaaatggagggcgtgccgaagtatggcgaaatcgtcatcgacagcagtcatgtggcgatgctggccaacgcctttgataaagcgcagtccgcgcagaccccgcagcagcaggcgtggagcaaaaccctgctcagcatgctgcatgatattcaccaggagagcgccatctacctgatggtgaggagattacgtgactgacgttttactctgtgtcggcaacagcatgatgggcgacgacggcgccggcccgctgctggcggagatgtgcgcggctaacccggccggccagtgggtggtcatcgacggcggcagcgcgccggaaaacgacatcgtggcgatccgcgaattacgccccgaacgcctgctgattgtcgatgccaccgatatgggcctaaaccccggcgacattcgcatcatcgatcccgacgacatcgccgagatgtttatgatgaccacccataacatgccgctcaactatctggtcgatcagctgaaagaagacgtcggcgaggtgattttcctcggcattcagccggatatcgtcggtttttattatccgatgacccagccggtgaaagaggccgttgcccgggtgtatcagcagctggcaggctggcagggccagggcggctttactcagctggaggccgcggacgactagccctgcggcgaaccgggctctccgccggcgcacgactggccggaagggagccccgttcccggcgctgccagttcaagattctctatcactaatttaccgggcgacaccgagactctgacctgcgtgccgaccggaaaccccgcctgctccagccagtcgccgtttaagcttaatgccgcgtggcgggtgtagcgccgcgtctcccgcgttttgcggtcctcatggcgttttctgacatatcccacggttaactggcgaatggccctggctatccctctggctgcggtagggtgctgtgcgctcatgatgtgctccttgctgaagataccccggtaaaagtactggataaaataccagttattgtaaacaggtggcaaaccagaagctggaatcaggctcgagaaaaaagcatgtaatggatgcaacagatagccgacgcccgtcccccggttagcgcggggaacgggcgcgcgtgggcgagggtgcttagtcgagatcggcgccgttactggctatcaccttctggtaccagaagaatgactttttacgcttacgcgccagggtgccgttgccggcatcgtcgcgatcgacatagacaaagccgtagcgcttgctcatctcgccggtggacgccgagaccagatcgatgcagccccagctggtgtagcccagcaccggaatgccgtcgccgatagcgtcacgcattgccctgatgtgctcgcgcaggtagctgatgcgatagtcgtcattgatgtccccattggcatcgatctcatcgcgggcgccaagcccgttttccaccaggaacagcggtttctgatagcggtcgtacatcaagttcatggtgatgcgcaggcccagcgggtcgatgccccagccccattcgctggccggaatgtgcgggttcttcagcgacttgacgatgttggcggcattggtgttgctggcgttcatctccgccgaggcgcagcgcgacgcgtagtagctaaaggagacgaaatcgacggtgtttttgaggatctcgtcatcgcccggctgtttcgcaatcgtgacccctttttcccggaacacccgcgcggcccacaccggataggcgccgcgggcctggacatcgataaagaacaggttttcgcggtccttctccagcgccatccatacatcttccggcttgcaggagtaagggtagaaattaccgccggccagcatacagccgacctgattttgcgggttaatctcatgggcgattttcgtcgccagcgcgctggccaccagctcgtgatgcgcggcctgatacttcacctgctcctgattttctccctcctcaaacaccagaccggcgccggagtaggggctgtgcagcatgatgttgatttcattgaaggtgagccagtatttcaccaggccgtcaaaagcttcaaagcaggtgcgggcgtagtggctgaaaaaatccaccattttgcggttgcgccaggagccgtactccatcaccagatgcatcggcacgtcgaaatgacacagggtgaccagcggctcgataccgtgctttttgcactcctcgaacagtgagcgatagaaggcgatgccctgcggattcggctgctgttcgtcgccgcgtgggaacaggcggctccaggcgatggaggtgcgaaagacgctgaaccccatctcggccatcagggcgatatcttctttatagcgatggtaaaaatcgatcgcctggtggctggggtaaaattcgtcttcacgcagcgtaaagcgcttctccaggcctaattttaccggcaggcgatgcgcgccgtggggaagggtatccacggtggtcagccccttaccgccttcaagataagcgccttcagactggttggcggccagtgcgccgccccataaaaatccctgtgggaaactctccatgcattacctcattatcaatagtgtattcaggcgtgggatgcctgggcccgggcctggcgcgctctggcgtcggcagcggcctgctcaacgggaatgtcctcaaagccaaggatcagcgtcagggcaaacgacagcaccaccgacagcgccatcacgccaaacacccagacgatggtcattggattggccggatcgaaaaactgcacgctggtaaacagccccggcgccgccatcgaatggctggccagtccggcaatacctgccaccgcgccgcagataaagccgctgattaagctggcgatcagcgggcgcttcaggcgcaccgccacgccatacagcgccggttcggaaatcccggccagaatcgccgatgccgcggcggccagcgccgtctggcgcagctccgggtttttggttttccacgctaccgccagcgaagagccgccgagcgacaggttggcgccgatctccgacggcatcaccataccctctttgccggtttcggcgatggtctgaatgatggtcggcgtaaagacgcggtgcataccggtcatcaccaacagcggccacagcccgcccatgatcgccaccgacagccagccgagatagctgtggatcgtatacaccagcgcggaaatggcgctgccgatccagatgcccagcgggccaatcagcaggatcgccagcggggcggcgatcagcacgatcagcatcggcttcagaaagtttttcgtcaccgccggggtaatgcgatccacccagcgctcgatatacgacaggcaccaggtcatcaccagcgccgggatcaccgtgtaggtgtatttcaccgcggtaaccggaataaaggcgaattcaacgtgttctccctgggcggctttggccatcaattcgataaacccaggatgcaccagcaccccggcgatggcgatagccagcgacatattagttttgaatttcaccgccgcggaggcggccaccatcagcggcaggaagaaaaatgcgccgtcgccgataagcgccagcagggtcagcgtcggcgagcctttcggcaacgcgccgctcatctcgaggatcatcgccagcagcttgaccatcgatccgccgataatcgccgggatcagcggtgacatggtgccgatcagcgcgtcgaggatcccggcgccgatgcgtttcagggtcagcggcgctttgccctgcggctcagccgggcgcaggtcgccaggcagcagattcaccacctcgcggtaggcctgggagacagtgttgccgatgatcacctggcactggttatcgctgcgcacgacgccgagcaccccggccaggcctttcagggtagagctatcgacctgttcgtcgtctttaaccacgaagcgcagacgggtcatgcagtgggtaacggcggcgacgttgtcgaccccgccgattgccgcgactatctgttgcgccagggctgcataatttttcgacatcggattttatcctgtttatcaatagggtactaatctgccaccgccccgcatcgccgggcgataccatgtttttataggaaaccggttccacaaaatcatggtgagtttcatttaattgcacaagaaataaaaaaatatgatctcaattttgtgattttgatcgctaagcgtcgccgtgagccggatcgcggtggtgaacaggggagtgctgtaaaagcgggaaacgtgcagtacactgcctgcaacttttgcaacaggaagaatcacatggcaacgatgctggaggtcgcaaagcgcgcgggggtatcgaaggcgaccgtttcgcgggtgctgtcgggcaacggctatgtcagccaggagaccaaagaccgggtgtttaaggcggtggcggagagcggctaccggccaaatctgctggcgcgcaacctggcgaccaaaaccacgcaaaccctcggcctggtggtgaccaataccctgtaccacggcgtctattttagcgaactgctgtatcacgtggcgcggatgacggaggataaagggcggcagctgatcctggccgacggcaagcacagcgcgcaagaggagcgggaggcgatccagtacctgctggatctgcgctgcgatgcgatcatcatctacccgcgctttctcaccgttgatgagatggacgagatcgttgagaaccactcgcagccgatcatggtgcttaatcgccgcctgcgccgccacgccagccactgcgtctggtccgatcaaaaagcctcggcgatgcgggtagtggagcggctgattgcgcttggccatcgcgatatcgcctttattaccggctcccttgactctcccaccggcgtcgaacgcctcgccggctacaaagacgcgctggctggccacggcatcgccctgaacgaggcgcttatcgccgaagggcgctggacgccggaaaccggggcggcgggggtggagagcctgcgtcagcgcggggttacctacagcgcgctggtggcgagcaatgacgatatggccatcggggcgatgaagcagcttcaccagctgggcgttaaggtgccagaacaggtctcggtggtggggtttgacgatattgctcttgcgccgtatatggtgccgtcgctcgccagcgtccgggtgccggtgacggagatgattaaagagagcatcaatcggctgatctttatgctggatggcggggaattcaactttcagcaaagctttcccggagcgctgattgaacgcgagtcgctggtggcgggcccctgtgcctgacgtcgtcagctgtcatcgtcactactgacgatgacagcaaagcccagctataatagtctttataatcaatatattaaaaacttggaacgtattatgcatactccggcgcgtaaccttcttactgctggagaaatggatgaaccgtttcattatcgccgatgcgagcaaatgtatcggctgtcgcacttgcgaagtggcctgcgtggtatcccatcaggaacatcaggactgcgcctccctgacgcctcacacctttcagccgcgtattcacgtgatcaaaggggtcaatgtttccacggcgaccgcctgccgtcagtgtgaagacgccccctgcgccaatgtctgcccgaacggcgccatcagccgcgataaaggctttgtccatgtgatgcaggagcgttgcatcggctgcaaaacctgcgtcgtcgcctgcccgtacggggcgatggaggtggtggtgcgcccggtgatccgccatagcggcgccggactgaacgtcgtggcggaaaaagccgaagccaacaagtgcgatctctgcttccaccgcgagagcggcccggcctgcatggaagtctgcccgacgcatgccctggtgtgcgttgaccgcaacaaacttgagcagatgaatatcgagaaacgtcgccgtacggcgctggcctggtaacaccgggtatgaacggggtgcaaatccgcattcgcggcaaagtgcagggggtcggtttccgcccctttgtctggcagctggcccgggcgcaggcccgctgcggcgatgtctgtaacgacggcgacggcgtactggtgcggctggtcgggggcgacgacggttttactgccgctctggctgaccactgcccgccgctggcgcggatcgacagtaccgactgcaccccctatcgctgggcggctctgccgcaggatttcaccattcgcgagagcgggacgggacggatgcgcactcagatcgtgcccgatgccgcgacctgcccggcgtgcctcgcggagatgaacgatccccgggcgcgccgctaccgctacccctttatcaactgcacccactgcgggccgcggctgaccattattcgcgccatgccctacgaccggcccttcaccgcaatggcgccgttcccgctctgttccccttgtgaggcggaattccgcgatcctgccgatcgccgttttcacgcccagccggtggcctgtcccgactgcgggccgcgactggaatggcgggcagagggggaaacgctggacggcgaggcggcgctgcaggcggctatcgcccggctggcggcgggcgacattgtggcgataaaaggcatcggcggctttcatctggcctgcgacgccggtaattccgcagccgttgccacgctgcgggcgcgaaaacaccgtccggcgaaaccgctggcggtgatgttgccgtcagcggcgggcttacccgccgacgccgcggcgctgatgggctccccggcggcgcccatcgtgctgattgctaaagcgcaggtctccggcctgtgcgacgagattgcgccagggcttgcggaagttggggtgatgctgccgtctaatccgctgcagcatttgcttctgcagggcctggcgcgccccatcgtaatgacctccggcaaccttagcggccgtccgccgacgttaagtaatgctcaggcgctcaatgagttagccgacattgccgacggctttctcttgcataatcgcgacatcgtacagcggatggatgattcactggtgcgctcaagcggtgaaatgctgcgccgcgcccggggctacgtcccggacgcgctgccgctgccgccggggctaggagacatcccgccgctgctggctctcggcgcggatatgaaaaataccttctgcctggcgcgcggcagcgaagcggtgctgagccagcactttggcgatcttggcgaggaaggtgttgaacagcagtggcgcagcgccctgcagctgatgcagagcatttacgcgtttgtgccgcagcgggtggtggttgatgcccatcccggctatcgctcaacgcagtgggcggcctccctgcccttgccgctggagacagtgctgcatcaccatgcccacgccgcggcatgcctggcggagcaccgctggccgcttgacggcggggacgttatcgccctgacactcgacggtattggtatgggggagaacggcgcgctgtggggcggggagtgcctgcgggtcaactatcgcgaatgcgaacatcttggcgggctgccggccgtcgcgctgccagggggggacctggcggcacgccagccgtggcgaaatttgctggcccactgtttggcctttgtccctgactggcaggattatccgcaggccgcccccctgcgccagcgcaactggccgctgctggcgcaggccatcgatcgtggcattaacgcgccgcgcgcctcatcctgcggacggctgtttgatgccgttgcctgcgccctggattgcgcgccggagagtctgagctatgaaggcgaagcggcctgtcggctggaggcgctggccgccagctgccccggcgtcagccacccggttacgctgccgtggtgcgacgacgcgctggatttagcgaccttctggcggcaatggctgagctggcaggcgactccggcgcagaaagcctgggcattccacgacgccctggcctgtggactggcggcgatggcccgcgactgcgccaccgtccgcggcatcgacacgatggtctgcagcggcggggtgctgcataaccgcctgctggcggcgcgattgaccttttatctggcggattttactctgctgtttgcacagcagttgccggccggcgacggcgcaatcgcctatggtcaggcggtgatcgccgccgcccgcgggcaggctcaaggaatacaaccatgataatgacagttttacgccagcagccgcgcgccgcgggtctggtgctggggttgatcgcggcgaatttactggcctggtgctgggcgctgcaggcctttggcgacagcggcgcgctgatggccgccagcctgctggcctggggctacggcctgcgccacgcggtggacgccgaccatattgcggcgattgataacgtgacccgcaagatgatgcagcaggggcggcggcctttcgccgtcggggcttggttttcgctgggccactcatcgattgtggtgctggcctcggcggcgattgccgcgaccgccaccgccttcagcacgcagatgagctggctgcatgataccggcagcgtcattggcaccgccgtgtcggccctgtttttactggcgatggcctttatcaacctggtgattttacgcagcgtgtggcgcagctttcgggcatggaagcgcggggagccggtgagcgacgaaatcgtcagcggcggcggggtgatgagctggctgtttggcaagaccttccgtctgataagccgcagctggcagatgtacctggtcggtttcctgtttggcctcggttttgataccgccaccgaaatcggcgtactgggtatctccgccgccggcgcgtcgagcgggatttccgtctggtcgattatggtctttccggcgctgttcgccagcggtatggcgctggtggatacgcttgataatgtgctgatggtcggcgcctacggctgggcgttcagcaagccgcagcgcaagctctattacaacatgaccatcaccggtacctcggtggtggtagcgctgtttatcggcggcctggaagcgctgggtctgctgatggataagtttgcgctcagcggcggaatatggcgctgggtaggggcgttaaacgacaacctcggcgacgccggatttgtggtggtcgggttgtttgtcgcctgttgggcgctatcggtgcttaactatcgctggcgcggctacgacaatctggcgcgctaggctggatatgttcccggcttgcgctgcgcttagccgggctaccaggacaataccgtagcccggctaaggtgtttacgccgcaagccgggaaaaccatcaacttaccagttgtttgagcagcgcaaaggcttccttcattttgtcttcactcaccacaaaggcgcgcagctggttttcggcatccacgcctttcgccaccagcccctctttggcggccacgatattccacgtcagatcgtcgcggcgggtgtcgccggccagatgcagcggcagatccggggttttcaccttcaccagcattggcggcagcttgagttctcccgcctgcgccagcagatttttactcaggcacatggcgctgagtaaaatcggctgcaggaacggcagtaccacgccgttgatttccgcacagtcgccgagcgcataaatcgccgggtcgctggtttgcagctggctattgaccacaataccgcggttaatctgcagtccggcgtggcgcgccagcgacgtttccgggcgcaggccggcggcggccaccaccgcatcgacggttatcgcgcgctggcgatcgagactgacgcgaatgccgtcggcggtttgctccagcccctccagctgcgttttcagcatcagatgtacgcccatctcggtgagccgatgctgcaggcggctgctggcctccggcggcatcagcgccgccagcacgctggcggagttatcgactaccgttaccgctttaccggcgcggcagaaatccatcgccagttcgcagccaatcaggccgccgccgacgatcagcacgcgcttcgcgtcgtgcagccggctctgcgccgcgccatattcgcgctggctattgagcgttagcatcagctcgcgccccggcaccggcggaataaacggcgtcgcgccggtggccagtaccagtttgtcgtagcgccactggttatcctggctcttcactaaccggttttcggcgtcgatatcgcttacccaggtatggggaaacagacgcagagtgtactgctcggcgaactcgccggcgctttgcagggtcagatcgtcggccttctgtccgcggctgatgacatggctgaggtccggtttgttgtattcatccatgctatcggcggcgatgagggtcagcgggatttgcgcatcctgcttacgaatatttttcaccagctggcgggccgcgaagcccgagccgatgatgacgatgccatcactcattttgcctccgtcgccagtacgtcaaagacatctttgccaagagaacactcagggcagaggaaattgtccggcacttcactccacggtgtacccggctgtacatcctggttaggttcgcctttcgccgggtcatagacccactggcacacgctgcactgcatcatgggaccgagatcggcggccgcggcggcggcacaggcgcagtcctgtggttccggcgttgtcgctgcttcagcaaccggcagcggcgagagggcccactggcgggcgatgtcgcgaccgtgttggcggcacagctccagcgcgtcgatatccgggcgccatttggctttcaggctcagcgacatctcaaagccggcatcctgcaggcgggtggacaggcggtctaccgcgccgccgctccagccgtgcgagccaaaggcgctggcgcgtttattgcgaaaacgcagcccggtcatctcttccaccagcccggcgattttcggcatcatcacgttgttcatggtggacgtgccgacaagtacgcctttcgagcggaaaacattggtgaggatgtcgtttttgtcgctgcgggcgacgttaaagattttcaccgctacccgtgggtcaacctcggtgatcccctgggcaatggcgtccgccatcatgcgggtattattggacatggtgtcgtagaagatggtgatgcgatcttcctgataatccgccgcccactcgaggtatttctcgacgatttgcgtcgggttatcgcgccagaccacgccgtgggaggtggcaatcatctccaccggcaggttgaaaccgaggatttcagtaattttcggcgtcaccaggcggctgaagggcgtcaggatgttggcgtagtagcgctggcactgttcgtacagttcagtctggtccacttcatcgttgaacagatgttcgtcgcaatagtgctggccgaaggcgtcgttgctgaacagcaccgcgtcgccggtcaggtaggtcatcatgctgtccggccagtgcagcatcggcgtttccacgaagatcagctgtttaccgttaccgatgtcgagagtatcgccggttttcaccacgtggaagttccactccggatgatgatggtggccgttgatcgagtcgatggcgttggcggtgcagtagatcggcgtatcggggatctgcatcatcagttcggtcagcgcgccggcatggtcctcttcggcgtggttaatgacgatatagtcgaggtcggcgaggtcgatttcgcggcgcaggttctgtacgaactcgcggctgaatttatgatcgacggtatcgatcagcacgtttttctcttcgcggatgagatagctgttgtagctgctgccgcgcagcgttttatattcggtgccgtggaaatcacgcacttcccagtcacgttggccaacccaaagaatgttatttttcaccacaatagacatagcaacctcaatcaatacagtgtgtttaaactcagttgactggcttatatcaagttgcgtgccaactttttaattcattgataattatctatttttaattttttctgattttggttgttgtcaaaatgacaatggttaaaatagtcgatatgataatgcgtattgtcaaaatgacaatggagcggcaatgagtttttccgtcgacgagctggcgagaatcgccatagatttacaaagcgatattggtcacaccgaccgcttttcgcgcctgattactaccctgcggcaaattcttggctgcgatgcctcggcgctgctgcgctatgaggcgcatcagtttgtgccgctggcgatcgatggcctggcgcaggatgtgctcggtcggcgctttgccctggaaggacacccgcggctggaggcgattgcgcgcgccggcgatgtggtgcgcttcccggcggatagcgacctgcccgacccctatgacgggctgatccccggtcatgagagcctcaaagtccatgcctgcgtgggactgccgctgtttgccgggcagacgctgattggcgcgctgaccctggacggcatggatgccgatcgtttcgatagcttcagcgatgaagagctgcggctggttgccgcgctggtggccggggcgctgaataatgcgctgcttatcgcccgccttgaagcgcaaaacgtcctgccggcgcaggcggtgaattacccgctgccggagcgccaggagatcatcggcctgtcggggcccatgctgcagctgaaaaaagagatcgatatcgtcgccgcctcggatttaaacgtgctgatcagcggcgaaaccggcaccggcaaagagctggtggcgaaggcggtgcatcaggggtcgccgcgagccgccaaccctctggtgtacctcaactgcgcggcgctgccggaaagcgtagcggagagcgagctgttcggccatgtgaaaggggcatttaccggggctatcagcaaccgcagcggtaaatttgagatggcggataacggcaccctgtttcttgacgaaatcggcgaactgtcgctggcgctgcaggccaaactgctgcgcgtgctgcagtatggcgctattcagcgcgtcggcgatgaccgcagcctgcgggtcgatgtgcgggtgctggcggcgacgaaccgcgatctgcgccaggaggtggtggaagggcgctttcgcgccgatctgtaccatcggctgagcgtcttcccgctgtcggttccgccgctacgcgagcgggaaagtgacgtggtgctgctggcgggctatttctgcgagcagtgccgcctgcggatggggctggcgcgggtcattttggctgaggcggcgcgaaaccggctgcagcagtggtcctggccgggcaacgtgcgcgaactggagcatgctatccatcgggcggtggtgctggcgcgggccacccaggccggtgatgaagtggtcctggagccgcagcatttccagtttgcggtggcggcgccgatgttgccgactgagacggcggcagcggcgcccgcgacgggaaacatcaatctgcgcgaggcgaccgactcttttcagcgagaagccattagccgcgcgctggaggcgaaccagggcaactgggcggcgaccgcccgagcgctggaactggacgtcgccaacctgcatcggctggcgaaacgtctggggcttaaaggatccccgcctggtaaaagttctgcaggttaatggcgccgaccagttggccgttctcatccactaccggcgcggcgctgattttgtgtttcatcagccgctctttggcttccaccgcgcggctatccgcctgcagcgttacgccgttgcgggtcatcgcccgagtgacgccatcgttgagcgtaccgccagcaaccagccagcggcgcaggtcgccgtcggtgaaaacgccctgcacgcggttggcttcatcgcagaccgccaccaggccgagtccggttcggcttagttcgagcatggcgtccatgacgttagcctcggtattgacccgcggcacttcttcatcacgacgcatcaggtgatgcactttgttcagcagccgcgcgccgagggcgcccgccgggtgggaacgggcgaaatcctcttcattgaaaccgcgcgcctgcatcaccgccatcgccaacgcgtcgcccagcatcagcgtgttgacggtgctggaggttggcgccagatgcatcgggcaggcctcgcgctccacggcgatatccagcaccgctttcgccgccagcgccagcggcgaggtggatttgccggtcatcgccagcagcggaatgcctttttcttccagccgcggcacgatgagatccagctctttcgcgctaccggagtaggagataaacagcatcacgtcgcggctatcgagcatgccgagatcgccgtgcagggcttccgccggatggacgaaaaaggccggggtgccggtgctggcgaaggttgccgccagctttttaccgatgtggccggatttaccgataccggagacaatcagtttgccctcgcagtggataatggtttccgccgcgcggatgaagtcgtcgcccaggcgctccggcaggcggctcgcctcctgcagctcaagcatcagggtctggcgtccggcctctaacaaaaagttactcatgatgttctccagtaataatgacttcaatgcctttggcttccagcgcccgctggaattccgggtcaatatcggcatcggtaatcaatttatccacgcgttcaaggccgcagacaatattgggacttttacgaccaaacttggatgagtcggccatcaggatcacttcgcgggcggcgttgcacatcgctttgctgacggtatagacctcattaaaggtagtgactccggcgttcagatcgataccgtcggtgcccataaacagcttgtcgaagctgaactgttcgaaggcgttttccgccagctggccgtgaaaagaggccgattttttacggaaggtgccgcccggcatcaggatggtctgctcgttatcgaactctgatagcgcgttgacgatatgcaggctgttggtcatcaccgtgatgttattaaagtgactcagcaatggcaccatctgcagcacggtgctgccggcgtcgaggataattgaatcgccatcgtggatgtatcgcacggcggcctcggcaatctgggcttttttatgggtgttgatcagcgtcttatggtcgatcggcggatcggcttcatccttgttgagtaccacgccaccgtaggtgcgaatgacggtgccggcgttttccagcgtgaccagatccttgcggatggtggtgccagtggtatcgaagtgttgcgccagctcttcgaccgagcattttccctgcgactgcaggaactcgagaatggctgcctggcgctgacgtggtttcataggcgtctatcctgcgtttaagtttcgaagtgataatttcgcaagatatttacttttacaacgaaattatccatgtttcggattaagcgctaatgatagtgcattctgacagcgcggatcatggggaaagatcacatcaggctgcaattccgcaatatgtttgcctgccagagccgggatcttttgcggactggcgaaaatggtgaagcctttcatcagcagcgtgtcgctaatgcggtcgttatcatcgacggcgatggcgacgatggcgcgcggttgaaagcgcccggcggagcggccgacgcccacccgcccctgctggcacaggctatcaaaggcgcgattgaagcggcggatctgccagccgccaaaggccagctgggtaagccaggcgatggcggcgacgatgattaatgcagtaaccataggtctctccttaaggggggcgggaacagcccaggtcacggcgcgagcgcctaacccgagcgacccgcggtgccgttttttgtcgggtggcggctaacgccttacccgacctacagttttgtagcccggataagcgcagcgccatccgggaacctgttaaaacatcacctggccgccggtgacgttgatcgactgcccggtgcagtacgacgcctgtgggctagcgtaaaacatcaatacgttcagcacatcctgatattcgcagccgcgcttcagcggcaccttgtcgatgtagtactgctcgacttcgctctcatcgataccgagcttggtggcatactgcggcagcagcgactggaacatcggcgacttcagcagattgccgagcatcagcgaatgcacggtaatgccatattccgccagatccagcgccagcgactgggtcagcccgacgccgccgaacttcgccgcgctgtagccggagttgtgcttactgccgactttgccggatttcgagttgatctgaatgatccgccccttaatgccgtcgcggatcatcaaccgcgagaactcgcgggcgcagagaaaatagcccaccagattgacctgcagcgagcggtcgaaatcccccagcgcgaagtcgctaataaacgccgccttggcgatcccggcgctgtacaccagcaggtcgacgcgcgaaaaaatctcatccaccccgtgggccagggcggtgacgctggcctcgctggtggcgtcggcgccgaagccgtacgccataccttcgccatactcagcgttaatctcctgggcgacgcggctggctttttcgctctgaatatcgaccaccgccacgcggtagccctcggcggccagcccgcggcacagaaactctcctaaggtttgtccaccgccaatgacaacagcaacctgattcatctctctctccttttaagcaacaaacttcagtacgcagccgggcgcgatggcgtccggcaccgggcccgccacatggacggtacctgggaactccgcttcacgatggccgtcaaagcgcagggtgatgtggcccagctcgcgcaggttttgttcagcgacctcgccgacggcggtcaccgggtagcgctgttcgccaagctgcagctctgcccccggctgcagcgtgccagcaagctcgccgtggttgtgaataaagcagtactcttcgatatccgccggggcgccctcgcggaaggtgatcagcatttgctcttccagcgccatcgtcgcgcaggcgccgatgtgcgtaatggtggtctggtaaatcacagtcatctgcaggaacctcttactggtaaataaatccggaaacgaaccacgcgatcagcaccgttggtgcgccggtcagaaagcggctgaccagcaccgacggcacgccgacgcgcacggtatcctggcgggcttcggctagcgacaggcctaccggaataaaatcgcgggcggcctgggcgctaatggcgaatagggcgggcagggcgaggtgcggcggaatgttgccgaggccgatttgaacgccgatcagcacgccgatcacctgggcaataaccgcgccggggccgagaaacggcgacagcagcgggaaagagcaaatcagcgccagggttaccagccccagcggatggctggcgagcggcgccaggccgtgggcgatccagtcgccgatgccggaggccatgatgatgccgatcagcgccgagacgaaagccataaacggcagaatggttttcagcaccgtatcaatggtgtcgcgcccggcctggaacagcaccgccaccaccgaacccatgcccatcccgaccttcgccagcaggccatcgctctgttcagtaatcttcttgctggtgtcgtaatcgcgacccgcgctcttgttttccgccggcggctcggaaacccctgcgctgtcgggagcgatgcactggatgttgtcctctttgacgccggagacataaatatcttccgtgatgtactgggccagcggccctgatttgccggtggcatgaatattcaccgtcgggatgcggcgcttaggatagagcccgcagcgcagggtgcccccgcagtcgataattgccacgccgatgtcgctttccgctggttccccccctttaaacccgtccaccggctgccagccggtcaggctggcgatgcggtcaacgatcgccgggcgggtgccggcggtgatatagacgatctttttgccttcgacggcgtcgagctcaagcgggccgccccagccgccggtgcctttctctatacgaatacgggtcatgatgtcgctcctgacagatgcactttccgggaaagctgaatcgccatttttctctcgaaaatcgaggtggtcaggtcggtgacccagccgcggaagaagttagtcaccagcccgaccagcaggtagctcaccgccagcggaccgagcggtaggccgagggtagtgaggccgttggcgatgccgagatagacgaacagctcgccggggttgatatgtggaaacagcccgttcattgagtggcagctatacgacgccgccgcgtaatagctgggcttgtacttctctggcataaaccggccgaggcttaacgtcattgggttacaaaacacgaaggtgccgatgcagggtagcagcaggtagcgggagattgggtttcctgcgcagcgctgcgccagcttctcgatccgctgctggccgataaagttgatcagcgcgttcatgatcaccagcaggctgatcagcaaggggaggatcccggtcaccatgccggtaaatacctcgccgcctttctgaaacaggccgataaaccactccgcgccgtgggtcacgacgtcaatcattgttctctccttcagcatgttatttttcttgctaatcgcaggctgattttaatcattttgaaaggtttaaaagtgttagatggatcgcaaaatgaaagataaatattttattttgaaagatgatgcgggcgagatgaaatgttgcagggcatgaaagcacgcacgggaggagccgttgaaggactattttgtctacaaacagattgtcgctttcttgttggtcgtcgcatgctttaccataattatcccttgctgaatttgttaaacggaattcccatgttgaagcgtcgctatctggctttacttcccctttgtgtgctcctcgctgcctgcagcagcaaacccaagacccccgcggaaacggagatggcgagtggaaccggcggctttttgctggaaccgcagcataacgtgatgcagatgggcggcgacttcgccaacaacccggcggcggcgcagtttatcgataagatggtggcgaagcacggcttcgacaggcagcagctgcaggagatcctgtcgcaggcaaagcgcctggattacgtcctgcggctgatggatcgtcaggcgccgaccggcctgccgccaaccgggccgaccggcgcctggctgcgctacaagaaacagttcattaccccggataatgtgcagaacggcgtggtgttctggaatcagtatcaggacgcgctcaaccgcgcttatcaggtttacggcgtgccgccggaaatcatcgtcggcattatcggcgtggagactcgctggggccgggtgatgggcaaaacccggatcctcgacgcgctggcgacgctgtcgtttagctacccgcgccgcgccgaatacttctcgtcggagctggaaactttcctgctaatggcgcgcagcgaaagcgacgacccgctggatctgaaaggctctttcgccggggcgatgggctacggtcagtttatgccgtcctcctataagcagtatgcggtcgattttaacggtgacggacatatcaacctgtgggacccggtggatgctatcggcagcgtggccaactacttcaaacagcatggctgggtgagcggcgatctggtggcggtgcaggcgctggggcaggccccggggctggagaatggtttcaagactaaatacagcgtttcgcagctggcggccgcagggctgaccccgacccagccgctgggtaaccatcagcaggccagcctgctgcggctggacgtcggcaccggctatgagtactggtacgggctgccgaacttctacaccatcacccgctacaaccacagcacccactacgcgatggccgtctggcagctgggcctggcggttgcgcaggcccgcggcggttattaatcctttcatccggctgacaatttcccagcctccccggatagcggcgcgtagcgccttatccgggctacggtctggtacccggttgctagccccggtaagcgcagcgcgaccgggggagagttcaatgacagcttgtcgcccatcggcaacactgcggctacgttacgcgccgtcatccgcacgttggcggcggagttcgccagcgctttatccgggttacggtctggtatccggttgctagccacggtaagcgcagcgcgaccgggggatgacgccggggaggccgcgcttatccccccgttttttcccgtctccatgcctcttgttgacctttgttacatttccgctgactgacgctgatttacattctttcttcgcttcgttattgttatgttataacattaaattgaggcaggggtatgttcacatcgatttttatggcatccggcgcggcgcgcgcggctatcgcaggcgtgctgctggcggcgctatggttagcaacctggtgggcggtgacgctgccatgattgaactggagcagctggtcgccggctatgacggggtagcgatcacccctccgctgagcgggatgatatgccccggcagcctgacggcaattgttggcctcaatggctgcggaaaatcaacgctgctgaaaaccctcgccgggtttcttcctccggtcagtggccgcctgtgctggcagggaaaacggccggtgatcggctggctggcgcagcgccatgccctcgagtcgcagtttcctctcaacgtgcaggatgtggtaagccagggcgcatggcccggcgtgtcgctgctgcgcggtctggggggcggcacccggcgacgcatcggcgcggtgctggagcgggtcgggctggcgggcctggcgaaaacgccgatcgaagcgctctccggcggccagtttcagcgcatgctatttgcccgggtgatggtgcagcaggcgccgctggtgatgctcgacgagcccttcaccggtatcgacgaagcgaccagtcgcgaactaatggatttgatcctcgagatgcaccggcagggacagaccatcctggcggtgctgcatgataaccagcgggtggccgactttttccccgagacgctgctgctgactccccagcgcgcctgctggggcgctacccgggcggtgctcccggccttcagtcatgtgaggtcggcatgatctggcacaccttctttcagcctttcattgaattcggctttatgcgtcgggccctcgtggtgtgtctggcgctgtcgctgagcaccaccatgctgggcgtcttcctgctgctgcggcgcatgagcctgatgggcgatgcgctgtcgcacgccattctccccggcgtggcggtggggtatctgctgagcggcatgtcgctgctggccatgaccctcggcggcttcatcgccggcatcgtggttgccctggtggccgggtgggtgagccggcggacaccgttaaaagaggacgccagttttgccggattttatctgggctcgctggccctgggcgtcaccctggtgtcgctgcgcggctccagcgtggacctcctgcatctgctgtttggctccattctggcggtcgaccgcgatgcggcgctgtttgtcagcggcgtcgccagcctgacgctattgtgcattgcgctgtgctaccgcggtctggtcagcgaggcgttcgacagcgcctggctgcaggtgaatcaccggcggctgcctgcgctgctgcatgggctttttctggcgctgctggtgcttaatctggtggccgggtttcaggtgctcggcacgctgatggcggtaggggtaatgatgctcccggcggtcgccgcgcgctgctgggcgcgcacgctgccgggcattctgctactggcggcgggaatgggcgcgctctgcgcctggctgggattaagcctctcctgggcgattagtcttcccgccgggcccgctattgtgctgaccgccagcgcactgttttttgtttcgctattttttggcacgcgcagccggctgctggtcggttggcgcacattgatggggtaaggaaatgatgaaacgtagtgcaatagtggtcgcgctggccctcggcctgatggcgcagggggccatggcgaaaacgctgaatgtggtaagcagtttttcggtgttgggtgatatagcgcagcaggtcggcggggagcatgtccatgtggataccctggtcggcccggacggcgatccgcacaccttcgaaccgtctccgaaggatagcgcgctgctcagcaaggccgacgtggttgtggttaacggcctggggctggaagggtggctggatcgcctgattaaggcctctgggtttaagggcgagctggtggtggcatcgaaaggcgtcaagacccatacccttgatgaagagggtaaaacggtgaccgatccccacgcctggaacagcgcagcgaacggcgcattgtatgcgcagaatatcctcgatggtctggtgaaagccgacccggaagataaagcagcgttgaccagcagcggcaagcgctatatcgaccagctgacgtctctcgacggctgggcgaaagcgcagttcagcgccattccgctggccaagcgcaaggtcctgaccagccatgacgctttcggctattttggccgggcttaccacgtgaccttcctcgcgccacaggggctctcttcagagagcgaggccagcgcggcgcaggtggcggcgctgattaagcaaatcaaagcggatggcgtccatacctggtttatggagaaccagcttgacccgcggctggtgaagcagattgccagcgccaccggcgcgcagccggggggcgaactctatccggaagcgctatctaagccgggcggcgtcgccgatagttacgtcaaaatgatgcgtcacaacgttgagcttatcgctaacagcatgaagtaacaggttgtctggtcgtcctggttatcacaggacgacccatttctggatcccccctcgtaaaatcgccgcttcatccccatatctctgtcgaaagtgctatctttgatggcctctttatccagagcaaagcggggcgataatgaccgattcagaattaatgcagctaagcgagaagattggccgggcgctgaaggcgcgtggggcgacggtgaccacggcggaatcctgtaccggcggctggattgcgaaagcgatcaccgatattgccggcagctcggcgtggtttgaacgcggctttgtcacctacagcaacgaagctaaatcgcaaatgatcggcgtcagcgaagcgacgctgcgcgacaacggcgcggtaagcgaaccggtggtggtggagatggcgattggcgcgctgcgcgcggcgcgtgcggattatgccatctccgttagcggcgtcgccgggccggatggcggcagcgtcgaaaagccggtcggcacggtatggttcggcgtcgccagcgtgagcgggcaaggggtgacgcggcgggaatgctttgccggagaccgcgaagcggtgcgtcgtcaggcgacggcctatgcgctaaatctgctctggcaacaatttctacaaaacacttgatactgtatgactatacagtataattgcctcaactgaacaaatattaacggcgaagcgaacacgctttaccctgcatgattaggagtaacaatggcgatcgacgaaaacaaacagaaagcgttggcggctgcactgggccagatcgaaaagcaattcggtaaaggctccatcatgcgcctgggtgaagaccgcaccatggatgtggaaaccatctccaccggctcgctttctctggatatcgcgctgggcgccggcggtctgccaatgggccgtatcgtcgagatctacggtccggaatcctccggtaaaaccaccctgacgctgcaggttatcgccgcagcgcagcgtgaaggtaaaacctgtgcgttcatcgatgctgaacatgcgctggatcctgtctatgcacgcaaactgggcgtcgatatcgacaacctgctgtgttctcagccggacaccggcgagcaggcgctggagatctgtgacgcgctggcgcgctctggtgcggttgatgttatcgtcgtcgactccgtcgcggcgttgacgccgaaagcggaaatcgaaggcgaaatcggcgactctcacatgggccttgcggcgcgtatgatgagccaggcgatgcgtaagctggcgggtaacctgaagcagtccaacacgctgctgatctttatcaaccagatccgtatgaaaattggcgtgatgttcggtaacccggaaaccactaccggtggtaacgcgctgaagttctacgcctctgtgcgtctggacattcgccgcatcggcgcggtgaaagagggcgacaatgtcgtcggcagcgaaacccgcgtcaaagtggtgaaaaacaagatcgccgcgccgtttaaacaggccgaattccagatcctctacggcgaaggcatcaacttctacggcgagctggtagacctcggcgtaaaagagaagctgattgagaaagcgggtgcctggtatagctacaacggcgacaaaatcggtcagggtaaagcgaacgcgatcacctggctgaaagagaacccggcggcggcgaaagagattgagaagaaagtgcgcgaactgctgctcaacaatcaggatgcgaagccagacttcgttgttgacggcaacgacgcagaagaaaccgaacaggatttctgatatcgtctgcaagactgacagggctgcttaggcagcccttttgctttgtgagattatcgaggtgcctgtgactgaaccttcatcacgccgctccggctacgcccgcctgctggaccgtgctatccgcattctggcgatgcgcgaccacagcgagcaggagctgcgacgcaagctggtcgctccggtgatgagcaaaaacggtcctgaggcgctggacgtcacccccgacgagctggagcaggttgtcgcctggtgtatcgaaaaccgctaccttgacgacaaccgcttcgtcggccagttcatcgccagccggagccgcaaaggctatggtccggcgcgcattcgccaggagctcagccagaaaggcattgcgcgccaggtcgttgaccaggcgatgcgcgaatgcgatatcgactgggtgagccttgccagggagcaggcacagcgtaaatacggcgaaccgttaccttccgcctttactgaaaaagtgaaagttcagcgattcctgctttaccgcggctacctgatggaagatatccaggaaatctggcgaaattttgcagattgacccatccgggattttacttcgccgtaaagaaaacttatcttattcccactttattccgtcgggccgctggttgtgactgtgcaggcagcggcctgggcgattattcctttacacaaaatcattcaagctgcatcagggcggcaagagagactctctttcgcaacgtacgtcagttcggtgccggaagagcaagcgcagccaggacagaggcgacttgaaggatgacgtgtagcttgatttcaggataattatgagcaagagcaccgctgagatccgtcaggcgtttctcgactttttccatagcaagggacatcaggtagttgccagcagctccctggtgccgcacaacgatccgaccctgctgtttaccaatgcagggatgaaccagttcaaggatgtcttccttggtctcgacaaacgtaattattcgcgtgcgaccaccgcacagcgttgcgtgcgtgcgggtggtaaacacaacgatctggaaaacgtcggttacaccgcgcgtcaccacaccttttttgaaatgctgggcaacttcagctttggcgattacttcaagcaggatgccatcaaatacgcgtgggaactgctgaccggtgagaactggttcgcgctgccgaaagaaaaactgtgggttaccgtttacgagaccgatgacgaagctttcgacatctgggccaatgaagtaggcgttccgcgcgagcgtattatccgcatcggcgacaacaaaggcgcgccgtttgcttctgacaacttctggcagatgggcgacaccggtccgtgcggcccgtgcaccgaaatcttctttgaccacggcgatcacacctggggcggccctccgggaagcccggaagaagatggcgaccgttacattgagatttggaacatcgtcttcatgcagttcaaccgtcaggctgacggtactatggagccgctgccgaagccgtccgtcgacaccggtatgggtctggagcgtattgccgcggtgctgcagcacgttaactccaactatgacatcgacctgttccgcgatctgatcgccagcgtggcgaaagtcaccggcgcgaccgatctgacgaacaagtcgctgcgcgttatcgccgaccacattcgctcctgcgccttcctggttgccgacggcgtgatcccgtcgaatgaaaaccgcggctacgtgctgcgtcgtatcattcgccgcgcgatccgtcacggcaacatgctgggcgcgaaggacaccttcttctggaaactggttgccccgctgatcgatgtgatgggctccgccggcgacgagctgaagcagcagcaggctcaggttgagcaggtgctgaaaaccgaagaagagcagtttgcccgcaccctcgagcgcggcctggcgctgctggatgaggagctgtcgaagctgaaaggcgacaccctggacggcgaaaccgccttccgtctgtacgacacctacggcttcccggtcgacctgaccgccgatgtgtgccgcgagcgcaacatcaaggttgatgaagctggttttgaagccgcgatggaagagcagcgccgccgcgcgcgcgagtccagtggtttcggcgccgactataatgcgatgatccgcgttgacggcgcctctgaatttaaaggctacgatcatctggagctgaacggcaaggttaccgccctgtttatcgacggcaaagcggtggatagcgttagcgctggccaggaagcggtggtgatccttgatcagaccccgttctatgcggagtccggcggccaggtgggcgataaaggcgaattaaaaggcgcgggcttctccttcgcagtcagcgacacgcagaagtacggccaggctattggtcatatcggtaaagtcgccagcggcacactgaaagtgggtgacgcggtgcaggccgacgtagatgaggctcgccgtcagcgtatccgtctcaaccactccgcgacgcacctgatgcacgcggcgctgcgccaggtgctcggcacccatgtggcgcagaaaggttcgctggtcaatgataaagcgctgcgctttgacttctcgcattttgaagcgatgaagccggaagaaattcgtgcggtggaagacctggtcaacgcgcagatccgtcgtaacctggctatcgaaaccaacattatggatatcgatgccgcgcgcgcatccggcgccatggcgctgtttggcgagaaatacgacgatcgcgtgcgcgttctgcggatgggcgacttctccacggagctgtgcggcgggactcacgcggcgcgtaccggcgatatcggcctgttccgcatcacgtcagagtccggcaccgctgctggcgtgcgccgtatcgaagcggtgactggcgaaggcgcgatggccatcctgcatgcgcagagcgatcagctcaatgatatcgctcagctgctgaagggtgacagccacaatctcggcgagaaggttcgcgccgcgctggagcgtacccgtcagctggaaaaagagctgcagcagctgaaagagcaggctgcggcgcaggagagcgcaaacctctccagcaaagcggaagagattaacggcgttaagctgctggtcagcgaactgaccggcgttgagccgaaaatgctgcgtaccatggttgacgatctgaagaaccagctcggttcgacgatcgttgtattagctacggtagcggatggtaaggtttctctgattgcaggtgtgtctaaggatgtgacaggccgcgtgaaagcaggggagctggttggtatggtcgctcagcaggtgggcggtaaagggggcggtcgtccggatatggcgcaggccggtggtaccgatgcgtctgctctccctgcagcgttagccagtgtgaaaggctgggtcagcgcaaaactgtaataactataaacgcatttaccctaaataattcgagttgcaggaaggcggcgacgcagcgaattcccaggagcttactctagtaagtgactggggtgagcgaggaaagccaacacgcatgcaacttgaagtatgacgggtataggtgccataaccagagggttacggcaccttgcgtcagaaacactgataacgataaagtcgggttgaaattgtgtatatcggctaaacttaggtttaacagaatgtgatgccatgactgcttataccctaaggtatttgtcatcgcttactttttggcgttatatgatggataatgccgggatacgagagacccgactcttttaatctttcaaggagcaaagaatgctgattctgactcgtcgagttggtgagaccctcatgattggagatgaggtcactgtgacagttttaggggtgaagggtaaccaggttcgtattggcgtaaacgcccctaaagaagtgtctgttcaccgtgaagagatctaccagcgtattcaggctgaaaaatcccagcagtccagttactaaggtttccgcgcctcgctgtgcagtgaggcgcatcacttaccgccgctttttccctttttctgttttttccccctgcgccataccgcttttcattaccctttgccgctttggtcgtttggcgttatgccagcgtcagggctgatttcctgttgataaattgccctttttgccgtttttgcacgcgaattgcgtgcgaagtgtgcaaacgaaaaaaggtctcgaaaaagtgtttgacttataagtaccagaaagtaatatgtgcgccatcgcagcgacgaagagcagaaacaagttcttcgaagcactcgaaagaggcgtgtgtggtgaggtggccgagaggctgaaggcgctcccctgctaagggagtatgcggtcaaaagctgcatccggggttcgaatccccgcctcaccgccattttgcatccgtagctcagctggatagagtactcggctacgaaccgagcggtcggaggttcgaatcctcccggatgcaccatcttctttctgaattaagagagaagagcgctgtgaaagcagcggcccgcagtgcgaggcataatcgagtcactctaccgattaggccatcatactcagtgtggcatgtgttagttgtgacactgacgcgtagtaaagcaagtttcccgatgcatccgtagctcagctggatagagtactcggctacgaaccgagcggtcggaggttcgaatcctcccggatgcaccattctttaataagaatggcaaatcgcgaaatttgatatcagaattacagcagtaatcccgatgcatccgtagctcagctggatagagtactcggctacgaaccgagcggtcggaggttcgaatcctcccggatgcaccatattctccttgataacagcgacgatgttgttttatggtctgcgaaattatcgccagcaccagggaggataacgttgcgtaagcaacggcccgtagggcgaggcgcagccgagtaatcctcccggatgcaccatattctccttagtaacagcaacattgttgttatctggtttgcgaaaccatcgtaagtgccaggagagtaaccccgcagtaaaatagctttcccgatgcatccgtagctcagctggatagagtactcggctacgaaccgagcggtcggaggttcgaatcctcccggatgcaccatattctccttagtaacagcgacgacgttgttttatggtctgcgaaatcatcgccagcaccagggggataacgttgcgtaagcaacggcccgaagggcgaggcgtagccgagtcatcctcccggatgcaccatattctcctcagtaacaacgacgatgttgttgcataggctgcgaaattatcgcagcacccgttctgaatgcataatcttcactcttctctcaccatcccgattacctcgttttccatcactggcttcatcctgacttttttattggcaagacgcgctttccactataatttatccttgtatatcagcgttatcaggctgagataaatgcaaggagagaaatccatgaaatggttcaaagcaatacctgctttttgcgcgacgctgctggtaacgacggccctcgctggctgtgcgggatcggctacaaaggagagtacgggcggctatattgacgataccgtggtgaccaccaaggtgaaaacggcgctctttaacgataaagacattaagtcctcagaaattagcgtccagacctttaaaggccgcgtccagctgagcggatttgtctcctccgcggagagcgctaaacgagccgtagaagtcacacgccgagtgcagggcgtgcgaatggtcgagaacgatctgcgtattaaataaggctggttatccggcctaatgtttgggggcgcctgagggcgcctttgtcgtctgcgccgctggccgcgacaacggcgggcttttgcgttacagtaatcattcccaaaccggttggtgagaagacaatgtacgaaggttacgcaggactgatctttgatatggatggcaccattctcgataccgagccgacccatcggcaggcatggaacgaggtgttgggccgctacggtatgcgtttcgacgaacaggcgatggtcgcgctcaatggctcaccaacctggcgaatcgcccaggcgattatcgaactcaaccaggccgatctcgatccacatcgcctggcgcaggaaaaaacccaggccgtcaaagcgatgctgctggacagcgtacgcccgttgccgctgattgaggtggttaaggcatggcacggccgtcgcccgatgtcggtgggaaccggcagcgagagcgccgtcgccgaagcgctgctggcgcacctggggctgcgtcattacttctccgcggtggtggcggccgatcatgtggtcaaccataaacccgcgcccgataccttcctgctgtgcgccgagcgcatgggcgtcgcgccggaaaaatgcgtcgtcttcgaagatgccgactttggtctgcaggcggcgaagcgcgcgggaatggacgcagttgacgtgcgtttgctgtgagcgacgcgctgtcactcacctcgctgtttgccagtagctttttaagcgccacgctgctccccggcaattcggaggttgtgctggtggctatgctacttgcgggggtcagtcatccgtggtggttagtattaatagcaacaatcggcaatagccttggaggggtaactaacgttattctggggcgcttgtttccgctgcgcaaaacctcgcgctggcaggagcgggcggccggctggcttaagcgctacggcgcggtcacgctcttactgagctgggcgccggttgtcggcgatttactgtgtttgctggcgggatggatgcgcatttcctggggaccggtactctttttcttatgccttggtaaggcgctgcgctatatcgctattgcggcagcgacgcttcagggcatgacgtggtggcactaattggactgacagttcatccattacaattatgcttattcaaacgatttcgacaggcgggaggtcaaattgatcccggacgtatcacaggcgctggcctggctggaaaaacatccgcaggctctgcagggtattcaacgtggtctggagcgggaaacgctgcgcgtgaacgcagacggcacccttgcaacgaccggtcaccctccggcgttaggctcagcgctaacgcataaatggattaccaccgattttgccgaagctttacttgagttcattacgccagtagatggcgatattgagcatatgctgacctttatgcgcgatgtccatcgctataccgcgcgtcagcttggcgacgagcggatgtggccgctgagcatgccatgctatatcgcccccggtcaggatattgagctggcgcagtacggcacctctaacgtggggcgcctgaaaacgctatatcgcgaggggctgaagaatcgctatggcgcgctgatgcagactatctccggcgtgcactataacttctccctaccgatggccttctggcaggcaaaatgtggtgtggaagatgccgagagtggtaaagaggccatttcggcgggctatttccgctcaattcgtaactactatcgctttggctgggtgatcccctatctgtttggcgcctcgccggcgatttgctcctcattcctgcaaggcaaaccgacaacgctgccctttgaggaaacgggcaacggcatgtattacctgccgtatgccacctcgctgcgcctcagcgaccttggttataccaataagtcgcaaagcaatctcggaattacgtttaacgatctgcacgagtatgtggcaggattgaagcgggcgattaaaacgccgtcggaagagtacgccaaaatcgggctgcagaaagacggcaagtatctgcagatcaacagcaacattctgcagattgaaaatgaactttatgcgccgatccgcccgaaacgcgtcacccgtcggggcgaaaccccgtccgatgcgctgttgcgcggtggtattgagtatatcgaagtgcgttcgctggatatcaatccgttctcgccgatcggcgttgacgcccagcaggtgcgtttcctcgacctgtttatggtctggtgcgcgctggccgacgcgccggagatgagcagcgatgagctgctgtgcacccgcaccaactggaatcgggtgattctggaagggcgtaagccgggcttaacgctggggattggctgcgaaagcgcgcagttcccgctggctcaggtgggcaaagatctgttccgcgatttacgccgcgtggcgcagaccctggacagtatccacggtggccaggcatatcagcaggtctgcgacgagctgctggcctgctttgacgatccggaattaaccttctcagcccgcattctgcgttctatgattgaagaaggcattggcggtaccggccgtgcgcttgccgatcgttaccggacgcagctgcgcgaagagccgctggagatcctgagcgaagacgattttatcgccgagcgcgacgcgtcggtggcgcgacaaaagaaagtggaagctgaagacagcgagccgtttgaggcgctgctggcgcggcacgcgtagcgctggaaaagaaaaaggccacatcactgtggccaaactttcatctctgattcagggatgatgatgataataaatgcgcgtctttcatatactgagactcgcggctgaacaaagagttcattttattttaaaaaaattcactcccggagttgacgaatgccgttgttagatagtttcacagtcgaccatacccgaatggaagccccagcggtgcgtgtcgcgaagaaaatgaacacgccgcatggcgatgaaatcaccgttttcgatctgcgcttctgcgtaccgaaccaggaagtgatgccggaacgcggtatccacaccctggagcatctgttcgcgggctttatgcgcgatcatctgaacgggaatggcgtggaaattatcgacatttcgccaatgggctgccgcaccggcttctatatgagcctgattggtacgccggacgagcagcgcgtcgctgacgcctggaaagcggcgatggccgatgtgctgaaggtgaaagatcagaaccagatcccggagctcaacgtctaccagtgcgggacttacaccatgcactcgctggaagaggcccaggacatcgctcgccatatcattgagcgcgatgtgcgcatcaacagcaacgacgaactggcgttgccgaaagaaaaactgcaggaactgcacatctagtgcttccgccacggcccgacgcctgtcgccgggccgctcttctgacgccgcgatgacgacgacgctttccttctcctttcagcaccgcccactggtgccctttgcccatgattatgcccacggtgaccaggaagactggcatcagcatgactgcgcccagctgctgcatatactaagcggcgtggtgcgggtcgcgacgccggtaggctactgggtggtgccgcccgggcgcggcgtctggctgccggcgggaacgccgcacgcgctacgcatgaccggcaacgtggcggcgcgcaccctgtttatcgatccgctggcgcgcgccgatcttccggcgggctgccagatcgtacagatcacgccgctgctgcgggaactgatcgtgtcatccctggcgctggcggaacgctatgcccccgccagccgcgacgaaagaatttatgaactgatcctcgatgagatccgcgggatggcgatactgccgtttggcctgccggagccgcaaagcgaaacgctgcgtcggctgtgccagcaggtacgcgaggcgccgggcgaggcctggagcagcggccaggcggcgaaggcgtgcagcatgagcgagcgaaccctaaaccgccattttcagcagcagactagcctgacgtggagcgagtgggtgcgccgggcgaagctaatggaagcgctggtgcgcctggcgcagggccactccgtgctgcgggtggcgctggagctgggctacggtagccacagcgccttcagcgccatgtttcgtcgggtgatgggcgtcgcccccagcgactattttcgtcccccggcctgatcggcggcgctgagcgcattgcacagcgcctgcagcgaggcgcgcgccacgtcattatcgatacccacgccccagtagctttctccttgcggaaaaacgcagcggatataggccaccgaccggctgtcgctgcgcgcgccgagcgtatgctcatgatagtccttgatcataaacggctgccgaaacagcgcgctgagcccgctggctgcggcggagagcaggccgttgccctggccctgcaggcgtcgggtttcgccgtggtgacgcagcgttgcctgcagggaaagctggccatcctgctggctggcgctctgataatcgagcagcgtcagcgccggctgcgcctgcagcccgtagcgcgtgcggaacagctgccacagcgcatggtgggtcatctctttgccgtcgctatcggtggcctgctgaacgtgctggctgaagtcctgctgcagcccgcggggcagtttcagaccatgattttgttcgataagccaggcgctgccgctcttccccgactggctgttgacgcggatcaccgcctcatagctgcagccaatatcctgcgggtcaatgggcaggtagggcatctgccacggatcgccaggctgacgggcatcaaacccttttttgatcgcatcctgatgggagccggagaaggcggtgtaagccagacttcccgcccacgggtggcgcgggtgaacggggatctggttgcagttttccaccacctccaccacccggttcatctgctcgaagcgaagctcagggtcgatgccctggctgtagaggttcatcgccaaagtcaccagacagacgttgccggtgcgttcgccgttgccaaacaggcagccttctacccgatcggcgccggccatcaccgccagctcggcgctggcgacgccggtgccgcgatcgttatgcgggtgcacgctgatgcagacctcgccgcggcgggagaagtggcggcaaaaatactcgatctgatcggcatagacgttgggggtgttgacttccaccgtcgccggcagattgacgatcatcggtcgctcggcgcagggctgccagacatccgccaccgcttcgcaaatctcaagcgcaaactcgggctcggtgaagcagaaggtttcaggcgaatattcatattgccagcgggtctccggctgctgttcgcactgctgacggataagccgggtggcgcgggtcgcgagggcgatcacctcggccttgtccatgccgaaaaccagctcgcggaacagcggcgcggtggcattgtagaggtggacggtagcccggcgggcgccgcgcagcgcctcaaaggtgcgcaggatcagcgggtctcgcgcctgggtcagcacctggatggtgacatcctccgggatgcgctgttcgtcaatcagctggcggacaaagttgaaatcggtttgtgaggcggaagggaaggcgacttcaatctctttaaagccgcactccagcagcagatcccagaactgcagtttgcgggcgctgtccatgggctccgccagcgcctggttgccgtcgcgcaggtcagtcgagagccagcgcggggcgtgactgatttgccggtctggccagcggcggtcaggcagggcgatcggcggatagggacggtacttttcagcaggatggctcagcatagtgttctccttaatggtcagcctttatcctgcccgagcgcagggtgacgggctttcgcaaacgagacagaaactagcgagaactggacaacctgacgccgtaaaaaagggacccggaggtccctttatgtgaggcttagtgcgcgccgccgccgcctccgccggcgctgaacggtggtctggcgaaccacaccagccccaacagcaggatgaaaatagccgcagaaatccagaagatttcgttggcggagataatcagcccctggttggttatctgctgcgctatccagccggacgcctgctgctgcgtcattcccatgccctgcagctgatcgtatatctgctgcgcgttggggttaaagggggtcaccgattcggtgagctgcgcatgatgcagcgcctcgcggttggtccacagggtggtggtgatcgaggtcccgatggagccggcaagggtacgggtgaagttcgacaggctcgacgccgccgccagccgctccggcggcaggccggagagggtgatggtggtcaacggcatgaagaagcaggccaccgcgaagccctggataaactgtggccacgccgaggcgccaaagtccatccccggttcgaaggtccaggcgcgccagtagaagcagaccgcgtacataataaagctgaaggtgaccagccgccgcatgtcgagcttatgcgcgaagcggccgataatcggcgacagaatgaccgggatcacccccaccggcgccgacgccaggccggcccaggtcgcggtgtagccgtagacctcctgcaacagctgcggcagcagtacgatggcgccgaagtagagcatataggccagactgatacagaggcagccgatggtgaagttgcgcgacttaaatagcgacagatcgacaatcgggttatcgtcggttagctcccagacgatcaggaagcttatcgccaccaccgccacgatggtcagaatgataatctcattggaggagaaccagtccagctctttaccccggtccagcatcacctgcaggctaccgataccgatgatcagcagcgccagaccgacgccgtcgatccgccgctgttcggttttggtttcccggttgcgcagggtctgcagggtcatcagcaccaccgccacgccaatgggcacgttgataaagaagatccagccccagggataattatcgctgatatagccgccgaggatcggaccgcagatgggcgcgacaatcaccgtcattgaccacagcgccagagcgatagagcgcttcgccgggggatagttgctgagcagcagactttgcgacagcgggatcagcggcccggcgacgatcccctgaatgacgcggaagaaaatcagcatcgtcaggctgttggagacgccgcaggcccaggaggcaatggcgaaggcggtggttgaccacaggaacagcttcacctcgccgacgcgcttggccagccagccggtgatcgggatggagatggcgttagcgaccccgaacgaggtgatgacccaggtcccctggctcagcgacgagccaaggttgccggcaatggtcgggatcgccacgttggcgatagtggaatccagcacctgcatgaacgtcgcgagcgacagcgcaatggtcataatgaccagttgcgcgccttccagcggtttttgctgttgcattacactcaccccgaattatccggcgttggcctgaatgatctcgtctatcagcttattaaccggatcgagagcgatttcgcgggcattgctctcgtaaaccggggagctccgcacctggctggccagcatttcaccatcgcgatcggtggtgttgacttccaccagcgtcgagagaccgatacgcagcgggtgttccgctagttgtttttcatccagctcgatacgaaccggcaggcgttgtaccactttgatccagttgccggtggcattctgcgccggcagcagagagaaggcgctgccggtgcccatatccagaccgaccactttaccggtgtatttcacgtcatcgccatagatatcgctgatcacggtggccggctggccgatacgcatatgcgccagctgagtctctttaaagttagcatcgatccacaggttggtcgccgggaccaccgccatcagcggcgtggtggtgccaatctgcgcgccaggctgtaccgagcgacgggaaacgtagccgctaatcgggctgacgatctgcgtacgctgcagggccagccaggcgttacgcacttcagtggccgcctggagcaccgccggctgctgttccagcctggtgcccagcacgatcgcctggttggcgttgtactgctggattgccacgtcgagttcggcctgtgcgctggcgacggtatcgcgggcgtgctgcagctcttcgcggccaatgaggttcgcggcgcccagcgggatgcggcggttcaagtcagcctgcgcctgggcgagggcggtttttttgacgtcgatatttgcctgcagctgcttgctgttgatcatctgctggcgggtctgacggacgctggcggccagttgggtcttagccttttcaaacgcctgttgggcatcggtccgatcgagcgtgaccagcggatcgcctttctgcacgtagtccgtgttgtcagcccagactttggtcacgctgccagcgacctgagccataatttgtacctgattccctgccacgtaggcatcgtcggtctcttcgtagtgacgcagtaccagaaaccagtaaatcccatatgccacggcaataataatgaagagcaatgtcagcaacagaagggcgcctttacgctttccttttttgctgcctggttgctgcggggtttggctctccgcatttgcactcatgttattctccacgatcttattatttcacatcggctgagccgacctgtttatcagaaaggccagcagagatctgctggcctggctgttttccttgcaacgtaaaaatgggctgagcgacgccgcccttagcgtagagagtccgctagcacgccttcttcttccatctgatcaaggcggctcaggagtttgcgggtgatgtgttcgagctgatctttttcgctggtgctaagtgaagaccacagctgatgcaggcagttatgctgcggcggcaggacttcacgcaaaaactgatggcccttttcggtcagttgcagatgcaaacagcgacgatcgttatcgctctcgcggcgctcaatccagccgcgtttttccagttcatcagcgatacgggtggcgttggtacgtgacgagcccagcgcacagctcagctcggacggctggatgctgtggttttcctgtgactccagcgtaatcagcgccataaataatgtctcgttaattccctgcgctttgagcattttattgcgattttccagcagcttaccttgcatatgcatgcaaagacgagttaacaggatctcctgaaacgggaaatcttcatggcggctggcgcggaacttgagcatttgctcaatgggagtaaacgaactatccatttgggtatgacctcattaattacagccgatataataactattgtgacaaataaatcaaatgaattattgaccaaaattgatacgtaaagcttagagcccgttggtgattttccatgccagaccataggcaaacgccgacagcagggtcgggacaatgatgctgcgggttttccagaaggcggcgcccagcaccaggaagccggtcagcgtcggcgccaggcgatgggcatcggctaggatctccggcacgctggagaccaccagcagcgcgcaaatcgaggcgatgccaatggtatccagcagcacgctgaccgggccgcggcgggcaggacgggcgtggccgacgcgcaaacgcagaggaagatagcgaaagagatagttgacgccgccgactatcaccccgagcagaaggacttcactgttcatccggcatccccttgagcatggcctgaagcagcgccgtcagacacccgcagacaattccggcgaggatcgccgccggaatggaaaataacaaaatgccgcccagcgcgcccgccagcgccgccgtgacgcagagtgactgctgacgctggaaagaggccagcaggaagctcataaacagcgccggcagcataaagccgagggcggcttccaccgccggataatccaccagcaggccgttgccggaccaggcgccggccagcgtgccgcacacccacgatgcccacgaggtaaaagcgagaccgagcatccagttttcgctccagcggcggttatcgcgaaccagcctggcggtagcggcggcgaaaacctcatcggtcaggccgaaggcccagagggcggttttctttttatccagcgctgagcgaatgcggctgcgcaatgaggggccatacagcacgtggcggacatccatcgccattaccgtcagggcggcgacccacagcgaactgccggcggccaacatggcggtgatcacaaactggctggcgccggcgtaaataatgcaggagaagaacaggctttccagtggggtgaagcccagccgggtggcattgagtccgaaggcgaatgccaccggaaggtagctgatgacgatggagagactgtctttgacgccttcgccgacggtggcgacacgttcaggtaaggcacaggttaagggcgcggggttttccatatgaataacttatcgctggatccatgtgaaggtggcaatttgaccgatgtctccaccttaacagagcgcgatgcgccttaacactatggaaattcctggaatcgcttttctatgacctgaccacgagaaaggggggcaaggggaccggataaggcgctgggccttatccgtgagcgggtttactgctgcgcggcgagggcggttttcacccagctgtcgaacagcggctggtgggctttgatccagccatcaacgtggccgttaatgtcggcttcggaagcatggccttcatgcatcatcgcattctcggcgttgatgtcggcgatcggtagcttcatgacgctaaacagagtggcggcggccggatttttctccgcccaggctttgttagcgacgatgtgcatggtgttcaccgggaagccatagttggcgccgttggccagtttggtgtcgatgtttttctgctcgcccggcagggaggagaacggcacctgcagccagacgacgtccttgccaggcttcagcacgtcgctaacccagtacggcgtccaggtgtagtagagcactggtttaccctctttataccgggcaatggtgtcggccatcatcgccgcgtagttgccctggttatgggtgacggttttgctcaggccataggcgtcaatctgatggttaatcactgcttcgcagccccatcctggggtacagccggtgagatccgctttaccgtcattgttggtatcaaacagtttggcgatctgcggatctttgagctgatcgatggaggtgatgtggtactgctcagcggtttttttgtcgatcaaatagccctgggcggcgcctgagacgtacactcctttgcgatagaatttgttatcaccgcccgccgcggcgtacatgtcatcgtgcagcggttgccagttggtggcgataaaggtggtatctccggcggcaatcgacgtataggcaacgttatagtccacttcgctgggtttctcgacggtgtagcccagcttctccagcgcgcgactgaccagcagggtctggaagctctcttcggggatagtgctctgagcgggcttcaccgtaatccctttacccggcaggtcggcggcgaaggcgctggtggcgagcagggtggcaaaggcggcggtggccaacatcgtactatgtcgcatggtggttcctcttattgtttaacgggaagggccgctcccgggcatcggctggtgccggggcgcggcgctgttatcgacttatcgacagaaagggcgagtgataagccccagcgggccggtggtgtaccagcggcggttgccgcgactgcgggcgtcgcgaccgacggcctgggtgaggcggtcaagaataatcgccaggatcacgatccccaccccgccgacggtcgccaggcccatatccaggcgaccgataccgcgcagcaccatctggccgaggccgccgacggcgatcatcgaggcgatcactaccatcgacagggccagcatcagggtctggttaaccccggccataatggtgggcatggccagcggcagctgcaccttaaacagcagctggcgcgggctggcgccaaatgagcgcgacgcttcgatcagatccgcaggcacctggtttatcccgaggatggtcagacggacgatcggcggcagggcgaagataatcgtcaccaccacgcccggtacgttgccgatgccgaacagcatcacgatcggcaccagatagacgaacgccggcgtggtctgcatggcatccaacagcgggcggatgattttcgccgcccgcgggctgcgcgctagccagatccccagcggcaagccgataaccatgcagaacagcagggcggtgaggaccagcgccagagtgaccatggcttgcgaccacgcgccgatggcgccgatggcaatcagcgataccagagtggcgacccccatgccgaggctggagatctgccaggcgattagcgcgaagacgataatcgccaccggcgccggcatccccaacagcagctgctggaaggcgctgaggatgtagtcgatcggcacgcggatcccctggaacagcggacggaagtgcagcacgatccagtcgatggcgtgggtcacccagctgtcgagcgggatcagggtcttatggaacggatccatgatattgaactgttccggctgcggcgcaggggcgctgtgcagccagtcggcgccgccgccattagccggcgcggcagtagaggcgccaccccaggcgtcggcagcctgcgaggcgctgtcggttgacggggcgctgccccatggattggtctgatcagccatgattcaccccctcgcgatctaaagcctggagcaacatccgtttggaaatgatgccaatatattgttgttcttcatccactaccggcacggcgcacggagcgtggccgacgtgggagagcagatcgctgagcggggtttgcgcttccaccgccagcggggcgtcaatcagcgctgcctcgatcccctgcccggcgctgagggctgttttcagagaatcaatcgagacaatcccgacaaagcgattaccgcgctctatgacatagccatattcccggtcttcatcctgtaataatttcagcgccgaacgggggccaaaaccaggcgttttacgaatcaggccaaccgggctgcggcgggcaatatctttcgcgctgaatacctggctaatatccacgccgcggaagaaggtgcgcacataatcattggccggattatttaatatttcatccggagtgccgacctggaccacttcgccattttgcataatggcgatacgatcgccaattcgcatggcttcatcaaggtcatgggaaataaagacgatagtgcgttgatgcttcgcctgtaatttgatgagctcatcctgcatttcggtacgaatgagcggatcgagcgcagagaaggcttcatccattaacagaatatcgggattaatcgccagggcgcgagctaaaccgacgcgctggcgcatgccgccggagagttcatccggccaggcgtgggcataattctccagccccacctgacgcagcgcctcccgggctttttgctctcgttcggcggcgggaacgccggcaagcgccatgccaaacgccgtgttgtcgagcacgctcatgtgcggcatcagcgcaaaggactgaaaaaccatcgcaattttcttgcgacgcacctcgcgcagctcggcatccgacattttggcgatatcgaccccgtcaatcagcacctggccgcgggtgggttcaatcaggcgattgagaaggcgaaccatggtggatttccccgagccggagagccccatgatgacgaatatctcgccttcttcaatggccagactggcgtctttgacgccaagcgacagccccgttttttccagtatttgcgctttgttgagtcctttctcaatatatttgaaagcacggtgtggatgctcgccaaatatcttataaagatttttgatttctaatttaattgccatgcaatagagaagttcctgttatttgtttattgcgatatgatacccgatggtgattatgatctttttacaccctaacatactcagattctgtgacaaccctcaatggcaaactctcggcaaaatcagatgggggcaactgtggctaagcccccgtgatataagggctgggcggtaatttgttgttggtaatattttttgattatctttggataattcgactgaaatggaccggttttctgctaaatatgacgaagtgatgacggttaggtcatggagagaatatttggtggattaaacgctattttgtgaaattaatcaccaggaatccgcctgcgatattcctggtgaaagtacggttaaaagtcccaatcgtcgtcggcggtctcttccatttttcctatcacgtaggaggagccggaaccggagaaaaagtcatggttttcgtcggcgttgggcgacagcgctgcgaggattgccggattgaccgccgccatctccgccgggaacagcgcctcgtagccgaggttcatcagcgctttgttggcgttgtagcacaggaaagcgctgacgtcgtcgaaccagccgctctcgccgtacagctcccggctgtaggccagttcgttgtcgtaaagatccatcagcagatcgagggcgaaatttttcaattcttcgcgcttgccggggctgacgatctccagtcctttctggtacttgtagccgatgtaatagccatgcaccgcttcatcgcgaatgatcaggcggatcagatccgcagtgttggtcagctttccccggctggagaagtacatcggcagccagaagccggagtagaagagaaaggattcgaggaacacgctggcgatttttttcttcagcggctcgtcggcctgatagtaacccagcatcagctgcgccttgcgctgcagaggatcgcagctttcgctccaggcgaaggcggcatccacctccttgctgtggcacagcgtggaaaagatggagctgtaagagcgggcatgaaccgcctccataaagctgatgttcgacagcaccgcctcctcatgcggggttaaggcgtccgccattagcgccggggcgccgacggggttctgaatggtgtcaagcagggtcaatccggtaaagacgcgaatggtcaactgctgctccgccgcgctgagggtttgccaggcgggaatgtcgttcgacagcggcactttctccggcagccagaagttgctggtgagacggttccagacctcaagatctttatcgtcatcaatgcggttccagttgattgcgctgacgcgcgttaaatgggtcatcctgttctccttacagcgcgcaggacacgcagccttcaatttcagtgccttccagcgccagctggcgcagacggatgtagtagagcgtcttgatgcctttcttccaggcgtaaatttgcgccttgttgatatcgcgggtggtggcggtatcggggaagaacagggtcagcgacagcccctggtcgacgtggcgcgtcgcctcggcgtaagtgtcaatgatcttctccggccctatctcatacgcatcctggtagagggccagattgtcgttattcataaatggcgcggggtagtacactcgcccggttttcccctctttgcggatctcaatcttcgagacgatcgggtgaatgctggaggtggcatggttgatgtacgagatcgagccggtgggcggcaccgcctgcagatagcgattgtagatgccatagcgcatgacatcgtcgcgcagctggcgccagctttcccggtcgggcagagagatgccggcgcgggcgaacagcgcgcgcacccgttcggttttcggctgccactcctcctgcagatatttgtcgaagtacgccccgctggcgtagcgcgactgctcgaagccggcgaagcgctggccgcgctcgcgggccagctgcatcgaggtgtgcagcgcgtgccaggtcacggtgtagaagtagatattggtgaagtccagcccctccgggctgccgtaggcaatgccttcccgcgccaggtaaccgtgcagattcatctgccccaggccgatggcgtgggaagccgcgttgccggccgctacggaaggaaccgactgaatgtcgctcatgtcggacacggcggtcagggcgcgcaccgcggtggcgattgtgcggccgaaatccggcgagtccatggtatgggcgatgttcagcgagccgaggttgcaggagatatcttccccgatatgggcatagctgaggtcttcattataggcggacggcgtactgacctgcaggatctccgaacacagattgctcatggtgacccgcccggccaccggactggcgcggttcacggtgtcttcaaacatgatgtacgggtagccggattcaaactggatctccgccaggcgctggaacaggtcgcgggcgcggatccagcgtttgcggacccgctcgtcggccaccagctgcggatagaggtcgccgatggcgcaatcggcgaaaggtttgccgtacagccgttcgacgtcataaggcgagaacagggccatctgcgcatcttctttcgccagctggaaggtgatatcagggatcaccacccccagcgacaaggttttgatgcggattttctcatcggcattttcacgccgggtatcaagaaagcgtaaaatatcgggatggtgaacatgcagccagaccgcacccgccccctggcgggcgccgagctgattggcataggagaaggcgtcctccagcatcttcatcaccggcaccaccccagaagactggttttcgatgcgcttgatcggcgccccggcctcgcgcaggttggagagtaaaaaggccaccccgccgccgcgcttcgacagctgtagcgccgagttcaccgcccggccgatggactccatattatcctcaatacgcagcaggaagcaggagatcagctccccgcgctgctgtttgccagcgttaaggaaggtcggtgtggcgggctgaaagcggccgctgagtatctcctccgtcagctgccgcgcctgctgttcatcgccccgggccagcgtcagggccaccatcacgctgcgttcggcgaaatcctcgaggtagtgcttgccgtcaaaggtcttcagcgcatagctggtatagaacttccaggcgccgaggaaggtctgaaagcgaaacggagcgcgccgggcatgggcgaacaacgccagcacaaacccgcggtcatagccggccagcacctgcggatcgtaatagccctcgctgacgagccagctgagcttatcctcctggcgggggaaggtgagggcgttgggctgaacctgggtcgccataaaggcctcaaccgcctggcgatctttctcaaacgggatgcggccctcgctgtcgtacaaattcagcatcgcgttgagggcgtgaaaatccacggcggcggttatacgttctgcggttgtcgttgccaaaattcgctgactcctttacgcacggtgttgatatcgtcgggggttcccatcagctcgaagcggtagagatagggcacggcgcatttttgcgcgatgacatctccggcacgcccccagccgtcgccaaagttgcgattgccggcggcaatcactccgcggatcagctggcggttatgcacgtcgtttaaaaagcggatcgcctgacgcggtaccgcgccggcggtgccgccgccgccatagctgggaacgatgagaatatagggctcgtctacccgcagatgttcacgctcgttcagcgggatgcgcaccgccggcagccccaggcgctgcacaaagcgatgggtattctccgaacggctggagaagtagacgatgaggctcatgcgctggccgccgtaaaggaggggcgcaggcgattgatcatatccgggcggaagccgctccagcgcagctcaccggcgatcaccaccggcagctggcgaaatccctgctcgcgcagggtgtcggcggcatccggctgctggtcgacgttgaccatttcaaaggccagtccccggctctccatggctcgccgggtggcatggcactgcacgcagtcatttcgagtgtaaataataatgcgcatgattcgtatttccatttaagataacagcacggcgctaaacatagcgtcgaacgtagtgggccattcgataaggaaatactagatgtagttatttaaaacttcaaccactcaatatatagcgtttttggcaagcgagtcccccgccgggatagatcggcggaggaggggggaggctgtgcggaactacaggcgcatggccacggcgaggcggttaaaggcgttcatcagactgacggcgaaggtcagatcgcttatctgacgcggggtaaaatgttcgcgcagcggctggtaaacctcatcttccgcatggctggcggcaatgtcggtgaccgactcggcccaagccagcgccgcgcgttcggccggagtaaagtgggcgcttacccgccagcccgcaagggcatccagtttgctttgcgccatgccgcctttgcgcagcgcctggctatgtttctcaagacagaaggcgcagccgttgatctgcgagacgcgtaaataaaccagctctaccagggcgttgcccagctcgcttttctccagcgcgatgctggcctgtaccagccctttatagacttccgggctcagttcactgaatggctgacgtaattggttcatggtgttctcctctctaagacggcagccaaaatagcattataatggactgcaaaagatagccatattgtgatgaaaaaagcagaccataatggaagcgattaacctcccgctttatcagcgtatcgcccgccagttgaaatcggcgattgaacgtggcgaactgaccccgggcagccgtttgcccgccagccgggtgtacgctcaggagcagggcgtttcccgggcgaccatcgaaaacgcctggggagagctggtcgcccagggatggctcgaacggcgtgggcaggcggggacctttgtcagcgagcggctcagcccgcgccagctggcgccggtaccgccagtgcaaccggccgcgccgacggagccgctgccgtttcagatggggctgccggcgctggatctctttccgcgcgggcagtgggcgcgggtgatggggcgtcggctgcggacgcagtcgcggttcgatcttgcacccggcgatcccggcggcgatccgcttctgcgccaggctatcgtcgattatctacgcctgtcgcgcagtatcgactgtcagccggatcaggtgttgatcaccggcagctatgccgcctccatgaatcttatcctgcgtaccctggcgcagccgggacagcatatgtggatggaagatccggggtatccctttatccggccggtcgtcgaggctgggcagctggcggtggatgcgattcccgtggacgacgaagggatggacgtcggctggggccagcgtcatcacccgcaggcgcgatttgccctgctcacaccagcccatcagagtccgctgggggtcgcgctgtcgcttccccgacgccgccagctgctggcgtgggccgcggagcgcgacgcgtggatcattgaggacgattacgatagcgagtttcgctatcacggcaaaccgctgccgccgctgaaaagccttgatgcgccgcagagggtcatctacgcgggcaccttcagtaagtcgctgttcccggcgctgcgcaccgcctggctggtggtgccgaccccgctggtggcgcgttttcaccagaccgcggagcgccagtcctgcaccgttcccaccctgtggcagcagacgctggcggattttatccagcagggacatttttggcgtcatttgaagaaaatgcgcgccagctatagccagcgtagacagtggctggagtcggctctgcaggcgcagggctttcaggtcacgccgcagctggggggaattcaactggttatgtcggtcagcggcgacgatcggctgctcgcgcggcgggcggttgtggccgggctggcggtgcaggcgctgagcgactggcggattcgccacgcgggcgtggggggattattgatgagttttaccaatatacgttcgccggcgatggctgatggacttgcccgacggctgagagaggcgatcgcgatttgatggcgcttaagtcggggaagcagaaaaacccctgcggccagaggcgcacaggggctgacgcgtatttgttatcttcattgccttccgtaaagctcgcgggctaccgcgcgccaatcgcgcggcggcagccgacgcttaagctattatcgacgtaaattgagcaatacgccaataaataccccgacggcggcggcggcgcccacactgtgccacggtttattgcgcacgtaggtatcggcacagcccagcgcatcgcacgctgcctggcgcgcatccagcgccgcctgctgcacccggttgtggccattaaggcgggcacgagtctcttttaacagcgactgcgctttgacacgcgccgcttccgcttcctctttggcgtcactgccccatgatttcagcacctcttccagcgtatccgctaattggctgacatcgttatgaatatcttcggcgttctcgtcaaaattgttgcggttcacatggttagccatcgttatctcccttaattccatcgagtgagtaagtgtaggacaagattttgaattatgcttactgttgtggtttctggaattttccgaaagcactgtccttaatgaataaggtaaggtcaatgtgcggtaaaagataacgaggaatcagtatgtatttaagacccgatgaggtggcgcgtgttcttgaaaaagccggcttcaccatggatgttgtgacgcaaaaagcgtacggctatcgccgcggcgataattatgtttatgtgaaccgcgaagcgcgcatggggcgaacagcgttagttattcatccggcgttaaaagagcgcagcaatatgctggccgaaccggcttcagatatcaaaacctgtgatcattatgaacagtttccgctgtatttagccggggatgcgcaacaacattatggtattccgcatggatttagctcacgcatggcgcttgagcgttttctgaatgggctatttggcgaagcccagccggcaatgtcgacgaattaatacggcgataggcatttaaggatccaggcgaggcgggctggcgggaagaggcgactggcagagccagtcgctgctaacgcgttggtcaggccttcgcctgctgatagggcgccacgcggaacaggcggcggcaatagtcgaggaagtagccgtaggcggcgcccatcatcatcgataccgccaggttcgagctcaccgcggcgacaatctggtgccagtcagcacccacgctccacagaatagcgacatacaccggcgactgaaaggtgacgtaggccagcacgtcggccatatttttcatccacctggccgggctgatgcgccgggcctgacgcatggcgaaatcgcgataaatcccatagggtacggcaataataatgttgaccgggatcgccaccagacgcgacgataacgactgctcaaacgtcataccagagagaaaaatttcgatcatcatgttgacgacggtgcagtaaaccaccatcgcaaaggtgtctgcaaccgcatgcgggagtgcgcagagaacatcggagtgctcctcgaaaatgaagtcattaacgccgaaaaatgcgcgttggtatagcgtttttgggctgcctgttttgatgtgcgtagagtatatctctgcattaaaagtggcaactagctataaatttttatttatcgcctttttgtcgataaaatactctgcgctggtttgttttttgttcgttacgctacttttattcctgtttttacaaatatcaatatttatcaatgtgttactcttgattgcgaaatcgagactggccgaaggaacggcgcctgatagccaaccatggcgcaacatcacgcgagtgtgtgattccgctctcttttaggattttttatgccgtaagtcgcttttttatggtgaaaaattctgaattgcgaattgtcgttttattcccattttctgattaactattcactgtggccaaaggtatgtatcagtgcggccacgtatgaacagcaggtaacccgctgaccataaagctaatattcctggcgagaacggtggtttttcccgtcattctgccttttttatttattcattctcttttttgcctgtgcttatgaaaaaggctcaggtatttgccaatatagttccaggggataaccgctaatatccaccttatatatttatctggacaaccgaaggctggaaataaataaacgtttctattacacttgccgcgttgtatcttttaatttgctatttggaattttttaattttatgtcttcaatgttacacaaactgaataatatccgttcactgcgtgccctgtcccgtgaattctccattgacgtgcttgaagagatgctggaaaagctcaggatcgtcactgaagaaaaacgtacgcaacagcagcaggcagctcagcagcaggctgaatatcaggagaaagtgaatacctggcttgaactgatgcgcgccgacggtatttctcctgacgagctggtggccgatattcagccgccaaaggcgggaggcaaaaagcgtcaaccgcgcccggcgaaatatcgttataccgatcatactggcgcagagaaaacctggaccggacagggaagaatgccgaagccgattgccgaggctgtcgcccagggtaaatcgctggatagctctttaatttaacgccttcgggccagcgccagcccggtggtgagagacccaccggcctggccttacgactttacgcgaggggctttagcagacgccgaagtctccctcttcctgatacggcgtgacctcgtccgacttcagcgaatagcgctctccctgctcctgtgcggcctgaaccaccaccagttgctccccttgcacttccaccactttcagttttggtccgcccgctcggggttgtaccagatcgccgacagcaaacataattcactcctcactgttaacaccatggataaacctaaaccatagctcaacgcccgctcactgaacaccgggcgtgctgttttttgttaaaacaatttggagttatatgtattaacattgttaatgttttgctggcgccataccgctgctgagaaagggggacggcgagggtagggttaccaccaatcaggtcaggaaagacaccatgaagtatatcattctgttgatcattgttattgctgtactgtatgtccattaccgcggacgggtgcgctatcgtttctggcggcagctctccgaccattccacatttaccgcgccgctgaatggatttatgtatttattttcccgcgtgccgaatacgccttatctgcggccggagatgtttcccgagctggcgatattgcagcaaaactggcaggttattcgcgacgaaggtctccaccttcagcagctggagcagattaaagcggccgataaatataacgatgccgggtttaactcatttttcaaaaccggctggaaacgcttttatctgaaatggtatgaggatgcccatccttccgccagccagctctgtccgcaaactaccgcgctgctgcgcgatatcccgtcggtgaaagcggccatgtttgccactctgccggacggtagccgtctgccgcgccatcgcgacccctacgccggctcgctacgctttcatctgggcctggcaacgccgaacgatgaccgctgctttattgaggtggatggccagcgttacagctggcgcgatggagaaggcgtgctgtttgatgagacctatatccactatgcggaaaataccagtggtgagaatcgcctgattctgttctgcgatattgaacggccgatgcgctaccgctgggcgcagaaagttaaccactggctgggacgtcatctgatgagcgccgcttcggcgcccaacgatatcggcgatcgcaccggcgggattaaccgggcgtttcgctatatttaccagatccgtattgttggtaagcggttgaaaaaatggaataagacggtctattacatcgtcaaatggctgctcttcggcggcattgcctggcttatctggagcgcgttttaaccccctggcgccggttccacggcatggtcgccagcagacgcgccatgccgcaaaagccggttacgccggcgaaggtgagcccggcgccgaccgcgccgctgagcaggaaaaagccgccgttaacggtatagcccagcagcacccccagtaaaatcaggacgccagcggcaatttgcacctggcgcatcagcggcagcggctgcgatgaatcttccactaccggcaaccccgcggctttccacgcctgaaatcctcctgccagcagacaaggctgcgccggcgcggcggccgcggccagacgaatcgcattattctgcgtccgggaacccgcctggcagtgaaagatgaccgtctctccggcccgggcattgaggggcgcaccgctggtcagagtggcgagcggcaccagctcggcatcggggatatgttcgcgcgcatattcatccgcatcgcggatatcaatcagtctggcgccctgggcaatctgcgcctgggcctcggcgggagttaaggtggcgatggtcataggatcctcacgggcaatagagcgttttcagcgtattgatcacctgctgtaccgcagggtgggtgatgaaatagtggatacgctgggcgtcgcgctcgctgtcgatcagcccctcgtcacgcatccgcgcgaggtgttgcgaggtggcggaggggctcagccctgtagcccgggcgagttcgccggcgctggccctgggcgcatcgcacagcatgcacaggatcagcaatcggtgaggattgctcatcgctttcatcagcgcggcggcttccccggcgcgggcctgcaggtcttcaggtgtggtcatttattttagctttgtctaaatttagataactctaaaataaaaaggccgccagcgccagcacaatttctccacgactcaggccggaacggcgagccgggcaatctgcgcccgggcgctggcgatcccggcgtcgcgaccatgcgggcgattgtccagcccttcggcatagataaattccacctcctggatccccatcagccccagtaccgcgcgcagatagggcgtgacggcgtcggtagtttctccctggtgaataccgccgcggctgctgacgaccaccgcccggacgccctccaccagcccctgcggccagctctcggtgtagcgaaaggtttcccgcgcccgcgccacgaggtcgaaccatttttttagatcggtcgggacgttgaggttatacatcggcgcgccgatcaccagcaggtcgctggcctttaactcggcgataagctggtcggagagggcgaccgcctcgcggatagcaggctgcggatccactgccccgcgcagggcggcgaacagggggcgatccagcgttggcagcgccatggcgctgagatcgtgttcgatgagccgatcgccgtgtcccgccgcctggcgcgccgcgagaaattcgttaatcaactgattggtcagggatgtttcgccattaatgctggattttaaaaccagaacgttagccatgatgagtgcctcaaatgaaagatagaagcaaagactaacactgtcttttttgtctcaggagtgacattatttttccctattgtatcccgtaaggaaccaatctgtgcgcgacgatctgaatgcgatcccggtatttgtcaccgtggtcgagagcggcaactttgccagcgcggcggcgatcctccatgtgacgcgttcggcggtgggaaaaaccattgcccggctggaagcgcgtctcggcgtggcgttattccagcgtaccacccgacggcaactgctgacggaagagggggagcaattctatctccagtgccgggaagcgctggagcgcatccgcgaggccgaagagacgctgcagcgcggcaaagatgaggtgcaggggcggctgcgggtgtcgctgccggtgctgtttggccagcgctgcgtggcaccgctgctgttccgcctcagccagcgctatccgttactgaagctcgagctccactacagcgaccggcaggtcaatctgctggaggaggggtttgatcttgcggtgcgtatcgggagcctggccgataccgggtcgctgcgggcccgtgcgctgggagagcacggcatggtgctgtgcgcggcggcggagtacctgcgccagcagccagcgccgcagactattgccgggttgaacgagcaccgtaccctcggctatctgcacaacggccagctgcaaaaatggcaactgtatgacccgcagcagggcgaagtgcgcttcagtccgcagacgtggctgatacaggatgattttgccgccatcgcggcggcagtgcagcaggggatgggcatcgcctggctgccggactggctggtggcgcaggcgcttgccgatgggacattgcagcaggtgttggcgcccagcgctcaggtgcgtttcgccatccacgcggtatggccggaggggccgtggctgccgcaaaaaacgcgggcggcgatcgatgccctgcgggaagggctgcctcttaccgcaacacctggttagcgcagagagaaataaccgccatctatggcggcggaggttttccgacagcgtgcaagctaccggcgcgctttacgccatagcctcagcgacgaggccgtccggcacgggcggcacggcggtacaacgtgctgcgggcgatacccagtatctgcgccgcccggctgacgttgccgttgaccctggccagggtatcgacaatcaactgctcatcatgggcctgcaatcccccgcgcggcaacggcgcaggcgcggcgcgatacgcctccggcagcgcgtcgggcgtcagcgtgtcgccctcatcggcgagagccagcattaccttcaggacgctctgcagctggcgtacgtttcccggccacggcagctggctgaggtgaaccagcagcgcgtttgaaagcgtcacccggcgtgaagcaccgcccaggtcgtgccacagggtggcgataaaggtttccagcgccggccactcgcgcagcggaggcagcgccagggcgtattcccgcaggcgccacagcagatcttcacggaattctccggcgctgacccgctgggtcaggttgcggtgggtggcgcagatcaaggcgaaattcaccggcacgctgcggctggcgcccagcggagcgacctctttctcctgcaggacgcgcaggaggcgggtctgcagcgccagcggcatatcgccgatctcatcaagaaacagcaccccgccgtcagcctcgcggattttaccgatatagccatttttgctggcgccggtaaacgcccccggctggtagccgaagagctcggattcgatcagcgattccggaatggcggcacagttaatggcgacaaatttaccgctgcgccagcggctgtgccggtgcaacgtgcggctgacatactctttgccgctgccggtttctccttcaatgcacagggcgatgccggcgttgagcagccgcagcagcttttcgccttcgcgcggactggtaaaggggagatgcatggccggcggggcgcttaccgccacccggcggcgggtaggctcccgcaggcgatagtggtagcggccctgcggcgtggtcagcggcagcgggacgctgaccgccgtttgcgtcagcgtcggaaaaagcgaggcaaaggtgagctggccaaactgcgccgcgctcaggccgaactcgcgcatcgccagccggttgccggcggtgaggacgttgtcggaaaagaccagcagcagctcctcgacgctgtcgagtttgtccacctgccggtgcaggctcatcagccactgctcaggatgcagactctgtttcacccacagatattcaatttgctttgccgccgcttttacccagccaaaggtgtgctggtggggaaaattcgccgggccggagatatccagcaccccggcgatgcttccgtccggtcgctggagcggcatcgccgcgcagtacagattctggttgcgggtaagaactgtctcttaaacacagctgacgctgccgacgagcgatctagtgtagatctcggtggtcggccgaccagtgaaaaagatacacacactgggcggcaaacaggacagccagctctatggatcgcgaccgcaccccaccaccctaccccgctatgctcgcccagccagcgccggccctc

SEQ ID NO: 143 - DNA, 92979 bp, Unknown
  source: /note="Description of Unknown: MKP2_2161_1 Mutant Bacteria sequence"
tgcggtgcggctgtgcttcggctgcttgttggtgagtgtggcggcgtccacggtgttctcgtctgggttggtggttggaagggtctgaggggtagaggggactgggttcttggcctgtgctttatctcggaaggggcgattccttttgccgcccgtgacccgatgcgcgttctgccgtgctgtatcgtcggcggcgcggtaaccggcgctatctccatggcggtcggcgcgaaactgatggcgccgcacggcgggctgtttgttctgctgatcccgggggcgattacgccggtgctgggctacctgctggcgattgttgccggaacgctggtggcgggccttgcctacgccgtgctgaaacgccctgaggcgcaaacagcggaagttgaaaaagcggcataatcctaccgcaataaaaaagggccgattgttcggccctttttttgtctctatttacgccacttcggcaatctgctgcgcccgcagccaggcaatctcttccgcccagatatccgggttgatggtttccagaatcagcggaataccgtcgaagcggctgtcctgcatgatccagctgaagcaatcgtggccgatgttgccttcccccaggctgtggtgacggtcgacccggctgccgaaggcgctcttggcatcgttgagatgcatgccgcgcagatactgaaaaccgacgatgcgttcgaaggcggcgaaggttttttcgcaggcttcggcgctgcgcaggtcgtagccggcggcgaaagcatggcaggtatcgatgcagacgccgacgcgggatttatcttccacaccgtcgatgatggccgcgaggtgctcgaacttaaagccgaggttgctgccctggcctgcggtgttttcgatcaccgcagtaacgccttcggtcttcgccagcgcgatattgatcgattcggcgatgcgcgccaggcactcctcctccgggatctgctgcagatggctgccggggtggaagttgagcagcgtcagtcccagctgctggcagcgggtcatttcatcaatgaaagcatcacgggatttttccagcgcttcttccaccgggtggccaaggttaatcaggtagctgtcgtgcggcaggatctgccccgggccaaagtgatacttttcacaggcggctttgaattcggcgatggtctcgtcgctgagcggcgcggcgcgccactggcgctggttcttggtgaagagggcgaaggcggttgcttcgatttcggcggcgcgaatggcggcattggccagtccacctgaggcgctcacgtgcgctcctacgtatttcataaaaaaaactccagttaaagccgctggggggtgggtaatgatagcggcttaactggagaaagatgtagtgctttatgccatcaggctgtggatagcgacgttaatgaccccgccgccgacaatcaaccagacgaacagcatcagcgccatcagcagcggtttcgccccggcttttttcagcgcgctgacgtgggtggtgaccccgagggcggccattgccatcgccagcaggacggtatccagcgtcaccagcatatccaccacggctttcggcagcagatggaaggagttaaacaccgccaccaggatgaacataatggcgaaccacggaatggtgattttgcttttctcgccgttgcctgccggggtcagctgtttaacacgcgccgccaggaacagcaggaacggagccagcatcatgacgcgcagcattttggcgataaccgccgcgttctccgcgtccgggctgaccgcatggccggcggcaacaacctgcgccacttcatgcatggtggagcccatatagatcccgtagttctccggggtaaaccagtgcgccagcagcgggtacatcgccgggtagaggaagatggcgatggtaccgaagataaccactgtagcgacggcaaccgtcactttactggcttcggctttgaccaccggctcggtggcgagcacggccgccgcgccgcagatgctgctgccggcgccgatcagccagctggtgtgtttatcgagaccaaacactttctggccaaggaagcaggcgatgaaaaaggtactggagagcgtcagaacgtcaatcaaaataccgctcacgccgacgtcggcaatctgggcgaacgtcaggcgaaagccgtagaggatgatccccaggcgcagcagatgctgcttggcgaagatcaccccgccgtcgcagggctgccagattttcgggtagaccgtgttgccgacgaccatcccgaacaggatagcgagggtcagggcgctaaagcccgcgccggcgatggccgggaaactaccggcccacagggcggcgccggtcagagcggcggtcagcgccaggcctgggacaaaatgccacagggaacgatgtttggtgggtaaagtgagtgctgtcataaccttctcctttgtctgcctaaaggttacgccgcgcgggattaaatataaaattgattatatgtttataatcaatcgtaataagtggttaatggccgcttcgccggttacaacggggcgagagcgggttaggcagaagcggggcggtctcgccggcaagacgatgattttgtgatataagcggattttccttccgtcagccgcctcgatttgtgtcaccatagtaaggaaggttattcaggttggattactaaacgggtgggttatgcatattacgctgcggcagctggaagtgttcgccgaagtccacaagagtgggtcgaccactcaggcgtcacagatgctggcgctttcgcaatccgcggtcagcgccgcgctgaccgatctggaagggcagctcggcgtgcagctgtttgaccgcgtcggtaaacgactggtggtgaatgagcatggacggctgctgtacccgcgtgcgctggcgctgctggagcgggccctggagatcgagcagctgtttcgcggcgataacggggcgatccgggtctacgccagcagcaccatcggcaactatattatgccggagattattgcccgctatcgtcatgacttcccggatctgccggtcgagctgagcgtcggcaacagcctggacgtcatcaacgccgtcgccgacctgcgggtggatttcggcctgattgaggggccgtgccatgccgccgatattattgccgagccgtggctggaggatgagctggtggtgtttgccgcgcccaactcaccgctgctggcgggggaggtgaccctgcagcaactggccgaggcgccgtggatcctgcgcgagcatggctccggcacccgggagattgtcgattacgttctgctgtcgcatctgccggcgtttcatctgggcatggagctgggtaattcagaggcgatcaagcacgcggtcaggcatggcctgggcatcagctgtctatcgcggcgggtgattgccgaacagcttgcctcgggcacgctggcggagctgaaagtgccattgccccggctgacgcgcacgctgtggcggatccatcaccggcagaagcatatttctaaagcattacaacgttttctgcactattgccaggtgtagcagcccggttttatcgcctgattacggggggaattcgctggcaattccgcaggttagtgctttactaataatttgcgggcgatcatgaagctctcttataactttgcatttgtaccggatggaaccccgatcgtctgctacaatcgcgcctcattttttggatggatagcattatcacatggtttcggaatctaaaaccacagaagcgcccacgctacgtcgtgaactgaaggcgcgccacttgaccatgatcgccatcggcggttccatcggtacgggtctttttgttgcctctggcgcaaccatttcgcaagcaggtcccggcggggcgctgctgtcttatattctgatcggtttgatggtctatttcctgatgaccagcctcggcgagctggcggcgtttatgccggtatccggttccttcgccacctacgggcagaattatgttgaagaaggcttcggcttcgcgctgggctggaactactggtacaactgggcggtgacgatcgccgttgacctcgtggcctcacagctggtgatgagctactggttccctgacactccgggctggatctggagcgccttgttcctcggcatcatgttcctgctgaactggatctcggtgcgcggctttggcggggcggaatactggttctcgctgataaaggtagccaccgtcattatctttatcatcgtcggcgtgatgatgattgtcggcatcttcaaaggggcgcagccagccggctggagcaactgggggatcgcggatgcgccgttcgccggcggtttctcggcgatgattggcgtggcgatgattgtcggcttctcgttccagggcaccgagcttatcggcatcgctgccggtgaatctgaaaatccggagaagaacattccgcgcgcggtgcgccaggtcttctggcgtatcctgctgttttacgtcttcgcgatcctgattatcagcctgatcattccgtataccgatccgagtctgctgcgcaacgatgtgaaggatatctccgtcagcccgttcaccctggtgttccagcatgccggtttgctgtcggcggcggcaatcatgaacgccgttatcctgactgccgtgctgtcggcggggaactccgggatgtacgcctccacgcgtatgctgtacaccctggcctgcgacggtaaagcgccgcgtattttctcgaagctgtcgcgtggcggcgtgccgcgtaatgcgctgtacgcgaccaccgtgatcgcggcgctgtgcttcctgacttccatgtttggcaaccagacggtgtacctgtggctgctgaacacctccgggatgacgggctttatcgcctggctgggtattgcgatcagccactatcgtttccgtcgcggctacgtcctgcagggtaacgatattaataatctgccgtatcgttccgggttcttcccgctggggccgatcttcgccttcgtgctgtgcctgatcatcaccctcggacagaactacgaagcgttcctcaaggacaccattgactggggcggcgtggcggcgacctacattggtattccgctgttcctcgtcatctggtttggttacaagctggcgaaaggcacccgctttgttcgctacagcgaaatgaccttcccggaccgctttaagcgttaatcttcgcgattgtgcgataaaagccctctgtgaagagggctttatattgctggcaaagtgcaatcttcagggattgcccggcggcgctgcgcttgcgcgggcctacagataaccgcgtaactgattgatattgctatttttgtaggccgggtaaggcgaaagccgccacccggcagacatgtgagcacaataacgaagacagatttgtcatcacccggaagccctctgaacagagggctttttttatgtttgtgcggttacagcttgtcacaattcttcataattatattgataatcgtaatcattatctttatcattttcgcccattacggatgaagccactccccgtctctgccgcttgtacagactgacaccgggcgaccagccacatcgacgagaaaacagcgcgagcatgccgccgacagagcggcaagccgccagcgcgtgtgagcagcaccttgttgtttgtttggttgtacacctcatggagatttggaatgttcaggttaaacccttttatccgggcgggattgtctgcgtccgtcgtatcgttggcgtttccggctctggccgatgtgaatgaagaaacgctggtggtgaccgcctcggccactgaacagaatgtcaaagacgcgccggcgagcatcagcgtcatcacccaacaggatttacaacgcaagcctgttcagaacctgaaagacgtgctgcgcgatgtgcctggggtccagctcaccaacgaaggggataaccgcaagggcgttagcatccgcggtctgagcagcagctataccctgatcctggtcgacggcaagcgcgttaactcgcggaacgccgtcttccgccacaatgacttcgaccttaactggatcccggtggatgctattgagcgtatcgaagtggtgcgcggcccgatgtcctccctctacggctccgatgcgctcggtggggtggtcaacattattaccaaaaaaatcggccagaaatggaccgggacgctgagtgctgataccactattcaggagcaccgcgatcgcggggatacctataacggccagttcttcaccagcggcccgctgatcgacggcgtacttggaatgaaggcctacggcagcctggcaaaacgcgccaaggacgatccgcagtcatccagtaatgccaccggcgagacgccgcgcatcgagggcttcaccagccgcgatggcaatgttgaattcgcctggacgccgaacgaaaaccacgattttaccgcaggctacggctttgaccgtcaggatcgcgattccgattcccttgaccgcaaccgccttgagcgggagaactactctctgagccataacggccgctgggatatcggcaatagcgagctcaagttctacggcgaaaaggtggataacaaaaatccagggcagagcgggactattacctcggaaagcaatgccatcgacggcaagtatgtcctgccgctgggcatgattaaccagctggtgaccttcggcggcgaatggcgccacgacaaactgaaagatccggtcaacctgagcagcggcggccagtcaacgtcggccagccagtacgccctgtttatcgaagacgaatggcgcatcatcgagccgctggcgctgaccaccggcattcgtatggacgaccatcagacctatggcgatcactggagcccgcgcgcctatctggtatataacgccaccgataccgtcaccgtcaaaggcggctgggcgacggcgtttaaagccccgtcgctgctgcagcttaaccccgactggaccaccaactcctgtcgcggctcgtgcagcatcgtcggtaacccggatctgaaaccggaaaccagcgaaagcttcgagctcggtctctactaccgcggggaagagggctggcttgaaaatgtcgaaggcagcatcaccaccttccagaataatgtcgacgacatgatcgacgttctgcgcacctccagcgccagcgaagcgccgggctacccgaactttgtcggctggaaaaccgtcaacggcaagcgcgtgccgatcttccgctatttcaacgtcaacaaagcccgcatcaaaggggtggagacggaggtgaagatcccgtttggcgatgagtggaagctgacggtgaactacacctacaacgatggtcgcgatctgagcaatggcggcgacaaaccgctgcagacgctgccgttccataccgccaacggcacgctcgactggaaaccgctggacgattggtccttctacgtgacggccaactataccggccagcagcgcgcggtgagcgccaccggcaaaacgccgggcggctacaccctgtttgacgttggcgcggcatggcaggtgaccaaaaacgtgaaactgcgctccggggtgcagaacgtgggtgataaagatctgagccgggacgactacagctataccgaagaaggccgtcgctactttatggcggtggattatcgcttctgattgccggcgctaaaacgcgtcctgtaggcctgaacatgcgccgcgaagcagcttcgcggcgcattggcgtttagccaaagagatgctgcgcatggaagcgcagatggtcttcaataaacgaggcaataaagtaatagctgtggtcgtaaccgggctggatgcgcagcgttaacggccaggccttctgccgcgcgacctccgccagtaccgccggctgcagctgtccggcaaggaaaggatcgttgtcgccctgatcgataagcgtcggcacggcgtcctccggccggctggcctgcatcagcgcgcagctgtcccaggagtgccatgccgattcatccgcgccgagataggcggtaaacgctttcttgccccacgggacctgggagggattgacgatcggcgcgaaggcggagacgctggcgtagcggccgggatttttgagcgccataatgagcgcgccgtggccgcccatcgagtggccgctgacggcgcagcgttcgccgacgctaaactcgctacgaataagcgcgggcagttcgtcacgcaggtaatcgtacattcggtagtgcgccgcccagggcgcctcggtggcgttcaggtagaagccggcgccttgtccgagatcgtaaccgtcgtcgttggccgcctcgtcaccgcgcgggctggtatccggcatcaccagcgcgatgcccagctcggcggcaatgcgctgggcgcccgccttggtggtaaagttctcatcgttacaggtcagccccgacagccagtacagcaccggcggcggcgtttcgcgctcaggcggtaaaaaaatgctgaacgtcatggcgcagttcaggacaggggagtgatgacgccagcgttgttgctggccgtcaaaacagcgatgctcttcaagcagttccatgcaaggctcctcggaagggatgtgcgcgtaaacgttcataatacagatatttcattagccggtgagcaactttcactttctccttttgagaacttactgcatcattaatgcaacttatagccaacatgccggtgtagcgacggcgcttatgaatgcgtacagcggttggaacattccggatacggcgataaggatttggcgttgcgcctgaggcatggcttcgctccctaataaaaggcagcgccaatttcaataattatcgttacggctactggattctgtgcgccacctcacgcacaatgaatacaaactttgcccccagaaaaagcaaagagcgccacacctgcaggagaaacataaatgtcatcactgagtaaagaagccgtcctcgttcatgaagcgctggtcgctcgtgggctggagacgccgatgcgtgcgccagtacaagaaattgataacgaaacacgcaagcgtttgattaccggtcatatgaccgagattatgcaactgctgaatctggatctgagtgatgacagtctgatggagaccccgcatcgcatcgccaaaatgtatgtcgatgagatcttctccgggctggattattctcgcttcccgaaaatcaccgtcattgaaaacaaaatgaaggtcgatgaaatggtcaccgtgcgcgatatcaccctgaccagcacctgcgaacaccatttcgttaccatcgatggtaaagcgacggtagcctatatcccgaaagattcggtgatcggcctgtcgaaaatcaaccgcattgtgcagttcttcgcccaacgtccgcaggtccaggagcgtctgacgcagcagatcctgatcgcgctgcagacgctgctcggcaccaacaacgtggcggtatccattgacgcggtgcattattgcgtgaaggcgcgcggcattcgcgacgcgaccagcgccaccaccaccacctctctcggcggcctgtttaaatccagccagaatacccgccaggaattcctgcgcgcagtacgtcaccacgactaaaacggagcagggtgcatggagagaaatgtcacgctggactttgtccgcggcgtcgccatcctcggtatcctgcttctcaatatcagcgccttcggcttgccgaaggccgcttatctcaatcccgcctggtcaggaagcgcgtcccttagcgatgcctggacctgggcgctcctcgacctgctggcgcaggtgaagtttctcaccctgttcgcgctgctgtttggcgccggtcttcagctattgcttccgcgagggaagcgctggatccagtcgcggctgacgctgctggcgctgctcggtttcattcacggtctttttttctgggatggcgatattctgctggcctatgccctggtggggctggtgagctggcgcatggtgcgtgaggcgcaccatgtcaaatcgctgttcaacaccggggtggtgctctacctcaccggcattgcagtgctggtcctgttggggatgatctccgggaccgcggcgaatcgctcgtgggcgccggacgcggcgaacctgcagtatgagcagtactggaagctgcacggtggcatggaggcggtcagcaaccgggcggatatgctatctgacaatctgctggcgctgggcgcgcagtatggctggcagctggcggggatgatgctgatgggcgcggcgctgatgcgcagcggctggctgaaggggcagtttagcctgcgtcactaccggcgtaccggcgcgctgctggtggcggccggcatggcggtcaatctgccggcaatattcgcccagtggtatctggcctgggactatcgctggtgcgcgtttttactgcaggcgccgcgcgaacttagcgccccgctgcaggctatcggctatgccgcgctggcctggggctactggccacagctctgccgtttccgcctggtgggcgctatcgcctgcgtcggacgcatggcgctgaccaactacctgctgcagaccctgatctgcaccaccctgttttatcatctcgggctgtttatgcgcttcgatcgtctgcagctgctggcctttgtcccccccatctggaccattaacctccttgtctcatcgctctggctgcgccgcttccgccaggggccggtggaatggctgtggcgtcagttaaccctgcgtgcgtcaggcacatcattgaaagacacatccagataacgatctcgatcacaatcattaacaaaacggatgtaaacgtttccagccgtgtgacctcactcacgcagcggaccgcgggtcgctgccagaatagcctccttgctaagcacaggaggtgaatgtgacgtgctgtaattctcttaaggttgctgagtatgatcaccattcgtgatgtcgcccgccaggcgggcgtttccgtggccaccgtgtcgcgggtgctgaataacagcgcgctggtgagtccggatacgcgcgacgtggtgatgaaagcggtgacccaactgggctaccggcccaacgccaacgcccaggcgctggccacccaggtcagcgataccatcggcgtggtggtgatggacgtctccgacgccttcttcggcgcgctggtgaaagcagtggataccgttgctcagcagcatcagaaatatgtgctgatcggcaacagctatcacgaggcggaaaaagagcgtcacgccatcgaggtgctgatccgtcagcgctgctcggcgctgatcgtccattcgaaagcgctgagcgatgatgaactgagcgactttatgcaacatatcccggggatggtgctgatcaaccgcatcgtgccggggtatgcccatcgctgcgtcggactcgacaacgtcagcggcgcgctgatggccacccgtatgctgctcaatcatggtcaccagcgcatcggctatctctcctcaaaccacggtattgaagatgacgatatgcgccgggaagggtggagcaaagcgctgcaggagcaaggcatcatcgccccggacagctggatcggttccggctccccggatatgcagggcggtgaagcggcgatggtcgaactgctggggcgcaatctcggcctcaccgcggtgtttgcctataacgacagcatggcggccggcgcgctgacgacgctgaaggacaacggcattgtcgtgccgcagcatctgtcgctgattggctttgatgatattcctatttcccgttacaccgatcctcagctcaccgccgtgcgctatccggtaatgtcgatggcaaagctggccaccgagctggcgctgctgggggcggccggcaagctggatcgcgaggcgacgcactgctttatgccgacgctggtgcgccgtcattccgttgcccagcggcaaactgtggggccgatcactaactgacgcgatcgcgggatgtaaccgctttcaatttgtgagtaaattcacagtatattaacattcgcctgattatgatggcagcgtttaccagtctgaaccacgaggtgatggatattcctcactttatttagtaggaacaaggcgttaaacgagttttacagtcgtatttttctggagcgttacccgacacggaagaccgaattttcgtcgtgaaatgcgttgtgcggtaacactaatgcaacaaatcccgcctgcattttctcacaataatgaccctgcataataaaaccggagattccatgaataagaaggtgtttaccctgtctgctgtaatggctggtctgttatttggcgccgccgcacacgcagcagatacccgtatcggcgtgacgatttataaatatgacgacaactttatgtcggtagtgcgtaaggcgattgaaaaagatggcaaatccgcgccagacgtccagctattgatgaatgattcgcagaacgaccagtcgaaacaaaacgatcagattgacgtgctgctggcgaaaggcgtgaaggcgctggcgattaacctggttgacccggccgccgcaggtacggtgattgaaaaggcgcgcgggcagaatattccggtggtgttcttcaacaaagagccttcccgcaaagcgctggatagttatgacaaggcttattacgtcggtaccgactcgaaagagtcggggattattcagggcgatctgatcgccaagcactggaaagccaacccgaactgggatctgaataaagacggtcagatccagtacgttctgctgaaaggcgagccgggccatccggatgcggaagcgcgtaccacttacgttattaaagagctgaatgataaaggtctgaagacccagcagctgcagctggataccgcgatgtgggataccgcccaggcgaaagacaaaatggacgcctggctctccggcccgaatgccaacaagattgaagtggtgatcgctaacaacgacgccatggcgatgggcgcggttgaagcgctgaaagcgcacaacaagagcagcattccggtgttcggcgttgacgccctgccggaagccctggcgctggtgaaatccggcgcgatggccggtactgtgctgaacgatgccaacaaccaggcgaaagcgaccttcgagctggcgaaaaaccttgccgacgggaaagacgccgcggcaggcaccaactggaaaattgacaacaagattgttcgcgtcccctacgtgggcgtcgataaagacaacctgagccagtttaccggcaaataatcgtgatgtgaattgcgggcgtgggttatccacgcccgattattcctgatacagaaccagactcctgctggcgctagtgcgccggacggggcttgcatgaacgcagccaggtataactatggtcagcaataatagcgaacggtcaggcgaatatttgttggagatgagcaacatcaacaaatcgtttcctggcgtcaaggctcttgataatgtcaacctgaaggttcgtccgcactccattcatgcgttaatgggtgagaacggcgccggtaaatcgacattattaaaatgcctttttgggatctatcaaaaagattccggtagcattctttttcagggaaaagagatcgatttccattcggcgaaagaagccctggaaaacggtatttcgatggtgcatcaggaattaaacctggtattacagcgttcggtcatggataacatgtggctcgggcgctatccaactaaaggcatgtttgtcgatcaggacaaaatgtaccgggataccaaggccatttttgatgagctggatattgatatcgatccgcgcgcccgcgtcggtaccttatcggtatctcagatgcagatgattgagatcgcgaaggcgttttcctatgacgccaaaatcgtcatcatggatgagccgacgtcatcgctgacggaaaaagaggtcaaccatctgtttaagatcatccgtaagctgaaagatcgcggctgcggtatcgtctatatctcgcataaaatggaagaaattttccagttgtgcgatgaaataaccatcctgcgcgacggccagtggatcgccacccagccgctggaagggctggatatggataagatcatcgccatgatggtcgggcgttcgcttaaccagcgttttccggatcgcgaaaacactccgggcgaagtgatcctccaggtgcgcaatctcacctcgctgcgccagccctccattcgcgatgtctcctttgacctgcataagggcgaaattctcggtatcgccggcctggtgggcgctaaacgcaccgacatcgtggagaccctgttcggcatccgtgagaaggccagcggcaccatcacgctgcacggcaagaagatcaacaaccacagcgccaacgaggcgattaaccacggttttgcgctggtgaccgaggagcggcgctctaccgggatttacgcctatctggatatcgggtttaactcgctgatctccaatattaagaaatataaaaacagcgtcggcttgctggataactcgcgaatgaagagcgatacccaatgggttattgactcgatgcgcgtcaaaacccccggtcagcatacgcagattggctcgctttccggtggtaaccagcaaaaggtcattataggccgctggctgctgacccagccggagatcctgatgctggatgagccaacgcgcggtatcgacgtcggcgccaagtttgaaatctatcagctgattgccgaactggctaaaaaagacaaagggatcattattatttcttccgaaatgccggaactgctggggattaccgaccgcattctggtgatgagcaacggcctggtcgcgggcattgttgagactaaaaccaccacgcaaaacgaaatactgcgtcttgcgtcattgcacctttaagatcaggggcttcacatgagtgcgttaaataaaaagagttttctcacttacctgaaagagggtgggatatatgttgtccttctggtcctgctggccattattattttccaggatccgacatttttaagtctgctcaacctgagtaatattctgacccagtcctcggtgcgtattattattgccctcggcgtggccggacttatcgtcacgcaggggaccgacctctccgccggccgtcaggtgggtctggcggcggtgattgccgccaccatgctgcaggcggtggataatgccaataaggtattcccggatatggcgaccatgccgatcccgctggtgatcctgctggtgtgcgccatcggggcggtcatcggcctgattaacgggatcgtcattgcctacctgaacgtgacgccgtttattaccactctcggcaccatgatcatcgtctacggcattaactcgctgtactacgacttcgtgggcgcgtcgccgatctccggcttcgacagccacttctcccatttcgcgcaggggtttgtggcgctgggctccttccgcctgtcctacattaccttctacgcgctgattgccgtcttctttgtctggatcctgtggaacaagacgcgctttggcaaaaacattttcgctatcggcggtaacccggaagcggcgaaggtctccggggttaacgtagcgttaaacctgctgatgatctatgccctctccggcgtgttctacgccttcggcggcctgctggaagccggacgtatcggttcggcgaccaataacctcggctttatgtatgaactggacgccatcgccgcctgtgtggtgggcggcgtatcgttcagcggcggggtagggacggtgtttggcgtggtgaccggggtgattatcttcaccgtcatcaactacggcctgacctatatcggcgtcaacccttactggcagtacattattaagggggcgattattatcttcgccgtggcgctggactccctgaaatacgcccgtaagaaataagattgaacgcatcaaaaacccgcgcctggcgcgggtttttttatatctgaaacgaatgcgttgatggaggctacttttctttctgcagctccagcagctgctccggggtgacggccgggtaggattgggcgtcatccggcacgtcatgctgctgcgccggaatcgggatgagagggccgagaaagcgcggttcccgtttgaagatatagaggtccgccagcgcgccaaagcgggcgccgaactcgcgcagccgcacgctccacatatccttcggcgacggcaccgcgtagcactgggcctggatccccatatgcagggcgataaacagcgcccgttcgcagtggaagcgctgggtgatgataatgaagtcgttggtgtcgaacactttccgggtacggacgatcgagtcgagggtacggaaaccggcatagtccagtacgatatccgcgggatcgacgccgcctttaatcaggtcccgacgcatggtcatcggttcattgtagctttgcagagcattatcgccgctcagcaggagatagttgaccttgccgctgttgtaggcgttcagcgcaccctggatgcggtaacggtaatactgattgatgacgccggtgcggtaatatttggcggtgcccagcaccacaccgacctgacggtagggcaggtcctgcagttcatcatagatatagggcgcggttttccagctcatccagcggtcaaggcccagcacggtcaacagcagcaggccgagcaggactaacaggctgtagaacgcacgctttaacatgaacttggctcaataatagacaacggagtcttcaggctactttacccgccgggtaagcgcaagaaacccgcgtttgattgcggggattttcagcaatatagacagatcgccgaatgcaggccgggtaaggcgtgagccgacacccggcatagggatcttcaggtcgccatggcgcgaaccgtaggtcgggtaagcgtagcgccacccgacacctaacggtataaaaagtcggccggataagccgaagacgccgtccggcaatctgctcaggctgatcaacctaacaggacgcgctcaatattgtggcagcccagcgccttcagggtggcgacggtggcatcccactggatcagcgccgcgtcggctttctccgccaggattgcccgctggatagcgggataatcatagccgttgaggctcaggagattcagcgccccctgcagcggcggcagcgtcgggttgaacgctgcgttttccgcatagctaccgctgaaaatggtaccgtctttcagctccagcgccacgccggaaggcgagtggctatagggcgcatggcagcggttggcggcctgaatagctgcctgggttagggcatcgccgctgaccgggaagccatggtcctgttcatccatcagcagggttttgatctccaggtctttcgggccaaaggcgtccggcagatagtgctccagggcatgcgcttcgcgacccggcagatgaatgcgcagcgccagcccgctgttcagttcgttcataaactgacggcaatgaccgcacggcgtgtagttcaccgtgatagcgcgcagggaggtctcgccgcgcagccaggcgtggctgatggcgctctgttccgcgtgaacggtctgctgcatggtagcgccgagaaacgccatattgccgccaaagtaccagcggccgctgacgccgcgggcgatagccccgacgttaaaatgagaaaggtcggggcgcgcgcaggcagcggcaagcggcagtagcgcaaaagccagcgcgtcttcgtccagacctgtcgcatgctgcagcgtcgccacctgatcggcttcgagcagcgccgggaaatgcgggtcggtgagcatcggggcgatggccgcctgcagatctgctgccagagtcgtcaaagcagcttgaaaacgtgagtgcatagcgttgcctcataacagtgtaatgggaagccagtgtacgggcggccagcggttccatatgtgatgaatatctcattctttatgcaactccgatttgttgcattaaaaaatgtgattcaaatcactattaacctaccactgcgaggatcagcggaaataagaacggcgccatcaacgaggtgatgatcccgcacagcaccagcgccagtgagctaaacgcgccttcctgatagtccagctcggcgcagcgggcggtgccgagggcgtgcgaggcggtgcccattgacaggccgcgcgacgctttggtgcgaatgcgcatcaggttaagcaacgtatgcccaaataccgcgccgaggatgccgacaaaaattacgcacacggcgctgatggccggaatgccgccgatgctgccgctaaccgccatagcaatcggcgtagtgactgacttaggcagaatagaggcggcgatttgcggcgtggcgcccatcagcagagcgacgggggtgccggtgatcatcgccacgcagctgccgataaagcagatggtaatgatagatttccagcgggcgcggatctggtgcagctgttcatacagcgggaacgcaagggccactaccgccggctgcagcagatcgttcaggactttgctgccggcaaaataacgctcataggagatcccggtcagcagaagaaatggaataatcaccaccatcgccaccagcagcgggttgagcagcgggaacttaaagcgggccgccagtttgcgggcgagaaaaaagacgatcagggttagcggtagcgaccaccagatttcatgcatcattcttcttttcctttttggccaatcactttacgttcgccatgcaccaaatgggagctccagctcaccactacaaacaccaccagcgtactgatggcgcaggagataacgacaggccccagctgggcgcgcagcagatcccagtactgcatcaccccaacgccgatcggcacgaacagcagcgccatatagcggatcaggatattgcagccggggttgacccattgcggcggcataatttgcagcgccagcagtacgaagaggatcagcatgccgatgatgctgccggggatagtgataggcagcagcccggcgataaaaattccggcgtacaggcaggcgtaaatcaggacgaaagcccgcaggtactgccagataatagtcagcgatttactcatggtaataacccttgatgaagtgcattcatcatacaattaatccctaaaatgtgctaccgatcacatcatgaattctatgcatagcgctgatagcttacgggaaccatagtctcacccgtcagggcccgacaccttgcggctcaggcgggagcgctcaccacgctatcttgctggatgaggcgcggcaaataaaggcgaatgggacgccacagacccctgtaaagcatagagattatctcgccgctttgccgcatcgagcgtgcggggtacggcgtgcgtctggtccgacgcattgagcgctttcaaccagcgcccggaggcgctaccatagcgcctctttttattccgggtaacgatatgcgtgttctactggcgccgatggaaggcgtgctcgattcgctggtgcgcgagctgctgaccgaggttaacgattacgatctctgcatcaccgaatttctgcgcgtggtggatcaactgctgccggtaaaatcgttctacaggctatgcccggaactgcatcaccagagccgcacgccgtccggaacccgcgtacgcgtccagctgctgggacaatatcccgagtggctggcggaaaatgccgcccgcgcggtggcgctgggttcatggggggtggatttaaactgcggctgtccgtcgaagctggtaaacggcagcggcggcggggcaacgctgctgaaagatccggagttgatctatcgcggcgcgaaagccatgcgagaggcggttcccgagcatctgccggtgacggtgaaagttcgtcttggctgggacagcggtgaacggcgctttgaaatcgccgacgcggtgcagcaggcgggggccagcgaactggtggttcacggccgtaccaaagaagatggctacaaagccgaacgcatcaactggcaggcgatcggcgagatccgccagcgcctgactatcccggtggtcgccaacggtgaaatctgggactggcaaagcgcccaggattgtatggctgtcaccggctgcgattcggtgatgattggccgcggggcgctcaatgtgccgaacctcagccgggtgatcaaatacaatgaaccgcgcatgccgtggccgcaggtggtccagctgttgcaaaaatatacccgcctggaaaagcagggtgataccggtctgtatcatgtggcgagaattaagcagtggttaggctatttacgcaaggaatataccgaggcgctgaccctgtttaatgaaattcgcgccctgcaaacgtctgctgaaatagcggcggcgatcggccgctattaaccgccatactgttattcgcttcacatattattacttgcatgcctattgatgataggcatgggttgaataaagtgataatgtgcggtcaatcaattcaggattgctactgaactcaggcaaaacctaagcactttcgtcattcgtggcgcaaagtgcttaggtttttttttggtaaaaattcagggtggataaaatgatgatgtaaaacaatgagatgtgataacgatttctctggcattgtcgcggttttattaccgacggacgctttttgccattcatttttaaaaaaagaaaacgggtaaataaatagcctggggatcccctttgtttttattcagtcacggtggatatcacaatgcataacaaaaaaataaatcagcttttgatcggcgctatgctggcggccatggcgcctgccgtgagcgccgcggacatcccggcgtggaacggcagcgcgctggggtttgaagccgggcagcaagggctgctgggcgatatgctaggcattcgtccgatccttgaagaaaacggctttcattataatctcggctatcttaacgagatggcctacaacgccggcggcggttatgaccatgataaacacctggcctatattgaccaggtggcgctgacctttacccaggatctggagcgctggaccggcataccggatgcgcgtctcgaaggcaacatcgtcaaccgcaaccacgatgataatctcaccacgaaacggctgcaggatccgcgggtgagtttcaacgatctatcgcaggagagctggggcggcgggtcgattacccgccttggctggctcaccttttcccgcagctttgacgaccgccgcctgacctggcgcatcggcatgatgaacaaggtgcaaaccttcgaccagatcataccctgcgattttcagctgctgacccagtgcggtgggaaatcggccaactcgctgacctggaataactggaacattcatacctggggcaccaccctggagtacaagctgacgccgacggtcaccctgaaaggcggagtgatggagcaaaacccgcaggctaccgcgcgcagccacgcgtggagctggtcgacgaagggtagcaaaggcatcttactgccgatggagatcgaaacccgtccgctgattaatggcctgccgggagcctataaccttggcgtggtctggactaacgcgccgcagagcgacctctacagcggtaaatccggcggcgccggggcgaccgatccgcaaggttacgccgagcacgacagcacctggtttatgtacgccggcctgaaccagcagatcacccgccacgccgacgacccgctgcgggggatgagcgtctcactgagcggcagcctcagcgaccagcgcagcaactatatccactccgccgtcgccgcctccatgcgctaccgcggtctgtttgacgcccgcccggaggactggattggcttcggcctgacgtggatcgacatgagcagccactacgcacgtaatcagcgctatatgaatcagataagcggcgccaccgactataacgatccggcttacctgccggtggccggtcattcgctgaacggtgagctctattatcgcttccgcccggtctcctggctggagctgcagccgggcctgcagtactggcaccgtccgggcggcgtcgcgcagacccaggacgcgtgggtagtggagtggaaaaccgtcgtgaccttctgatagtcgcgatcttaatcacgttttttcacttgtcaggttgagcgcgcagcagaagttgttacagtgcgggtgttggattgcaactgctgcggcaggcaaaacctgatcacctggcgtttcgtcgggggtcaggtttttttgtttctggggtctatatgcaaatcgccaaagtactcaataacaatgtggtggtggttctcgacgagcaccggcgcgaacaggtggtgatggggcgagggctggcctttcagaaacgcccgggcgacgtgctggacgacagtaaaattgaaaaagttttcgccttacaaagcgatgagctggtcggccgcttaggcgagctgctcagtcaaataccgttagaagtgatgaccacctgcgatcgcattatcgacctggcacgcggacggctgggcaagttacaggaaagtttgtacatcacgttaacggatcactgtcattttgctatcgagcggcagaaaaagggcatcgcactgcgtaacgtgctgctgtgggagattaagcggctgtatccgaaggagttcgcgctgggccaggaggcaagggccatcattgccaaaaggctcggcgtggagttggcggaggacgaagccggatttatcgccctgcatctggtgacggcgcagctcaacagcgaaatgccggaggtcatgcacgtgacccgggtgatgcaggagatcctgcagctggtgaagtatcagctgcagcttaactacgatgaagagtcgctgagctatcagcgtttcgtcacccacctgaagtttttcgcccagcggatgctgacgcgcacggtggtggaagatgacgacgtctcgctgcacagcgcggtgaaagataactacgccaaagcgtggaagtgtgcggaaacggtggcgacgcatctgcaaaagcagtatcagcggtcgctgaccaccgaagaaattatgtttcttgccattcatatcgaacgggtaagaaaagaggggcgttaattctccccaacaaaactggattgttactgcatgatgcaggcaaaacctgagcgcgacgcccaccggcgtggttctcgggtttttttattttttactactcagtcgccggttgtctgcgggcagcggcagtaaggaaaagagcatggaatataaagcactcgcgcaggatattctcaaccgcgtcggcggcaaagagaacattgtgagtctggttcactgtgcgacacgtctgcgttttaaactgaaggataacggcaaagccgatgccgaagggctgaaggccaatccgggcgtgattatggtggtggagagcggcggccagtttcaggtggtgattggcaaccacgttcacgacgtctggctggcggtgcgccaggaggcggggttaagcgatgacaacgaaccggttgccgaggaaaaagcggccaaaggatcggtgttaagccagcttatcgacatcatctccggcatctttacaccgtttatcggcgtgatggcggcaaccggtctgctgaaaggcctgctggcgctggcggtgacctgcggctggcttacgccggagcaggggacttataaaatctggtttgccgccagcgacgcgctgttctttttcttcccgctgtttcttggctataccgccgggaagaagtttggcggcaacccgtttatctcgatggtgattggcggggcgttaacccacccgctgatgattcaggcctttgaggccagccaggcgccgggcgcggcggtggagcactttctcggcattccggtgacctttatcaactacagctcatcagtgatcccgattattctcgcctcatgggtctcctgctggttggagcgcaagagcaatgcgctgttgccgtcatcgatgaaaaacttcttcagcccggcgatctgcctggcggtggtggtcccgctcaccttcctggtgattggcccggtcgccacctggctgagccatctgctggccaacggctaccagttcatttatgcgtttgccccatggctggcgggcgcggtactgggcgccatgtggcaggtgtgcgttattttcggcctgcactgggggctggtgccgttgatgatcaacaacatgacggtacttggtcacgactccatgctgccgattattcttccggcggtgattgcccaggtgggggcggttctggggattttgctggccacccgcgatgcgcgtcagcggatgctggccggttccgccttctctgcggggctgtttggcatcaccgagccggctatctatggtctgaccctgccgctgcgtcgtccgtttatcttcggctgtatcgccggcgccatcggcggggcgatcaccgccttcagtaatagtcatgcttactcgttcggcgtgccgaatatctttttcccggcgcagatgatcccgcccggcgggattgacgccagcgtctggggcgggcttatcggcaccggcgtggctttcgtgctcgcctgcgtgctgaccttcttcgccggcctgccgcgcgccagcgctgcaccgggcgccgtgacggtagccccggcctcggcaaacgatattctggcgccgatgagcggcagcgttatcgccctcgagcaggtgccggatagcaccttcgccagcggcctgctgggtaaaggggtcgccattatcccggcggtgggccaagtgattgccccgttcccgggcgaagtggcctccctgtttcagactaaacacgccatcggcctgcaaagcgacagcggcattgagctgctgatccacgtcggcatcgacacggtcaaactcgacggcgtgccctttaccgcgcatgtgaaagagggcgacagggtacaggccggcgatctgctgattgagtttgatcgccaggcgattctggacgccggctacgacctggcgaccccgatcattatcagcaacagcgacgactaccgggagattgacacggtggcgtccagcgccgtcgaagccggtcagccgctgttgtcagtcagccattaatcacaggagaaagagatgaaaacattcccggcggattttttgtggggcggcgcgaccgcggccaatcaggtggaaggtgcttatctggaagatggcaaaggcttatccacctccgatgtacagccgcacggcgtgttcggcgaagtggtcgagcgcgtacccggcgacagcggcataaaagatgtggcgatcgatttttaccatcgctatccggaagatattgccctgtttgccgagatgggctttaactgcctgcgagtctccatcgcctggacccgcatctaccccaacggcgacgacgccgagccgaacgaagccggcctcgcgttctacgacaagctgttcgacgagatggcgaagcacaacatcaccccgctggtgacgctgtcgcattatgaaatgccatgggcgctggtaaaaaactacggcggctggggcagccgggaggtgattggcttctttgagcgctacgcccggacggtgttcagccgctataaaaataaggtcaaactgtggctgacctttaacgaaatcaatatgtcgctacatgccccgatgaccggcgtcggcctgccggccggcagcagcaaaggcgaagtgtatcaggcgattcaccaccagctggtggccagcgcgctggcggtcaaagcctgtcatgagctggtgcctgagggcaaaatcggcaatatgctgctcggcgggctgatgtatcccctgagctgcaaaccggaggatgtgtttgagacgctgcaggagaaccgcagctggcagttcttcggcgacgtacaggcgcgcggcgcgtacccgggctatatgcagcgctatttccgtgacaacggcatcacgctcaccatcaccgacgccgatcgtgaagcgctaaaaaccaccgtcgactttatctccttcagctactacatgaccggctgcgtcaccgccgacgaggcgctgaaccagcaggctcgcggcaatattctcagcatggtgccgaacccgcacctggcgagctcggagtggggctggcagatagacccgctgggcctgcgcacgctgctgaacatgctgtgggatcgctaccagaagccgctgtttatcgtggaaaatggtctgggcgccaaagataaggtggaagccgacggcagcattaacgatgactaccgcatcagttacctgaacgaccacctggtgcaggcgcgggaagccattgacgatggcgttgagctgatgggctttaccagctggggaccgattgacctggtgagcgcctcaaaggcggagctgtcgaagcgctacggctttatctatgtcgaccgccatgatgacggtaccggcaccctggcgcgcagtaagaagaagagctttggctggtataaagaggtgattgccagccgcggcgccagcctgaaagcctaaaggatgcccgcccggccatcgccgggcgggagattagccggtttacgcgcgcgcagtaaaaaggtcatcggaggttctttctcttcatccagagcgggcagggtggaaaagaggtgcggctcgttaaaagatgccggcttatattcatcccttgaattgataaggttgtttatttttagcaaactaataatttagtcacacgctttactaaacgcgtttaattcaattaacttatgataaccaacctgattaagttatctgacctgtccaatgaaattgatattaaataaaagcgtgctggcggcattgcccctggccatcgcgctggctggctgcgcgccatctcatgaggttgctaatccgccgcagcagcaaattccagcctcccatgtttccatggatctccctgccgccgtgaaaaatggctggccgcagactgactggtggaaagattaccatgacccacagcttaataatctgattcagcgagcgttggccaacgcgccggatatgcagattgccgaacagcgcatcaggcttgccgaagcgcaggcgcgaatgtcgcaggcgaatcttggcccggagatggatttctccgccgatattgaacgccagcgcatgtcggccgaaggcctgatgggaccgtttgctaccgacaccgacggcaataccggcccgtggtacaccaacggtacctttggcctgaccgctggttgggatctggacctgtggggcaaaaaccgtgcgctggtgaaagcgcgtatcggcgagctgaaagcccaggttgctgaacaggcccagacccgtgagctgctctccggcagcgtggcgcgtctgtactggcagtggcagacggaagcggcgatcaaagcggtgctgcagcaggtgaaaaacgagcaaaataatatcgtgacggtcgacaaggccctgtatcagcgcgggatcactaactccgccgaaggggcggagaacgatattaacgtcagcaaaaccgaccagcagctggcggacgtgacgggcacgatgaaagagattgaagcgcggctgatggccctgaccaacagccagagccagtcgctaaacctcaaacccgcaagcctgccaacggtcagcgcgcagctgccagataccctcggctatgagctgctggcgcgccgcccggatctgcaggtcgcccactggtatattgaagcgtccctgagcgaagtggacgcggcgaaagcggcgttttatccggacatcaatctgatggcgttcctgcagcaggatgccctgcacttaagcgatcttttccgccattcggcgcagcagatgggcgttactgccgggctgacgctgccgatctttgacagcggccgccttaacgccaacctggatatcgccagcgcgcagaatagcctgtcgatcgcccagtacaacaaagcggtggtggatgccgttaaccaggtggcgaaaaccgccagccaggtcgaaacattaatggccaaaagccagcagcagcagcaggttgaaaaagacgctcagcgggtagtggatctggcgcaggcccgaatggcggcggggatcttacctggctccagagtcagtatggcgaagctcccggcgctgcaggagcggatcaccgcattgcgcctgcacggccagtggattgacgccagcattcaactgacctcggccctcggcggcggctaccaccagacggtgaagtaaccgccaaccacggtgcgcccgcgggcgcgccgcttaatctttcttcttactctcgcgccgcctgagccaccagtgggcggccaccaccaccaccactgcgaggatcagccagatccagtgcttcagatgggcgtccagatggtgcagccacgggccaaccacctcgccgccgagatagccaatggtggtaaacagcagggcccacaccagcgctccgacaatattcagcggcaggaaaatgcgcggcggcaggcggctggcgccgatcagcagggggccgattacccggaagccatacataaagcgggtgccgatgacaaacagccacggccggtgctggatcatacgctgcgctttacggatccgcgctttctgactggcgaaacggcgcaggatgcgtcccccgaagcggcgaccgaccagatagagcagctgatcgccaatcatcccgccgagggcgacggcgatcaccaccaggggaaatttcagtagcccctgatgcgccgcgacgccgcccagcagggtaatggtctcaccttccgccatgctgccgacgatcagcgccgcgtagccatactgggaaatcaggtgattgatatccataaaaagcttttctccttacctcatcacctcttaatcatacaccctgctgaccaaaacgcggcgacgcagaattttctgtgctgtacataaaataatctacagggtgaattatacttggatcagtgcagtacgaagccgtgacaagggggacgctatgaaccatgtctgggggctcttcgctcatcccaaccgggaaatgagcgtgattaagagcgagaatgaaaccatttctcatcactatacgcatcatgtgctgctgatggcggcggttccggtaatctgcgcctttatcggcaccacgcagctgggctggaacttcggcgatggcaccgtgattaaactgtcgatgctgaccggactggcgctggcggtgctgttttacgccgtgatgctcgccggggtggcgatcatggggcgggtcatctggtggatggcgaggcagtatccgcagcagccttccctgaaacgctgcatggtgtttgccggctacgtcgccaccccgctgtttctgagcgggattgtggcgctctatccgctggtctggctgtgcgcgctggtcggtactattgcgctgttctataccgggtatctgctgtatctcggcattccgaccttcctgagcattaatcgggaagaggggttaagctttgccagctcgacgctagctattggggtactggtgctggaagtgctgctggccatcaccgtggtgctctgggggtatggctaccgactcttctgatcgggcggcacgggtaaatatgcattgccggcaaatatgtattttatgtcggcaatgcagcatttcttcacgattcttattaggcacagggccttacggcgcggtatgatggcgtttgccagcgaagttgcccacttaacctcgcggcgtacgttccataacgtgcaaaaatacttttcagaatgcccatgatgccgaaatttcgagtctctttgctcagcctgaccttgctgctggctgtgccttttgcgccccaggcgttagcaaaaaccccgacggcggtgaccgcctcgcagccggaaattgcctccggcagcgccatgatcgtcgatctggccacgaaaaaaatcatttatgccagccagcctgatctggtgcgcccgatggcgtcgatcaccaaagtgatgaccgccatggtggtgctcgatgcccatctgccgctggatgagatgctgacggtggatatcagccatacgccggaaatgaaggggatctactcccgcgtgcgcctcaacagccagattagtcgccgcgatatgctgctgctggcgctgatgtcttccgagaaccgcgcggccgccagcctggcgcatcactatccgggcggctacgacgcttttattcgcgcgatgaacgccaaagcccaggcgctgggcatgacccatacccgctacgtggagcccaccggcctgtcggtgcataacgtctccaccgcccgcgatctgaccaaactgctgatcgccagcgagcagtatccgctgatcggccagctgagcaccaccaaagaagagaccgccaccttcgcccatccggcctacagcctgccgttccgcaacaccaaccatctggtgtatcgcgataactggaacattcagctgaccaaaaccggcttcaccaacgctgccggccactgcctgattatgcgcacggtgattaaccaacgtccggtggcgctggtggtgatggatgccttcggcaaatatacccacttcgctgacgccagccgcttgcggacctggattgaaaccgggaaggtgatgccggtacccgcctcggcgctgagctataaaaagcagcgcgaagcgcagatggcggaggcgatgctgaaaggcggcgcgcagaccgcgcagaacgattaatctgcatgtctcccggatggcggcgcattgcgccttatccgggctacgtgatttggcgccgggttcgcccctttcgcaggcccggcaagcgcagaggccgagtgccggtgtttgtgcaggatggcggctgacgcttctacggaaccgcgctgaacggtagcccggctaaggcgtttacgccgcgagccggggatttggcgccggatatcactccggcagcgtccagtcgccgtcacccagcgcgcgctgcataatcaacgtatcccgccagtcgcccatcttgtagccgacgctgcgcagctgacccgccacggtaaagccgaactttttatggatcgccagcgagccggcattgttatggccatcgccgatgatcgccagcatctgccgccacgggcctttctcgcactcagcgattagcctggacagcagcgcgctgccgatgccgcgtccgcccattccggattccacgtatatcgattcctcgagggtgtagcgataggccggacgcgggcgatagaaggtggcatagcagtagccgacgatagccccgcgccacagcgctaccagccacggcagcccgttgtcgcgcacggtctggatccgtttacgcatttcgtcaacggtgggggggatctcttcgaaggaggcgcggccattaagcacgtgccagacatacagcgcggcgatggcgtgcgcatcgtcgggcagcgcttcgcgaatttctaaatcactgtcgagtaacggggcctctgcgggcatggcggcgctcctgaatctgccggagaaacattctccggcgtgcagcgtaatacagaagcgccaggctgaatagtcctgccgtcgattattgcggatccgccggagaggctggcgtcggggccgcttcaccccagtatttctgcttgctggttttaccaatccccgggttcatgctgttggtgggatcgttctggcgatagaactgctgcaggctctccggggcctcatacagatgacccacgttatgctccgccgggtactgggcgccgcgcgctttcagtaactccagcattttttccttcagcgcgtgggcgtcgacccctttcctgacgatgtaatcctgatggaacacatggcacataaagtggccatagtagagcttatgcaccagctggctgtcgatttcgggcggcagatgttcgaaccactcggtatcgttacggcgcagggcgatatccagcgccagaatatcttcgacttcgtcggcatgcaccgcctgatagcggattgccgcgccggcggcggcaaagcgatggaggaacgccttgctgccttcctccggcgtacaggcgaagaaatccccctcggcctgctggaagtactccgtcaaccaacgctgcgcttcttcgatgccgtcgccagccatcttcagcagcagatgatgttcatatttatcacgccaggttttcatccgctccggtaaatgcgccgggaagacgtggccgagcttctgcataaagcggtcggtaaagtgcggcttaaacagcgagactttctccagcatcgcgtcggtgcgccccttcatggtgaagaagaacggcattttgtcggtgccgagcttgtcgatcatcaggaaggtgtctttgccatacttctcggcgatatcgtaaatatcgcggtgcatatattcccccgccaccggcagatgctggaactcggcgaggatatggcggcggatctcggtcaatacctgcggctggttggtgccaatgtaaaacacctgctggcgcttttccgccgggaaagtatcgagacgcacggcgaaaaccgccagcttgccggcgcagccggaggattcgaacaggcggtccgggtcggcgttatagcgcgccggggtgtcggcatcgacatcgcgcacgcgggtgacatagtcgtgatcgtgggcgtggcggccgtcgtgcaggacatcgctatcgctaatccgttcgtcatcgaggcggctgaggatctgctccggcgtgctgccgagatcgatgcccagatgattgaccagcttcagcttgccgtcggcgtcaatctgcgcgaacagcgacatctcagtgtaggccggcccgcgctgcaccagcgagccgccggagttgttgcagatcccgccgatgaccgacgcgccgatgcatgacgaaccgatcaccgagtgcggttcgcgtcccagcggtttgagcgctttttccagcgaatagagggtggtgccgggccaggccagcacctgctcgcctttgtccagcagatgcagtttgtccaggcgcagggtgctgataatcacgatctcgcgatcgtaatcattgccgttgggggtcgaaccttcggtcaggccggtgttggccgcctgcatcagaataattttatcggcgtctacgcaggcgttgagcacgcgccagagctccagcagggtaccgggaaagacaaccgccagggcctcgccctgaccggagcggaagcctttgcggtagcgctgggtttttgccgggtcggtcagcagatgcgaagggccaaccaggcgcgccaggtcagccagaaacgttttatgggtgtcagtgggtgcagatgacatgttccactccttgtggtggtgcgcgaaatatcgaggataagcatagcgctttgtatgacaatttgatgcatgaatgtttcgcaaaaatcagagaagaaccttagcattctgcgggcgcgttgtttatatatatggcaaactgcggtttttattatgttttaccgagtccccgtctgagataaagcgagataacaatgaaatggctctgcactgtaggcgtcgccgtgagtctggcgctgcaacccgcgctggcggatgaactgtttggtaaccaccccctgaccccgcaggcgcgggatgcctttgtcaccgacctgctgaaaaaaatgacggtggacgagaaaatcggccagctgcgtctgataagcgttggcccggataacccgaaagaggcgatccgtgaaatgatcaagaacggtcaggtgggggcgatttttaacaccgttacccgcccggatatccgtgtgatgcaggatcaggtgatgcagcttagccgcctgaagatcccgctgttctttgcctacgatgtgctgcacggtcagcgcaccgtgtttccgataagcctcggcctggcctcgtcgtttaaccttgatgcggtgaagaccgtgggccgcgtgtcagcttatgaagccgccgatgacggcttgaacatgacctgggcgccgatggtcgacgtctcccgcgacccgcgctggggacgcgcttccgaagggttcggggaagacacctatctgaccacgatgatgggccaggcgatggtggagtcgatgcagggcaagagcccggcggaccgctattcggtgatgaccagcgtcaagcatttcgccgcctacggcgcggtggagggcgggaaagagtacaatacggtcgacatgagcccgcagcgcctgttcaacgactatatgccgccgtataaagccgggcttgatgccggcagcggcgcggtgatggtagccctgaactcgctgaacggcaccccggcgacctctgattcctggctgctgaaagacgtcctgcgcgaccagtggggctttaaaggcatcaccgtttccgaccacggcgccatcaaagagttgattaagcacggcgtggcctccgacccggaagacgcggtgcgcgtagcgctgaagtccggcatcaacatgagcatgagcgacgagtattacagcaagtacctgccggggctggtgaagtccggcaaggtgaccatggccgagctggatgatgccacccgacacgtgctcaacgtgaaatatgatatgggactgttcaacgatccctacagccacctgggaccgaaagattctgacccgcaggacaccaatgcggaaagtcgtctgcatcgtaaagaggcgcgcgaagtggctcgcgagagcctggtgctgctgaagaaccgtcttgatacgctgccgctgaaaaaatccggcactatcgcggtggtgggcgcgctggcggacagcaagcgcgacatgatgggcagctggtccgcggccggggtggccgaccagtcggtgaccgtcctgaccggcatcaaagaagcgctgggcgataacggcaaagtgatttacgccaaaggggcgaacgttaccgatgacaaaggcattgtcgatttcctcaatttgtatgagaacgcggtgcaggttgacccacgctcgccgcaggaaatgatcgacgaagcggtcgcggcggcgaagcaatccgatgtggtggtcgccgtggtgggcgaggcgcagggcatggcgcatgaggcctccagccggaccgatatcaccctgccgcagagccagcgcaatctgattgccgctcttaaagccaccggcaaaccgctggtgctggtgctgatgaacgggcgtccgctggcgctggtgaaagaggatcagcaagccgatgcgctgctggagacctggtttgctggcaccgaaggcggccacgccatcgccgacgtgctgtttggcgactacaacccgtcgggcaagctgccgatgtctttcccgcgctcggtggggcagatcccaacctactacagccacctgaataccggccggccgtataatccggagaagccgaacaagtacacctcgcgttacttcgatgaagccaatggcccgctgtatccgtttggttacggtctgagctacaccacctttagcgtctccgatgtcaacatgtcgtcggccaccatgccgcgcgatggcagcgtgaccgccagcgtgcaggtgaccaacaccggcaatcgcgaaggggcgacggtgatccagctctacctgcaggacgtcaccgcctccatgagccggccggtgaaaatgctgcgcggctttaaaaaggtcaccctcaaaccgggcgaaacgcaaaccgttagcttcccaatcgacgtcgacgcgctgaagttctggaatcagcaaatgaaatacgttgctgagccgggcaaattcaatgtctttatcggcgtggactcagcccgcgtgaagcagagcgagtttgagctgctgtaaggcatcgctcttaagtccaacgtcacgctttaaaggccgattaatcggccttttctttttcgcatcgctggcaaatgggctacgcttttctcttaagcttctgtaagcgaagcgcaaaagaactgagggaagcgggatgaagatggcaacgacatggtccggcgcgctggcgctggccgccctgataagtttaccgctgcaggcggcggagccggtgaaggtcggctcgaaaattgataccgaaggcgcgctgctgggcaatatgatccagcaggtgctggaaagccacggcgtaaaaacgattaataaaatccagctcggcaccacgccggtggtgcgcggggcgattgtcgccggcgagctggatatctacccggaatataccggcaatggcgccttcttcttcaaagatgaaaacgacccggcgtggaagaatgcccaacagggctatgagaaggtgaagcgcctcgatcaggagaaacatcagctggtatggctcaccccggcgccggccaacaacacctggactatcgccgtgcgccaggacctggcggagaaaaataagctgacctcgctggccgacctcagtcgctacctgaagcagggcggcgaatttaagctggcggcttcggcggaatttattgagcgcccggacgcgctgccggcgtttgaaaaagcgtatggcttcaacctcaaccagaaccagctgctgtcgctggccgggggcgatacggcggtgaccatcaaagcggcggcgcaacagacctccggcgttaacgcggcgatggcctacggcaccgatggcccggtggcggccctggggttacagacgctgagcgacccgcagggcgtgcagccgatatatgccccgacgccggtggtgcgcgaggcggtgctcaaggcctacccgcagatcgccgactggctgcagccggtcttcgccagcctcgatgaaaaaacgctgcagcagctgaacgctcgcattgcggtggagggccaggatgcgaagcgcgtggcggcagattatctgcagcagaaaggcctgctgaagtaagccaccggtgaccattcgctgtactcaccgcgtcggcctgctgctgacaggtctgctgctggttacgctggcgctgccgtttattacttacgcgccgaatcgcttactctccggggaagggcgcgggctgtggcaggtaatgccctggctcgccggcgttcagctggcggcggcccttgccgggatgctgctttgctggctgccaggcagggccgcgccgcttcttcacctgctgctggccgaactgctcttcccgctgcttatctggggcagcggccaggcggcgcttgagctctcccgccacggctcgccgctggcgcgcacctcgcccggcagcggcctgtggttgtcgctggcgctttgtctgctgctggccagcgaggccatccgtcatcttaccgtccggccgctctggcgctggctgctcaatgcgcaagtctggctgttgcccatcatcctgctcgctatcggggcgctcgatcagctctcattgctgaaggagtatgccaaccgtcaggaggtatttgatgacgccctgcgccagcatctgcttctgctgttcggcaccctgctgccgggcctgctgattggcctgccgctgggggtatggctgtggcggcgtccgcgctggcaggcgccggctttcaccgcgctcaatgtgatccagactattccgtcggtagcgctttttggcctgctgattgcgccgcttgccggtctggcgcgttatttcccgacgctgggcgagctgggcgtctccgggaccggcgtggcgccagccctgatcgctctcactctctatgcgctgctgccgctggtgcgcggggtggtgaccggcctgcagcaggtgccgcaggatgccctggaaagcgcgacggcaatgggcatgagcgccgggcagcgctttcgtcaggtgcagcttccgctggcgatgccggtactgctgcgcagcctgcgggtggtcagcgtgcaaaccgtcggcatggcggtagtggccgcgctgatcggcgccggcggctttggcgcgctggtttttcaggggctgctgagcagtgcgctggatctggtgctgctgggcgtggtgccgaccattgccctggcggtggtggtggatgccctgttcgccctgtggggcgcctggctaaaaggagaggccaatgattgaatttcaaggggtcagcaaagtgtttgccggccacccggcggtgaaggacctgaccctggagctgcgcgaaggcgctttctcggtgctggtggggacttccggctcgggcaagtcgacgacgctgaagatgatcaaccgtctgctggagccggaccggggcactattcgctttgccggcgaggacatccgcctgcagccggtcctgaccctgcggcggcggatgggttatgccatccagtccatcggcctgtttccccactggacggtggcgcagaatatcgccaccgtgccgcagctgcaaagatggccgcgggcaaggatcgccgaccggatcgacgagctgatggcgctgctggggctggaggcgacgctgcgcgaccgttacccgcatcagctctccggcggtcagcagcagcgggtgggggtggcgcgggcgctggcggcagatccggaggtgctgttgatggatgagcccttcggcgccctcgacccggtgacccgcgaggcgctgcagcaggagatgctgcgcatccaccgtctgctgggacggacaattgtgctggtgacccatgatattgacgaagcgctgcgtctggcggaccacctggtgctgatggacgggggcgaggtggtccagcagggggcgccgctggagatgctcctgcgaccgaaaaatagctttgtacagaccttttttggccgcagcgagctgggtgtgcgcctgctgtcgctgcgcgaggtgggggactatttgcgtcccgacgaacggctggcgggcgaggggctgaccgtcaccatgaccctgcgggaagcgctgtcgcagtttgtcgcccggcgctgcgagacgctgccggtggtcgatgccgaaggcaggccctgcggtacgctgcattttgccgatctgctgcgccaggagatgagccatgaaggcgcttcgtgagccgctgtggtggcttatcgcgctgtttatcggcttgctggcagggctgccctacagcgcgccgctgttcagtcggctgttcccggaactgccgcggccggtctaccagcaggagagcttctgggcgctcactctcgatcacggctggctggtggtggcgtccagcctcgcggcaacggcaatcgggctgggggcaggggtggcggtcacccggcccgccggcagcgcgtttcgtccgctggtggagaccatcgccgctatcggtcagacctttccgccggtggcggtgctggcgatggcggtgccggtgctgggctttggctggctgcccgcgctcatcgccctcgcgctgtatggcatactgccggtgctgcaggggacgctggccgggctgggttcgataccgcctggggtgtcaggtgtggctgaagggatgggaatgaccggctggcagcgtctgtataaggtggagcttccgctggcggccccggtgatcctggcggggatccgcacctcggtcatcgtcaatattggtaccgcgaccattgcctcgacggtgggggccagtacgctcgggacgccgatcatcatcggcctgagcggctttaataccgcctatattgttcagggggcgctgctggtggccctggcggcgattatcgtcgaccgcgcgtttgagcgtctgacccgctggatcagccgacaccgccacgcacaataaaggaatagccggccagcattacgccgctgatcccgccgatggccataagtaagaagagggtgacgaccgcgattttcgctggcttcataataggctcctgatgttaacaaggggattatacggtgaagcgcaggtgttaatgaaacattaattgcggtttagcgccgcgccggggtttttgccgcgtttgctgcgcaacgcgccgcaaaaaagtgtgatcctggccgtcgtttttcatttttatgcagggcttcaaagaaagttttcgccaggcagggtatggtacgcgctttcaggcatgtgtggtttgcgggtatgtacgagtttgatctggtgttgctgctgcttcagcagatgtgcgtatttttggtcatcgcgtggttgatgagcaaaacccgactgtttatccccctgatgcaagtcaccgttcgcctgccgcacaagctgctgtgctacgtcactttctccattttctgcattatggggacctatttcggtctgcatatcgaagactccatcgccaacacccgcgccatcggcgccgtgatgggcggcctgctcggcgggccggtggtcggcgggctggtagggctcaccggcggcctgcaccgctactcgctggggggaatgaccgcctgaagctgcatggtttccaccatcgttgaggggctgctgggcggtctggtgcacagcgtgctggtcaaacgcggccggccggacaaagtctttagcccgctgaccgccggggcgatcaccttcgtggccgagctggtgcagatgatgatcattctgctgattgcccgcccgttccaggacgccctgcatctggtgcagagcattgccgcgccgatgatggtcaccaataccgtcggagcggcgctgtttatgcgcattctgctggataaacgggcgatgttcgagaagtacacctccgccttttccgccacggcgctgaaggtggcggcgtccaccgaggggatcctgcgtcaggggttcaacgaagagaacagcatgaaggtggcccaggtgctgatccaggagctggacatcggcgcggtggcgatcaccgatcgcgacaagctgctggcgtttaccggcatcggcgacgaccaccatctgccgggcaagcctatttcctcctcgtatacgcaacgggcgattgagaccggggaggtggtctacgccgacggcaacgaggtgccttatcgctgctcgattcatccgcactgtaagctggggtcgacgctggtgatccccctgcgcggcgagaaccaacgggtgataggcaccattaaactgtatgaggcgaaaaatcgcctgttcagttcgatcaaccgcaccctcggggaggggattgcccagctgctgtcggcgcagatcctcgccggacagtacgagcggcagaaggcgctgctgacgcaatccgaaatcaagctcctgcacgcccaggtcaacccgcacttcctgtttaacgcgcttaacacgctgaaggcggtgatccgccgcgacagcgatcaggcaggccagctggtgcagtatctgtcgaccttctttcgcaagaacctgaaacggccgacggaaattgtcactcttgccgatgagatcgagcatgttaacgcctatctgcagattgagaaggctcgctttcaggctaacctgcagatccagatggcggtgccggaagggctggcgcatcaccagctgccggcttttaccctgcagccgatcgtggagaacgccattaagcatggtacatcgcagcatctaggcgtcggcgaaattaccattcgcgccagccaggacgatcgctggctgcagctggatatcgaagataacgccgggctgtaccgggccaacccccaggccagcgggctggggatgaatctggtggacaggcggctgcgggcgcgttttggcgccgactgcggcatcagcgtcacctgcgagccggagcgctttacccgtgtcaccctacgtctgcccctggaggagaatgcatgctgagagtattgatcgtcgatgatgagccgctggcgcgggaaaacctgcgcattttgctggagacacagcgcgatatcgagatcgtcggcgagtgcggcaacgcggtggaggccattggcgcggtgcataagctgcgtcccgacgtgctgtttctcgacatccagatgccgcgcatcagcggtctggagatggtcgggatgctcgacccggagcaccgcccctatatcgtgtttctcaccgcctttgatgaatacgcggtgaaagcctttgaggagcatgcctttgactatctgctgaagccgattgaagctgcccggctggagaaaaccctcgcccgcctgcgccaggagcgtaatctgcaggatgtgtcgctgctggatgatgctcagcagacgctgaaatacattccctgtaccggccacagtcgtatctggctgctgcagatggaggatgtggccttcgtcagcagccggatgagcggcatctacgtgaccgaccgcgagggaaaagagggctttaccgaactcaccctgcgcaccctcgagagccgcacgccgttgctgcgctgccatcgccagtatctggtgaatatggcgcacctgaaggagattcgcctggaggagaatggccaggcggagctgctgatgcgcgccgggcaaacggtgccggtgagccgacgctatttaaaaagcctgaaagaggcgattggcctgtaaagctggtacactgcgccccattgcatcatcgacagtaaaaggccctcatgctcagtaatgatattcttcgtagcctgcgctacaccctgaaagtcaataataacgatatggtgcgcattctcgcgctctccgctatggaatccaccgccgccagcttcgacacctggacgacgaaagaggatgaagagggctttgttcgctgcccggacattatcctgtcgggtttccttaacggccttatctatgacaagcgcggcaaagatgattcggccccggagctggcgctggagcgtcgggtgaataacaacacggtgctgaaaaagctgcggatcgccttctcgctgaaaacggacgatatccaggcgattatgagcgagcagaaataccgggtgtcggtgccggagatcaccgccatgatgcgctcgcctgaccacaaaaactaccgcgagtgcggcgaccagtttctgcgcaatttcctgcgcggactgacccagcgggtgcataacccgaaggcatgattttttgccgggtggcggcttcgcctgacccggcctacaacgactgcccccgggcgcgtgctagcatagcgccgccgggcaaaaaaaagccggagatactctccggcttttttgctatttcacctgctgacccggcttggcgccgtcgtcagggcttaacaggaagatatccttcccgccagggccggcggccatcaccatgccctcggagatgccgaagcgcattttgcgcggcgccaggttggcgaccatcaccgtcaggcggccaatcagcggctgcggatccgggtaagcggagcggatgccggagaagacattgcgtttttcgccgccgagatccagcgtcaggcgcagcagcttgtcggagccctcgacgaattccgcgttttcaatcagcgccacgcgcagatcgactttggcgaaatcgtcaaaggtgatggtctcctgaatcggatcgtccgccagcggaccggtgaccggcgccgcggtggctttcacctcttctttagaggcttccaccagggcttccacctgtttcatctcgatgcggttgtacagcgccttgaacggattcaccttatgcgccagcagcggctgctgaatggcatcccagctcagttcgctgttgaggaatgcctccgcacgcgcggccaactgcggcaggaccggcttcagccaggtcatcagcacgcggaacatattcaggcccatagtgcagatggcctgcaggtcggcgtcgcggccttcctgtttcgccaccacccacggcgcctgctcatcgacatagcggttggccacgtcggcgagggccatgatttcgcggatggccttaccgaactcgcggctgtcccacgcttcgccgatgctttccgccgcgtcggtgaaggttttgtacagcgccgggtcggccagctcagcggccagcacgccgtcgaaacgcttgctgataaagccggcgttgcgtgaggcgaggttaaccaccttgttgacgatgtcggcgttcacgcgctgcacgaaatcttccaggttcaggtcgatgtcatcgatgcgtgaagagagcttggcggtgtagtagtagcgcaggctgtcggcatcgaaatgatttaaccaggtgctggccttgataaaggtgccgcgcgacttggacatcttggcgccgttaaccgtcacgtagccgtgcacgaacaggttagtcggcttacggaagttgctgccttccagcatcgccggccagaacaggctgtggaagtagacaatgtctttgccgataaagtgatacagctcggccgtggaatctttcttccagtattcgtcgaagctggtggtgtcgccgcgcttgtcgcacaggttcttgaaggagcccatgtagccgatcggcgcgtccagccagacgtagaaatatttgcccggcgcgttgggaatttcgaagccgaagtacggcgcatcgcgggagatgtcccactgctgcaggccggattcgaaccactcctgcatcttgttcgcgacctgctcctgcagggcgccgctgcgggtccacgcctgcagcatttcgctgaacgacggcaggtcgaagaaaaagtgctcggagtcacgcatcaccggcgtggcgccggagaccaccgatttcgggtcgataagctcggtagggctgtaggtcgcgccgcacacttcgcagttatcgccatactggtccggagatttgcacttcggacaggtgcctttcacaaaacggtccggcaggaacatgcctttttccggatcgtagagctgagagatggtgcggtttttaataaaaccgttctctttcaggcgggtgtagataagctccgacagctcgcggttctcgtcgctgtgcgtcgagtgatagttatcatagctgatgtcgaagccggcgaaatcggtctgatgctcctgactcatttcgccaatcatctgctccggtgtgataccgagctgctgcgctttgagcatgatcggcgtgccgtgggcgtcgtcggcgcagatgaagttgacctcgtggccgcgcattcgctggtaacggacccagacatcagcctggatgtgctccagcatgtggccgaggtggatggagccgttggcgtacggcagggcgcacgttaccagaattttcttcgcgacttgagtcatagtgagcattacatcttctgttgtaaaaagggcttccgatattaccaaaagggctgtgggtgcgccataaatggctgcccatatatggataatcgttacctgtgataaactctgtgattactgaaagcatctcaaaacaacaaaggagtcgggatgaattcgcaatcccaggccaaatcccctgagcgcctacgtgcgatggtcgccgggacgctggccaatttccagcacccaaccctgaagcataatctcaccgcccttaaggcgctgcaccatgtcgcctggctggacgataccgtccatattgaactgcaaatgccgttcgtctggagcagcgctttcgaagcgctgaaagagcagtgcagtgccgaactgctgcgcatcaccggcgcgaaggccatcgactggaagctgacccacagcatcgcgaccctcaagcgggtgaaaaaccagcccggggtcaacggcgtgaaaaacattatcgccatcagctccggcaaaggcggcgtcggtaaatcttctactgccgtaaacctggcgctggccctggcggcggaaggggcgaaggtgggcattctggatgccgatatctatggtccgtcgattccgaccatgctgggtgcggaagacagccgcccgacctcgccggacggcactcatatggcgccgatcatgaaatatggtctggcaaccaactccatcggctacctggtgaccgacgacaacgccatggtctggcgtgggccgatggccagcaaggcgctgatgcagatgctgcaggagacgctgtggccggatcttgattacctggtgctggatatgccgccgggcaccggcgacatccagctgaccctggcgcagaacattccggtgaccggcgcggtggtggtcaccacgccgcaggacatcgcgctgatcgacgccaaaaaaggcatcgtgatgttcgagaaagtggaagtgccggtgctggggatcgtggaaaacatgagcatgcatatctgcagcaactgcgggcaccacgagcctatcttcggcaccggcggtgcgcaaaaactggccgagaaataccacacccagctgctgggccagctgccgctgcatattacgctgcgggaagatctggataacggcacgccgacggtggtggcgcgtccggacagcgaatttaccgacatctaccgccagctggcgggccgggtggcggcccagatgtactggcagggagaagtgatcccgggtgagattgccttccgcgccgtttaaggccgcggcgagcgcatcagccagtatctgcccttgggcgacgcgccctgtgcttcgatggtccagccatgacgctggtagaagcgcagggcgtttttattttccatcaggcacttcagcgttccgctggcggtaaaggtccgttcgacctgcgccagcagcgcgctgccgatatgtttgccctgccagtcggggtcgacaaacagatggtgaaggaaattatcggcggtccatacggcggcaaagcccaccggctggccgtcgcattccgcgacccacagctgttcatccgcggtggcggcatcgaaatcctccagccgccacgccgcggcgggaagccaggtccacgataaactgcgcgcccgcaggaagatctggcgcagcgccggagagtccgctggctcgctggggcggacgtggagattgcgcggatcagcggtgatagaagatctcgccatcgtacactttgaggattttgccttcggtatcggtgatcagcacgtagttaccgcccatataggtccagtggctgccggcgtccggcgcaggcaggttacgctgctgccactgtttgatgttgtattccggggtgagatacatcgccggaacggtgtcgccgatgtgaaactgggtgaaatcggcggtgaactctttcagcgcatactgatcgatccccgcggcagtagccgtccagctggcgccagcggtggcaagaagtacgcccagaagcatcatttttgttttacgcatagtttcctcaatattacctggactcaaaatagcagcctcgtatcattcctgatgcgttgctgaaatggcaagcactggatttttaaaaagtgtaagcaaaacgcggcgcaagtcttgtgccgcttgcgttgcagcgacggtgatgcgtattttgggagcaatctgaagcaggggagaatcggcatgttcaggctggaagatctgaccttatttgtccgcgccgcggcgctgggcagttttagcgacgcggcgcgcgaggccgggcagcagccggcgcaggtcagcgcggcaattaagcgtctggagacgatcctcaatattcgcctgtttgcccgttcgacccgcagcctgcgcctgacgccggagggggagacctggctgccctacgccacccagatgctcgataccctcgaggccggtctgcagaagatccagaccccggatgatgaagttcgcggcatgttgcagattgccgtgccgtcggacctcgggcgtaacctgctcctgaccctgttccgcgatttccgccaacgccacccggcgctgcgcctgcggctgctcttttccgatcagctgaccgacgtgtttaaagatccggtggacgttgcgtttcgctatggcaataacgacgatgcctcgtttatctcgctgccggtggcgccggaaaatcgtcgggtgctggtggcctcgcctgagtggatcgcccgccatggcgaaccgcagaccctcgaggaactcagccagcacaatgcgttgatctacattttgcgcggccgtccgttcgaccgctggtcgctgagcctcgacggcgtggttcagcagcagaaggtttccggcacggcgatgagcgacgacgccgaggtgatccgtcggctggcgatcgccggggagggcattgcctataaatcgatgctcgacgtcagcgacgatctgcgggcggggcgcctgcggcgcctgctgccgcgttatcagggggatgtagtgccgttgaatctgatttgtccgcaccgcaaacagctctctgccgcggtgcgtttgttatatgaagaggtgaaatcacattgtgaagggcttaatgcctgactaaggtcgcgaagtaatacaccagcgggacggccaatacccacaggccaatcgggatctcccgccacttaccggcgatagccttgatcacaatgtaaaacagcagcccgccggcaatcccggtgccaaagctgttggcgataagggtgatcatcaccatcatcagcaccggcagcccgtcggtgaagttggcaagatccactttgcgcaggccgctgaacatgttcaggccaatcaggatcagcgccggggcggtggcttctttcgggatcatcaacgccaccggcgtgaacagcagcatcagcaggaacattaccgccgccgacagcgcggtgaggccggttttgccgcccgcttccgctgccgccgaagattcaatcagcgccgtcgccgccggaatgcccacccacgggccgagcgcggcggcaatcgaatcgaccatgaacgggcgattaatctgcggcatgttgccttcttcatccagcagacccgcctcgccgcccaccgccagcgttgtccccatagtggagaaaaactcagatgcgaaaaagacgaacaggaacggcaggaaggcgatgtttaacgcccccagcaggtcaacctgtcccagcaccggcgccagcgagtggggggcatcgataaaatgcgtcggcagtttagtcacgccgaacgggatacccaccagggtagcgcacagaatggcccacaaaatggcgcccggaaccttacgcgcctgcagggctatcgccaggaacaggccgcacagcgccaccagcgcgccgggggcgagaaagtcgccgagcatcagcgcgttggttttcgcattggccagcaccagcccggcattgcgaaaaccgagcacggcgacaaacaggccgatggaggccgtcaatcccagcttgatcgactgcggcaccgagcgggtgaccacttcgcgcaggccaaagcgggtcagcaggaagaagaggatccccgaccagcaggcaattccgaggccagtctgccagccaatcccttcgctaccggccagcgtcacacccaccagcaccgagccgccaatgcccgggccgacgataaacggcaggttggcataaaacgccatcagcagcgaaccgacgacgaagaccagaatggtgccggtggtggcggcgcctttatccatcccgccgatcgccagcagccccgggataaccaccagtaaataggcggcggcgagaaagccggtgatcccggccaggcattcggtgcgtagcgtgccgccgcgcgagcgcagcgcaaagcggcgctccagccagttagcgcgggcggaagagtgaagtgcgttatcggccatgctcaggctccctgaggattattgttgtgatcggttggctccgggatctcccggcaggctatcaacgggtcgactatctggcggctgccgccgtcggtcagacccaaatcggttaaatgcggcccggcgttacaggcaaggcaggtgccttcaatggccttgaagacccggtacggcggctcccagtcggcgacttggctgctcagatcgcgcagctcgcggaactgacgcgccagttccgcggccgggagatccgacagcatgccggcaatcggcatcgccacatgggcgaggatctcgccctgttgcgccagcgccatcccgccgccggaggcgataagctggttggccgccagcgccatatcattagcgtcgcgcccgagcaccaccagattatgcgagtcgtgggagtagctggtggcgatggcgccgcgcagctcaccccagccttcaagcagggcgatttgcggcgtcgcctgatggcggccgtggcggtgcttgacccagatcagactgaagccggcgggtagctggactttcccgtcacgaacctgcacttccacttcgccccactgggtgaagcgcgcgccgcggatatggcgcaggcgggcgatgccgtgacgaatgccctggacgcgcagaataaagtcatcggcgcggaggggagcgatctgcaaagtatcgcgcggcggcgtgacgcccgcggcgggcgcgatcggtctcagcaggttgcccgcgcgggccagcagcttaccgcctacgtagacttcgcgggccaccagtttctccagggaatcaaacaccaccagatcggcgcgccgcccggcggcaatcagcccgagatcgtggcgctgcaggcgaatagcggcgttgagggtggcgaatcgcagcgcatcgaccgccggtaaaccgtgctcgatcagcagattaagcagggcgatgatgccgcctttctccagcagcatatccggcggcacgtcatcggtgcagacggtgatctgcgaggagaggtgcggcagcgtttttaacgccgcgacgatatccggcagcagataggggtgcgagccgcggatctcgatcgtcagcccggcgcgcagtttttccagcgcgtcgtccgccgaggtcagttcgtgatcggaggtgacgccggcggcgaggtaggcctgcaggtcagcgccgctcaggccgcgggcgtggccttcaatcagtttgccgctgttgagaccggcctggacaatctcctgcatccgctcgctaccgtgcagcacgccgtgcatatccatcacctccgccacgccgcgcacttccggccagccgagcatggtctccatctccgcgccggcgaaatcggcgccggacatttcgagacccggcgtggaggggacgctggacggggcggcgaccatcacctgcagcggcagatggcggctggcgtccaccgcatagcgcacgccagcgacgccgaggacgttggccagctcatgcggatcccagaacaccgcggtggtgccctgggtgaggacgatttccgcatagcgctccggtggcaggtgcgagctttcgaggtgcacgtgggtgtccatcaggccgggggacaggtagccaccggccagggaacgcacttcatgggcgtcttcgcgactgccgcgcgggtggacgctggcgatcatctcgccgacgataccgacgtcagcggggcgaatttcgcccgtggccatatcgacgatctgcgcatcgatcagcagcagatcaaacggggattcaccgcgcgcggcctgcacggcgcgacggcggacttgagcattgctggacataaccactccggcacaaggataatgcggatactctaggggcacagcaaacgtttgcccagatgaataaatttatcacccgataagctcgggttattgtgcaggaccaccgtagcgaacccgatgatgaacgaaccctggcagcggctgcccgcgctctctcttaaacagcttcagtattttgtcaccctggcccagctgcgccattttaccgataccgccagtcgcctggcgattagccagccggcgctgagcagcgccctgcggcagattgaaacggtactcggcggcaaactggtcaaccgtaccgctgcgacggtcactctgactgaactgggggcggcgattttaccccacgcccagcggatcctcagcgtggcgcaggcggccttttccgatatgcagcagattgtcgaggcgggtggcgacgggacggtgcgtatcggtctggtgccgtcggtcagttcgctgctgtttccgctgctgccgcagaccctggctgaggcctttccgcgtctgcgcattgaatttcacgatcagaccaacgatgcgcttatccaggcgctgcagcgcggcgagattgatttcggcatcggggcgatcgacagctcactgcccgcagaactgctggtctatccgctgcgcgaagatcccttcgtggcggtgctgcaccgcgacgatccgctggccgcgcaggcgcatctgccgtggaaacagctggtggggcgggatattgctgtgttctcgaagggcaatatccagcggctggtggcggcattagtggagagccatcgcctgacgctgaccacccgctaccaggtggactatatcgaaaccctgtatggtctggtgcgctcgcgcttagcggtggcgattctgccggcgctgtacaccacccatctgcaggacccggcgctcagggtcgcccagctgcagcagccggcgcttgcccgcacagtggccctgatgcgcggcccgcaggcgctgcccccgcttattgaagactgtttttctctgctgcaggccgccttgcgctagggcaggtgcttgatcagcacgtccaggtttaagtggttgatgtactccagcgagtgtgaggagaggacgcccagcagccggttatggtgcccggcaataattaaatcgatctgccgctgccgaacgcaggtttccacgtcttcaaaccggcgggtggtcaccagcgagagggtatccaccggcagggagacggtgcaggccagctcgttgagcagggctttggcctggatcacctcctgcgagacctgatcgtcgcgcaggctgtcggaaacatagttcagcgcccggtaatcggtgctgatgtgggcgatggtgatgcgcatgccgttctcttctgccattctggcggcatgctggagcagcgggacgccgtcctgactgctgttaatcagtaccagcgcatggtgataaacggccatggcgtatatcctcggtaggctaaatagcgcatgatgtcattattttccgcccgccagcagcggaatgcaatcccgcccggtcgcctgatgagcatgatggccgcgaaggtgtcgtatccagggctaaaggcttgttgtatgaaccggtgagttgcggtaaattccacaacgcttaacaatttcactattttgactcggggtgcccttcttcgttgaaggctgagaaatacccgtaccacctgatctggataatgccagcgtagggaagtcagagaccgcagggtcattgcttctacctcgtctggcgggagcaaactatgcctgagctgttgaatcccgcgcctgtcgcgcacctgcgccatctgctgcgcgcccattccccccttgtgcactgcatgaccaatgacgtggtgcagacctttaccgccaacgttctgctggccgtcggcgcctcgccggcgatggtgatcgatccccgcgaagcggcgcagtttgccgctatcgccgatgcgctgttaattaacgtcggtaccctgaccgaagatcgcgccgtggcgatgcgcgccgcggtggagcacgcccgtcaggccggcaagccctggacgctggatccggtggcggtcggcgccctgaccgtgcgcacggccttttgtcacgagctgctggccttccagccggcggccattcgcggcaatgcctctgaaattctggcgctggccgggatgagcgccggcgggcgcggggtggataccaccgatacggccgccgcggcgctgccggcggcccaggcgctggctcgtcggctggctaccgtggtggcggtcactggcgaggtggattacgtcaccgacggcgagcgggtgctcagcgtggcgggaggcaatccgctgatgacccgggtggtgggcaccggctgcgcgctgtcggcggtggtggcggcgagcgcggcgctgccgggagaccggctggaaaacgtggccgccgcctgcgggctgatgaagcaggccggggagatcgccgcccgtcagggaggcccaggcagctttattccggcgtttctcgacgcgctgtatcaggaggtgcagggatgaaacgcatcaacgccctgaccatcgccggcaccgatcccagcggcggggccggtatccaggccgatctgaaaaccttctccgcgctgggggcctatggctgctcggcgatcaccgccctggtggcgcagaatacccgcggcgtacagtcggtctatcgcatcgaaccggattttgtggccgcgcagctcgactcggtgttcagcgatgtgcgtatcgataccaccaaaatcggcatgctggcggagaccgatattgtggaagccgtggccgagcggctggcgcgctaccgggtggccaacgtggtgctggataccgtcatgctggcgaaaagcggcgatccgctgctgtcggcctcggcggtggagaccctgcgtcaacgattgttgccgcaggtgtcattgatcaccccgaacctgccggaagcggccgcgctactcgatgccccccatgcgcgtaacgaacgagaaatgctggagcaggggcgggcgctgctggcgctgggctgcggcgcggtattgatgaagggcggccatctcgacgatgccgaaagcccggactggctcttcacccgcgaaggggaacagcggttcaccgcgccgcgagtgcagaccaaaaatacccacggcaccggctgtacgctctccgccgcgctggcggcgctgcgcccgcgtcacgcggactgggcggccaccgttaccgaggcgaaggcctggctgtcggcggctctggcgcaggccgactctctggaggtgggccacggtatcgggccggtgcaccatttccacgcctggtggtaaatggcagcgcaacgggacagcagaatctcctgaaaaaatggccccccggctggaaaataggctaagtcggtaccaggcttaacctgcccaaaaaaattgggttgggataatgcatgccggcttcggccggccttacgggagattgctatgactgatattacgcagttgctgggcaaagatgccgagagcctgttgcagcaccgttgtataaccattccgtccgaccagctgtatctgcctggcgcagattatgttgatcgggtgatggtggataacaaccgaccaccggcggtgctacgcaatatgcagaccctgtacaataccggacgcctggggggaaccggctacctttccattctgccggttgaccagggcgtggagcactcggcgggcgcctcctttgccgccaccccgctgtactttgatccgaaaaatatcgtcgagctggcgatcgaagccggctgtaactgcgtggcgtcgacctacggcgtgctggcctcggtgtcgcgccgctacgcgcatcgcatccctttcctggtgaagctcaaccataacgaaacgctgagctaccccaccgaatacgaccagaccctctacgccagcgttgagcaggcgtttaatatgggggcggtggccgtgggagcgacgatctatttcggctcagaacaatcgcgtcgtcagatagaagagatttccgccgcctttgagcgggcccatgagctgggcctggtcaccgtgctgtgggcctatctgcgcaattcggcgttcaagaaagacggcgtcgactatcatgtttccgctgacctgaccggtcaggccaaccacctggcggccaccatcggcgccgatatcgttaagcaaaagatggcggagaataacggcggctacaaagcggttaacttcggctataccgacgaccgggtgtacagcaaactgaccagcgataaccccatcgatctggtgcgctaccagctggccaactgctatatgggccgcgccgggctgatcaactccggcggcgcggcgggcggggagaccgaccttgccgacgcggtgcgcacggcggtgatcaataaacgcgccggcggcatggggctgatccttggccgcaaagcgtttaagaaatcgatggccgacggcgtgaagctgatcaatgccgtgcaggatgtttatctggatggcaaagtgactatcgcataaggcaaaaatccgggcggcaccgcccggattgctcgttgtttgtaccagatgcggtttattaagactctgccgcgttggcggtaaacggtttcgcatgctgatcgctggtaaagccaggctgttcaacgcggattaacgggcacaggaagaaggccagaatatataaggcggtataggctattaccacgccgatagtgctgaaatagggcagcagtaccacggcaatcgccggcgccagaaagttcgacagcccggctgacaggttatagaccgaaatcgcagcgcctttatgcttcggctccagcgccgggaacaccgccgccatcggcacaaacgcggcgacaaaaatccccagggcaatagccggtaccagcgccatggcaaaattatggccgaagtgctggggtaggtaatagaacgccagggtggaaagcgccatcccgatgcagccgaaccagcggataaccttcatccagcccattttctccgccacaatcccccagaaaacgttcgaaaagatcgtggtgaagaagaatgccgcccatacctgcagccattccgaggtggtaaatcccagctcatcaacaaacatcatcggcatgatcaccgcaaaaccaaacagcgacagggtgttgataatgcgcacaatgctcgagaacagaatgctgcggttggtatagagcagcgtcgccgcgcgccccagttcggcgaatttttcacgagtggtcaggttctgcatatggcgcggcgtttcggtatgacgcatcgacaccagcgcaataatgccgccggtggcgcaaaagagcagcgccagccacagggtgcccatttcgccaatgtggggaatggtaaagctcggaatatagctgccgaacacgccgatacccaccgagtagaccgcccagaaccagcccagcgcggagctggaactgtcgctgcggacgttgtggataatggcgacgataaaggagtagaggaacagtgggtaggccaggccgcggatgccataaaacagcaggatcagcgcatagttggcgcgaccgaggccgaagacgaggaacagtacgtggaacacacaccacagcacgaagccaatcagcatggctttacgtggggtaatgatttccgccaccacgccggagacccacgccgacagggcggcagccagaccgtagagagtaaaggcaaaggaagcctgcgccggggtgaatccgagtgctttgatgtagtgcgacagaaaagccagctcaaagccgtcgccggtcataaacacggcgatggcgacatatccccagatgaggttgagcggtagaccgtaccactgtttgttattaacggacatgttgacctcgatttcagagtgcagatgagtgtctccgctgcacagcagcggagcattattgttataaaataaggaggtatgttattcgcgaatcagcctgccggcctgttgtagcgccttataggccgcatacctgcgctgatgaagcgggctaaacgcagtctcgctgtgataggtggcatccacctgagtaaactgcttcatggcctccggcagcgaagccgcgactctgcccgccaccgcgccgaggatggcggaacctaacagcaccggctcgcggctggcggtgctcacgacgctaacgccgcaggcgtcggccaacagctgacgcaccagcggatgctgcccggcgccgccgctgatgacgatattttcactctcaattccgcaggcgcgctgggcgtcaatgatctgtcgcagaccatagccaatcccgcatagcccggcaacgtacagcgcggtcaggttatccaggtcccgctccatccccagcccggcaatcagcgctttcgcgtggggatcggcaagcggcgcgcgattaccgagaaactccggaacgacgtgcagaccggcggccagcgttaccgcctcagaaggggaagcaacttgcgtcagaacgcgatccgccagccagaccggtagagggacgcctgcggctttcgcttgctcgcgcgcttccgccgccgccggatggaagctcagcagctggtcgatagccgcgccggcggcgctttgcccgccttcacttagccagtagcccggcaccatcgccgaatagtaagggccccagacgcccgggacgaataccgcttcctgagtggtggtcatggtgcaggaagaagtgccgaagacataggccatattgttgaccgcgccgttaagcacgccgacggtaccgatgccgcccgcgtgggcgtcaatcatccccaccgccaccggcgtgccgatcggcaggcccatctcctctgccgccgtggcgcaaaggccctcgccgcagggggtgcctggatcgacaatccgctggccgatgcggacaaaatcttcatccgccagctcttcgaggccaatctggcggaagtaaccggcatcccagcgttgttcatgcgccagataggtccatttacaggtcaccgtgcagaccgagcgggcttcatcgccggttgagcgccaggtgaggtaatcggcgaggtcgaagaagtggcgcgcctgctgatagatgtgcgggcgattctccttcagccacaaaattttcggcgtttgcatctccggcgagattttgccgccaacgtaccgtagtaccgggtggcccgtggcattgatcttttccgcctgcccggtggcgcgatgatccatccagacaataatgttgcggtccgcatcgtccgaaggcccgaccgccagcggcgcatcgttatcgccaatcaccaccagcgagcaggtggcatcgaagccgatcccggcgatcgacgacggcgaaacgccggcgctggccaccgccgttttaatgcagtagcacaccgcctgccagatctcacggctcgactgctcgaccttgtttccggcgctgcgaaacagggttatttcccgggtcgcgtgggcgaggagctcgccccgcagattgaataccccggcgcgcacgctgcccgaaccgacatccacgccaataatgttttgcgtatcgttttgcatcacatcctctcataggctggccagggtcagagatccacgctgttcggcaggatcacaatgtcgcgcacggtgacgtttttcgaacgcgtcaccataaacagcaccgactccgccacttcaatcggctgcatcaggctgccgttggccagcgcttcgtccattttggcttttggccagtcgtccagcagagcggtaaccaccgggcccggcagtacggcgccgacgcgcacgccatactgcgccacctggcgacgagtggtgtgtacaaatgcctgcaccgcgaatttcgacgcggtatagacaggctcccagatcaccggcaccacgcccgcgatcgagctggtgaagataatatccccggatttttgcgcgatcagatgcggcaggacgctgcgcacgcagcggaaggcggcgttgatattaaggtgcagcacgcggtcccagacgtccgggtcgccctcggccaccggcccgccgatataggcgccggcgttggcgtggaagatatcgagacgcccggtaagctgcaaaatgccctgcagtaggttatcgacctggtccgcctgcatcaggtcgacctgcagggcgaaggcgttttcgccaagttcggcgaccagtttgttgagcttttcgccttcgcggtcgatcagtaccacttttgcgccagctcccagcagggtcctcgcgcactcgaggccgataccggacgccgcgccggtgatcgcggcgactttaccgctgagggaagtattcatagaggagacagagtggttcattttataatcctttgccgtgtctggttaaaactatcgaacgcgagggcatcacgttcgaggtgctagactaaacctggtaacatattgaatatcagcatcttaattcaggcttgctggcatgttgaggcggtatgcgcgcgtacttcctggcgtgaaaaggatgctcaatcgatgaagctatgttgctctcgcttcatcgattgagcaagtggggaaattaacagcgacatgattttgtgacgcaagttggaaaaatgaagaagataacgatttacgacctggcggaactttccggcgtttcggcgagcgcggtgagcgctatcctcaacggtaactggaaaaagcgccgcatcagcgccaagcttgcggaaaaggtgacgcggattgccgaggagcagggctatgcgattaaccgtcaggccagcatgctgcgcagtaaaaaatcacacgtcatcggtatgattatccccaaatatgataaccgctacttcggttccatcgccgaacgctttgaggagatggcccgcgagcgcggcctgctgccgattatcacctgtacgcgccggcgtccggaactggagatcgaggcggtaaaggcgatgctctcctggcaggttgactgggtggtcgcgaccggggcgaccaatccggataaaatttccgcgctatgccagcaggcgggcgtgccaacggtcaatctcgacctgccgggctctctctcgccgtcggtgatttcggataactacggcggcgcgaaagcgctgactcataagatcctggctaatagcgcccgccgccgcggagagctggcgccgctgacctttatcggcgggcgcagcagcgaccataacaccagcgagcggttacgcggcttccacgatgcgcatcgcgagctggggcttagcgtgccgcaggagaatattctggctcccggctattcgaaaggccacgttgaggactgcctgcaggagcggtttggcagcgcgaagacgttgttgcaggggatatttgttaactcgacgatatccctggaaggggttgtgcgctggctgtcgcaggtgggtctgaccggcagcgagcagccgccgatgggctgcttcgactgggatccgtttgtctatctgctggggcacgatatcgacatggtgcagcaggacgtgccggcgatgctggacgctgttttttcgattattgacgccggcgaagccagccagcagcggattgaaattcccccgcgactgatgagcagcagctgagtcgctgtctggctgttcgacgttaccgcgtcagcagccagcgggcggtatgctcatcggtcaccaggccattaatccagccgcctttaagggcggccaggatcgccggtcgtttatgttctccacaggcagcggcaatccgcgggcagtggctctggcggatatcatagctggtgatcatgcggttgatctcgctgtctaccacgtcgccttgcgcatcaataaaccgcccgaggatctccccgatgccgccgcgggcggtcagctcatccatctgcgcctgattgataaacccgtctttaaagatcggactttgcgtgcccagcggaccaatgccgacaaaaatcacgtccgcctcgcgggcgacgctggagacgctgcggaataggcgattggtgcaccacatttcatactcatccgcgctttgggcgtagcgcggcgccggccactgatagtacttggccttaattttgcgggtcagcagcaggggcacgtcatcgtaataattgcactgcccgtcggcgttcatggcactgatcagcgccacgcagcgggtattcaggctgtcaaaatcgatgcgctgcagcgcttttttcagggtcaggcccgagcccagaccgataattttctctttatcatcctgcagatagcgagccatcagctgatagcagccaaatgacacactgtcgagggtgctttcttcgctaaaggcggggaccacattgcactcgatcaagcggtatttttcctgcagcaactgcgcataatcgaggcagttcgctaccggatggtgcagattaatcgacacaatcccttcttctttcgcggcggcaatcagccgttgcaccaccggtctggaggtgcccagctggctggcaatctcgctctgattctggccggcgatgtagtacatccatgcggcacgcaccttctgatccaaccggatatcgtcttctttactcatggtttcccgccctaagttgctggccagggcacgcaattggcccggcgaatacccgcattctcgccgtggttggcataactggcaagcttttgctctttgttggtcatttgtaatttaattgggtaattgctcttttgtgatctatggctcttatttcggtcaaatgatcaattacagtggcgccatcaactcaaggagagcagaacatgaacaatcaattcacatggcttcatatcggtctgggttcttttcatcgcgcgcatcaggcgtggtatctgcatcgtctgattgcttccggggataatcgctggcgcatcgcggcggggaatattcgcaacgacgccgagcaggtggtacaggcgctggcggcgcagggaggacgttacgtcctcgagaccgtcagcccggaaggggagcgcaaatatgaagagatcacctcaatccagaaactgctgccgtggcaggccgggctacagccgctgattaacgaaggggcaaacccgcagaccaaagttatcgcctttaccgtgacggaaggggggtactacctgaacactcgccatcggctggaaaccagcaaccccgatctgcaggccgacctgcaaggcgagtgcaaaaccatttacggcaccctcgcgcggatcctggaaaagcgcatggccgacaacgccgggccgctgaccctgctcaactgcgataacgtgcgccataacggcgagcgtttccacgacggcatggtcgagttcctgcagctcaccggcaaacaggcggtgattgactggatggcggccaacaccacctgtccgaacaccatggtggaccgcatcaccccgcgtccggcggccgatctgccggcccgcatcaaagcgcaaaccggaattgatgacaaagcgccggtgatgggggagacctttatccagtgggtagtggagaacaacttccgggttgcccgcccgaatctggaggcggtcggcgtggagatggtggagtcggtcatcccgtatgaagaggcgaaaatccgtattttgaactcgtcgcacagctgcattgcctgggcgggaaccttaatcggccagcagtatattcatgaaagcacgctgaccgatgttatctacgccattgccgaccgctacgttacggaggacgttattccgtgtctcggcgacaacggcattgatctgccgacctaccgggatgtggtgcttaagcgctttaccaacccctatatccaggacaccaaccagcgcgtcgccgccgacggcttctcgaaaattccggcgatgatcgcgccaaccttgcaggagtgctaccaacgcggcgtccgccctgaggcgaccgccatgctgccggcgctgttcttcgtctttatggagcagtggcacaagggaactctgccgtatcagtaccaggacggcatcctggatgcgcaggcggtgcatgagatgttcgaggctcaggatccggtggctgtcttcgcccgtgataaagccctgtttggtgatctcgccaacaacgcggatttcctggcgctgatgcgcgagaaagtcgccgccgtttacacgctgattaactaagaggtggctatgtatctgggtatcgatctcggcacatcggaagtcaaagcgctggtcattgatgagaaccatgaggttatcgccagccatagcgcgccgctgagtattcagcggcctcatccgcactggtcagaacaagcgccggagctatggtgggaggcaacggagtacctgatggccacgctacgggaaaaatgcgcgcagcattggccggccattaaggcgattggcctctccgggcagatgcacggcgcggtgttgctggatgcagagggggaggcgatccgtccggccattctgtggaacgacacccgctgcgccgcagagtgcgccgagctggaggcgatggcgccggagctgcatcaggtggcgggaaacctggcgatgccgggctttaccgcgccgaagctgttgtgggtgcgccgtcatgagccgcagcactttcagcgcaccgccacggtgctgttgcccaaggattatctgcgctaccggatgaccgggaagaaagtctccgatatgtcggacgccgccgggacgctgtggctggacgtggcgaagcgcgactggtccgacgctctgctggacaagtgcggcctgtcgcgtagccaaatgccgacgctggtcgaaggctgcgaggtttccgccacccttgacccgcaggtggctgcgcgctgggggctgaacgcctcggtggtggtggccgggggcggggggggataacgcggtcagcgccattggcgtcggcgcggtctcgccgggggatgcgtttatttcgctcggcacctccggggtgctgtttgtggtgaccgatgcctatcgtccggcgccgcagtcggcggtacatgcgttttgtcacgtgctgccgaacctgtggcaccagatgagcgtcatgctgagcgccgccagctgtttgcagtggttctgccgcctgaccggcaccacggaggtggcgctgctggcggagattgccgagctaagcgaggaggataaagccaacgccccgttcttcctgccctatctctccggggaacgaaccccgcataacgatcctgacgcgcgcggcatcttctggggcatgacccatgccagcctgcgcgcgcagctaggctacgcggtgctggagggggtgagctttgggatcaacgacggcctgcaggcgttaaaagagagcgggacgccgatcgcgcagtgctcgctggtgggcggcggcgcccgcagcccgttctgggcccagctgctggccgatattctcgctatgccggtggtgacccacaaaggcggagagaccggcggcgcgctgggcgcggcgcggctggcctgcctggcggcgggcaaaccggttgccgcggtgtgtgaaaaaccggaagtctggcagacctggcgtgcggatcctgttcgccaccacaccctgatgcaacgctacgcgcagtttaaagccctgtatttaaacgatcttaaatatcgacagcactgattttcatcataaccgccgcttcgttgcacgtcgcggagcggccaccctgtaccctgaaaacgaggtcattatgtctatcaataataaacagtggctcggtttacccctgaacctgctctggggatacatcgccattgccgtatttatgaccggcgacggttttgaattagcctttctgtcgcactatatcaaagccctcggcttctctccggcggaggcctcctttgcctttaccctctacggcctggccgccgcgctgtcggcgtggatttccggggtggtggcggaaattatcaccccgctgaaaacgatgatgattggcttcgtgctgtggtgcgtattccacgtgctgttcctcgttttcggcctcggtcacgccaactatgcgctgatcctgcttttctacggcatccgcggcttcgcctatccgctgttcctctactcgtttatcgtggcgattgtccataacgtcaaaagcgacaacgccagctcggacatcggctggttctgggcggtgtattccatcggcatcggggtcttcggcagctatattccgagctttaccattccgcacattggcgaaatgggcaccctgtggctggcgctggccttctgccttaccgggggcgtgattgccctggtttccctgcgccatattcaaacgccgcagcatatgcagaatctcaccacccgtgagaagttttccgagctgggacgcgccgcgacgctgctctataccaaccgcaatattctgctgtcgagcatggtgaggatcatcaataccctctcgctgttcggctttgcggtgattatgccgatgatgtttgtcgatgagctgggcttcagcacttcagaatggctccaggtatgggcagtcttcttcttcaccaccattttctctaacgtgctgtgggggatcctcggggaaaaacttggctggatgaaggtggtgcgctggttcggctgcatcgggatggcgctctccagcctggcgttttactacattcctcagcactttggccatagctttgcgatggcgctgatccccgccatcgccctcgggatctttgtcgccgccttcgtgccgctggcggccgtgttcccggcgctggagccgaagcataaaggtgcggccatttcggtctataacctgtcggcggggatgtcgaactttctcgcgccggctattgccgtggtgctgctgccgttcttcagcaccatcggggtggtgatcgcctataccgcattgtacgtggtggcctttttcctctgcgcctttatccgcgtggagcagccggggttctcccacaaggaagcaaccgcccgcgagcaggttgaattctcataggtactgcggctggcatgcgcttcatgccagccttaatgaggtgaacgaatgagtatgcaggcggttatttttgacatggatggcgtgattattgattccgaggcgctgtggcgtcaggcgcagattgacgccctcgcgcagtggggggcaacggcgagcgttgctgaatgtgaaaccctgaccaagggcaagcgcctcgacgacattgccggcacctggtgccgctattttcagcttgatctcgctccgcagcggcttgaagacgccatcctgcagcgcatcacccgcctgattgccgcgaaaggcgaaccgatgcgcggggtgcaggaggcgttacgctattttcgcgaagcgggttataagattgcgctcgccacgtcatcatctcgtcaggttattgccgctgtgctgaacaagctttcgctctggcacttttttgacgcgatctccagcgcggatgatgaaccacgcggcaaaccgcacccggcggtgtacctcacgacgctgcggaagctcaatctcaacgccagccagtgtctggtgattgaggatagctttaccggcttttgcgcggcccagtcggcggggattgccacgatagtgattgcagaagatagccagcacgcgcgttttcaggccgccgctggccgctatcaaaccttacctgaactgctggaagcgcttagcgcggagccagcggcggcggtttaagtcagccatttgtgggcgcagacattcccgggatgtagctggtcggttaatcttttctctgcgctcacgcccttttttctcctggtcgatctgcctcacatttcgctcatcttttgtgaaaacagtcacgtcttgttgtgccaatgcccaaatttatggccttgcttagcggtgtttgtccgaggcactactacgaagttgtgcttagattatatattgaaacgtactttcaataatgtgaaaccgctttgccgattttcttatgtcgatcggatttggccgtgataaggaccgagcatgaaaattgaatctgtgaatgtcaccgttttccaatatcccactcgtcgggtttccgacagcgccgggcactcccatccgggggttgaaagcatggccaaaatggcgatgctgaccatcaccgctgatgatggggcgcagggcttttcgtttgcgcctccggaagtcgtgcgcccgttcgtggtgaatacttttgttcgcaaagtgctggtgggacaggacccgtttaaccgtgagcgtagctggcaggatcttaaccactggcagcgcggcagcgcacatcagctaacggagcgcgcgctgtcgtttgttgaacaggcgctgtgggacctgatcggccgcagccttaagatgccggtttataagctgctcggcggctatcgcgacactgtcccggcttacggtagcaccatgtgcggcgacgatctgccgggcggcctgtcgaccccggaagagtatgccgcttttgctgagaagctggtcgcccgcggctacaaggccatcaaactgcacacctggatgccgccaatctcttttgcgcccaatcccaaaatggacattaaagcctgcgcggcggtgcgcgaagccgtagggccggatattgacctgatgattgatggctatcactggtacagccgcgccgaggcgctgtggatcggcaaagagctggaaaaactcaatttcgcctggtttgaagagccgatggaggaggattcgatgtcttcctatgcgtggctggcggaaaacctgtcgattcccatcgtcgggccggagagcttcggcggcaagcaccacatgcgcgccgaatgggtgaaagccggggcctgcgacattctgcgcgccggcgctaacggcgtgggggggattacaccgaccatgaaggtggcggcgctggcggaatctttcggcatggattgcgaagtccacggcaacggagcggcaagcctggcggtggtgggcgcgatccgcaactgccgctggtacgagcgcggcctgctgcatccgttcctcgactacgatgaaccggcggcctatctcaacagcattgtcgacccgatggatgaccagggatttgtgcatttgtcacaacgtccgggtctcggtgaagacattaattttgcgtatatcgaagccaataccgttagccacgactgatttaaaaaaataaatacccgatggcgctgcgcttatcgagcctgcggcccggtagaccggataagccgaaaatgccgccatccggcaacatgtaccctacagtacaggcaaacagagatatgaaacaaacctccttactgggagcgtgtattctcgcgctcgccatatcgatggggagcggggaggcggtggcgaaaacgccgcccgaccagctgatcatcggcatgaatatgaataacctgctcacccttgacccggcggcgatgaccggtaacgaagtggtggggatcgtggtcaacctctacgactcgctggtggagcttgaccctgagcagctcaccaccgtcaggcccgcgctggcgaaatcctgggatatcagccccgacggcaaaaccctgacctttcatctgcgcgatgacgttaagtttcactccggcaacccgctgaccgccgccgacgtcgtgtggtcaatgcggcgcatcctgcacctcaacctggcccaggcctcagtatggaaatcctatggcttcagtaagaaaaatatcgacagccaggtcagcgcgccggaccgcttcacggtgcaaatcgtattacccaaagataacgatccgcagctggtgatttactcgctggcggcgctgggcaacctcggagtgctggacagtaaaacggtgcaaagccatcagcaggataacgactggggtaaccgctggctaaccacccatgaagccggttccgggccgtttatcctcgaaacctggcaggcgaaagatgtgctgcgcatgaagcgcaaccctgactactggcgcggcgaggcgaaaatgagccgcgtggtactgcgtcatttccaggagtcgcaaactctgcgcctgatgatcgaaaaaggcgaccttgatattgccaacaatatggcggtttccgatatcaacgccatgcgcagcgatccgcagctgaccgtcgatgcggtgcagcgcggcaccatgtactacgtggcgatgagcatgaaagaggcgcacttcgccaatccgaaagtgcgcgaggcggtgcgctatctgattgattaccagggtatcaataaagcgctgatgccgggctacggcgtgctgcaccagcggcctatcaaagcgggaatgccgtccacgctacccgatcccggctacaggctggatgtggcgcgggcgaaaaagctgctggcggaagcgggatatcccaacggctttgataccacgctgcgggtactctccgatcagccatttcttaacatcgctatcgccgtgcagtcgacgctgatgcaggcggggattaacgccaaaatcatcaccggcactggtaaccagatctacggcgcaatgcgcgagcgtaaatttgacctgctggtaggtcgcggcggcagcgggatggagccgcatccgcactccagcctgcgcgcgctggtctataacccggataacagcgataaggcgcgcctgaccaacttccagggctggcgtaccggtttttacgacccgcaactgaatacgatgattgaccaggccctgctggaacgcgatccgcaaaaacaggtggctgactaccaggccatccagacacgctacgaccagctggttccggctttaattccgctttcgcagatggttgattcggtcgtcgtgcgcaacgaggtacgggagtatcagccgcacccctccgccaccacttttctgcgtgacgtctataaagtccgcgaaggagagaaaggatgagtaccgcaatccttgcgcccggctcacgcggccggcgcttatcaaaacggctactgcaggtggtgattacactgttcggcctgctgctgctgacctttaccattggccgcgtcatgcccatcgacccggtgctggcgattgtcggcccggatgctgaccagagtacctatcagcaggtttaccagcagctggggtttgataaatcgctgaccacccagtttggcatctatttcgtcaacctgttgcacggcgatctgggcaacgcgctgctgaccgggaaaccggtagtggacgatattatccgcgtcttcccggccaccatggagctggcaacgatggcgattattgtcggcgcgggtcttggtattccgctgggcgtgttggcggcggcgcggcgcaatagcgtctccgattatgtggtacgcattatcagcctggcgggctactcgacgccgatcttttgggtcgggatgatggggctgctggtgttctatgcctggcttggctgggtaggcggcgccgggagggtagatctcgggctggatggtggggtgtcgcgccgcaccgggctgatgaccgttgatgcgctgctggccggcaacggccaggtgttctggaacgccattaatcatctgattcttcccgcctcgctgctgggttttcactcgctggcttatatcagccgtatgacccgcagctttatgctggcccagctgtcgcaggagttcattattaccgcccgggtgaaagggctgaccgagcgccaggttatctggaaccatgcgtttcgtaacatcctcgtgcaactgctgacggtggtggcgctggcctacggcgcgctgctggaaggcgcggtgctgattgaaactgtcttctcatggccggggtttggctcctaccttaccggaagcttgctgctgggcgatatgaatgcggtgatgggctgcgtgctgctggtgggggtgatcttcgtgatgctcaacctgctctccgacatgctgtatcaattctttgacccgaggacaaaatcatgaccgtttctctggattcgccgctttcgggtggtgcgggcgaaggccgtcagcggctgcaacgcgcggcggcgcgggccgtcgggtttatcggcaaaatggcgcgcaatccgctcacggccatcggcggaggaattatctttatgctgctggtggtggcgattttcgcgccgctgattgcgccttataacccgctggtacaggacctgaatagtgcgctggtcgcgccgaatgcgcagcactggttcggcaccgatgagtttggccgggatatctttagtcgcctggtgtacggctcccgcatcacgctctatatcgtgctgctggtctcagtgaccgtcggtccgctcggactgctgctgggcgtcagtgccggctatttcggcggtaaagtcgatatggtgctgatgcgcgtcaccgatattttcatctccttcccgagtctggtcctggcgctggcgtttgtcgccgctttaggaccggggctggagcacgtggttatcgccatcacgctgaccgcctggccgccgattgcccgtctggcgcgcgccgaaacgctctctctgcgccaggctgattttatctccgccgtgcgtctgcagggcgcttcatcggcccgcgtcctctggcgccatatcgtgccgctgtgtctgccctcggtcattatccgtatcaccatgaatatggccgggatcattctgaccgcggccggcctaggctttctcggcctcggcgcgcagccgccagagccggagtggggagcgatgatctccagcgggcgcacttatatgatggagtgctggtgggtcgtaaccattccggggctggcgattctgatcaatagcttagcgttcaacttcttaggagatggcctacgtgacatcctcgatccccgtagtgaataatgcaccgctgctcgacgtgcgcgatttgtgcgtcgactttgttaacggtagcgcggtgacccacgccgtgcgcggcgtctccttccagctggggcatgagaagctggctattgtcggcgagtccggttcgggtaagtccaccgttgggcgcgcgctgctgcagctgcatccgaaaaaggcccgcgtcagcgccagccggatgcagtttgccgacctcgatctgcagcatcttagcgaagcgcagatgcgcggcgtacgcggcaaacgtatctcgatgattatgcaggatccgaaatattcgctgaatccggtggtctgcgtgggtaagcaaatcgccgaggcctggcttactcatcatcccgggcgcaaagatgaggcgaaagccagggcgctggagatgctggaggtggtgcgtattcgccagccggagcgcgtttatcagctttatccgcatgaaatatccggcggacagggacagcgcatcatgatcgccatgatgctgattaccgacccggaactgatcattgccgatgagcccacctccgcgctggacgtgtcggtgcgcctgcaggtgctgggcctgctggatgacctggttcagtcgcgcgggctggggctgatttttatcagccacgatatcaacctggtgcgcagcttctgcgaccgggtgctggtgatgtacgccggacgggtagtggagtccatcgccgctaaagatctcgatcacgcccgtcacccctacactcagggattgattaactcgctgccggatatgcagcatcgtcgcccgatactgccggtgctgcagcgtcaggccagctggttaacggattaaggagcggataatgattgaagttcaacatctcaacctcgcgtttggcgagggggagaagcgtaaccaggtgctgtatgacgtcagtttccacgttaagcccggcgagatctacggtctggtaggagagtccggttccggtaaaacgacggtgctcaagtgcctggcggggctgtttacccactggcagggggaactgaccatcgatgctcagcccttagggcatgaaattagccgcgagcgctgccgtcaggtgcagatggtatttcaggacccctacggatcgctgcatccccgtcacaccattggcgatatcctcgaagagccgctgcagatccatcgtatcaacgaccgcgaccggcggatcaatgcgctgctggataaagttggcctcaaccgcgcctttcgcgagcgctatccgcatcagctctccggcgggcagcggcagcgcgtggcgatagccagagcgctgattcttgagcctcaggtgctgctgctggatgagccgacgtcggcgctggatgtgtcggtgcaggctgagatccttaacctgctggcagaattgcagcgggaggctaagctcacttacctgatggtcacccacgatcttggggttattgcccacttatgccagaaagtggcggtgatgcagtacgggaagatcctcgaaaccctgacggtcgatgcgctggtcagcggccaggcgcagatggcctatacgcagatggcctatacgcagatgctggttaacgccagtcggcaatatacgcgcgaaatggcgcgcgaggtggcggaatactaagctttatggcgcattgtctcacggcagatgcgcccattttaatagataactatttgatgttataggttttttgtggttgtgggtatcgtctattaatgtaagcgcggtgtttggatcgatatcctgcccaggttttttccctgcagccgcaggtgccgttttaccttaacattcagaggctcaatcaacgaacccggctgctgtataccagccgggcgccgtctttgctttgcgaagcctgatcagcgtagcagcgggcagtcgggcggcagccggcagcgcagggccgccggtaacagctccatacggaaggttttgccgctgagcggctcgccgtcgaggttaaaggtcatctcatggggcgcggttatttcaaaccacgaggagacaccgtcaacaatattaggcgagttttccggattcgccagggtgctgaacagggcagggatcagctcttcgccggtgaaaatgcgcagatgcagcagaccatcgttaatcaacgcctccggacacagctgctggccgccgccggcctggcggccgttgccgatgccgatgaccagcgcatcgccctgccagtgaaagttctccccgcggatctcgcagcggtccggcttcagggtatccatgcgcatcagaccgtggattaaataagagacaccgccgagcgcggccttgagtttttccggcgtttcggtggtgatccgggtgccgaacccgccggtcgccatattaataaagccggttttatcattcacccgggcgatatctatcggcacatcgcggccgacgatcgccagcttgagggcgctggccagatcctgcggaataccgacgctggtggcaaagtcgttagccgtgcccagcggtaaaatccctagcgccatcttgccgccgcgctccaccagcgcggtcgccacttcattaatggtgccatcgccaccgccggcgatcaccgtttcaacgttcagctgcagggcttcatcgataaaccgagcggcatcgcccttttcccaggtcacgcggacgtgaatatcaatcccttcatcgcgtaacaggttaaccgcttcgcgtagctgcggttcattggcacctttgccgttaaggatcagtaagctggcaggaaacgtagacatcatcaagggaacctttattgctcaatgttgcataaagtgtaccgcatgacgaaagcgaagaccggaggagaggcaaaaaaataagcccgcgtaagggagattacgcaggctaaggaggtggttcctggtacaactagcatttatgggttatgtttttcagcgaaatggatgatacctgtttcgatcgaaacggtatgtgatccgattctaatatccttacatcgtgaaaaaataacgcaaattaactagttaccgtgcggatttctggttgtttgaccagtaaagttgcgcatcagcagggcatactgcaggggcaggtcgtccggcacaggcaaccagacggtatagccatcgcccggggccaccggcatggtttcgcctttgccattctccatatgctcaagggtgaagttgacgttaccctgcggggtcatcagctcaaggctgtcgccgacgctgaacttatttttgaccgccacggccgccagcgggccgttacgctctccggtgaattcgccgacaaactgctggcgctcggagacggagtagccgtactcgtagttctgataatcgtcatgggtatggcggcgcaggaagccttcggtgtacccgcggtgggccagcccctccagggtctccagcaggctggtatcgaacggtttgccggcggcggcatcgtcgatcgccttgcggtaaacctgagcggtgcgcgcgcagtagtagaaagatttggtgcggccttcgatcttcagcgagtgaacgcccatctgggtcagacgctcaacgtgggcgatagcccgcagatctttcgagttcatgatgtaggtgccgtgttcgtcctcaaaggcggtcatgtattcgcccggacgtttggcttcctcaatcataaagactttatcggtcggcgcgccgatgccgagggtaggctccacggtctgcaccgggatcggctcatatttgtggacgatgttgccgacgtcgtcctctttgccttccgccacgttgtattcccagcggcaggcgttggtgcaggtcccctggttcgggtcgcgcttgttgatatacccggagagcaggcagcggccggagtaggccatacacagcgcgccgtggacgaaaatctcaatctccatctccggcacctggcggcgaatctcttcgatttcatccagcgacagttcacgcgacaggatcacgcgggtgagccccatctgctgccagaatttgaccgtcgcccagttgacggcgttggcctgcactgaaagatggatcggcatctccgggaagtgttcccgcaccagcatgattaaacccggatcggacatgatcagcgcgtccggacccatctccaccaccggcttcagatcgcgaataaacgttttcagcttggcgttatgcggggcgatgttgaccaccacatagaattttttacccagcgcgtgggcttcattgatgccgagctgcagattttcgtgattgaattcgttgttacgcacgcgcagcgagtagcgcggctggccggcatagacggcatcggcgccataggcgaaagcgtaacgcatattcttcagcgttcccgccggggagaggagttctggtttaaacatggtgttctcgttctgatgacaggtcagattcgccgcacctggtgcggcgagttggggagtgtccccacattaagggcgggcattgtagcgccgcggcgaaggggagtaaatatcagataggtatctttcagtatggctaatttgtttgccattttgaacctgggcagtactcacactgacagcgttaataacgcctggtgggataggctctagggagttccccgggttgcggcgtaaacgccttacccgggctacggattgcagatggcggtgaacgtgtagcccggcgaagcgcagcgcgagccgggaaaaggctaactacgccagccggcaggcgtccgcttcccagcggtagccaacgccatacaccgcgcggataaacgactgctcggcgtccagcgcctccagcttgcgccgcaggttcttgatgtggctgtcgatggtgcgatcggtgactacccgataatcgtcatacagatggttgagtagctgttcacgggagaacactttgcccggctcctgggagagggttttcagcagccggaactcggcgggagtgaggtccagcagcttgtcgcgccaggaggcctgaaaacgaccttcgtcgacaatcagcgggctctgggcgtccagcgcctgcagatcgcgctgcggcttgcagcggcggaggatggtttttacccgggcgaccacttcccgcgggctgtagggcttgcagatatagtcgtcggcgcctatttccagccccagcaaacggtcgatctcttcgattttcgccgtcaccatcaccaccggaacatcggagaagcggcgaatttcccggcacagcgtcagaccgtcggtaccgggcagcatcagatccagcaggatcaggtgcggcggcgtctgccggacgtagggcaggaccttgtcgccgtggttaatcaacgcaggcgcatagccggcggcctgcagataatcaatcagcagttggccgagcttcggttcatcttccacgataaggatgcgtggggtgttttcatctacaggcaattcagtcatacgtctctcggtaaatcatgttccagaggtaactcaactttaatgctaaccccgccaaaaggcgaatggtcggcacgcagggtgccgccgtgggccgctacgatattgaggcaaatcgccagcccgaggccggagccgccgctggcgcggttgcgcgatccttccgcccggtaaaagcgttcgcacaggcgggccagctgctcatcgctgacgccgggggcgctgtcggcgaagtcaatcaccagcatccggccgctgcggcgggcggtgatgtgcaggctgccgccgctgtcggtatagcgcaggctgttctccagcagattgttgaagagctgcatcaggcggtcgcggtcgccgaagatcatcgcctgctccgggagcgacacctgaatgcttagctgccggctggcgaagcgctcgcgaaaagcgcccgcggccacttccagcagggtgatgatatccagtgaggttttctggtaggccagcgccccctcgtcggacatcgacagctgatggaggtcgtccaccagcttggtgagagtagccacctcggcctgcagagagggaatcgactcgggggtaaagcgccggaccccatcctgaatcgcctccagctcgccgcgcagcaccgccagcggggtacgcagctcatgggaaatatcggccatcagatcgcgacgcatctgctggttgcgctccagggtgctggcgagctggttaaaatcctgcgccaggcggccgagctcatcgccgccggtcaccgtcacgcgggtggaaaagtcgcccgccgccagcttatgggtgccttccaccagccgcttcaccggcgccagcagaccgcgggccaacgggaaagtggccagcgcggcaagcagggtggcaagggcgacaatcagccagctggtgcgcttttgctgccggtcgaagttaatgtcggtattgcgcgtcagccgctctaccggcgaggcgatcactttgcccacctccgcgccgttgaccacgatgctgcgctgggtgccgtcctccgggacgcgctcacgcggccccaccagcacgcgccccgactgatccaccacccagaacatggtgcgccagccgtggggcggcatttccggcctcgggcgcgggccgtcaggggggccatccggcggcggcccgtccggggcggcgtccggcttcatggcgtgccccggcggcgagcggtcgtcgttatcccgttcgaaggtgcgcagtagctggaagataaagcggtcattattgcgcagaaacgcccagctgccatgctgggcatactgctcgctcagcgcgtcgctgagcatggttaagcgttgctcattgccgcgcttgatatagtcgataaacccgcgttcaaaactaatgcgcaccgcccagtgcatgctgatcagcagcacgatgcaggtggcgaatatagcgaggaaaagcttgccggtaatacccgggcgccaaaatttcacgatccactcctgttgcgtcgacggaggacggtattgctgccgacgtcatccggtacccgggaaaagatgagcgccggcagggcgatgatcgccgccatgctcagataggtgtagagaaagacctgatgggtgctggcggcgtcgaggctcatatgctgctggccatacagccccagcagcagcccggcgatggtcacgccgatactcatcgacagctgcatcaccatcgacagcaggctgttgccgctgctggccagatcgtccgggagatctttcagcgtcagggtattcatcgaggagaagcggctggcgttgatcatcccctgcagaaacaggaccagcggcagcacgtaataccagccggccagggcgctaaacataaacagcaggctgaccgccgccaggcccagggtgctggcgaccagcacccgacggtagccaaagcggttgaccacctggaccacgatccgcttcatgcccatgctgccgagcaccatcgggatcatcatcagcccggcgtgaaagggggagaagccgaggccgatctgcagaaacaccggggtcataaacggcagcatgccgctgccgatgcgtccggcgaagctgccgccgaggccgagagagaaggtgcggttgcgaaacaggttaaggctaaacaacgcccgggcgttaccgcgggcgggccacaggtagagcagcagggcgcagaggccgacggccaccagccccgccagccaggcaggggaaatgccgagccctttctggccgtcgagcgccagggtcagggtcgccatcccggcggccagcagcagaaagccggagagatcgaagcgccgggtctgcatggtgtagttgggcatcagacagagggtggcgatcgcgccgacgatccccaccgggatattgataaggaagatccagtgccaggaggcgtactccaccagcaccccgcccagcgccgggccgagcagcggaccgacctggcccggcagggtgacgaaggtcatcgccgccatatactgatcgcgcgggacgatcttcatcaccgtcaggcggccgaccggcaccatcatcgcgccgccgaccccctgcagcacccgcgccatcaccagctggtcgagggtgctggcctgagcgcaaaacagcgatccggcggtaaacagcacgatggcggtgaagaagatattgcgcaccccgacccggtcggccagccagccgctggccggcagcatcaccgccaccgttaacacataggagacgataatcatatgcatatgcagcggactctccccgaggcttttggccatcgaggggagggcggtgttaacgatggtggtgtccagcgactgcataaagaagccgaacgccactatccatagctgccagcgcacgctggccgggaggtctgtcatgttattcgcttaccggttgagaggagtgacgcgaaaaacgcagccgcagacggtcaaagaaaagatagaccaccggcgtggtgtagagcgttaacagctggctcatcaccagaccgccgacgatggtgatccccagcggctggcgcagctcagagccatcgcccccggagagcaccagcggcagggcgccgaacagcgcagcgagggtggtcatcataatcggccggaaacgcagcaggcaggcctggaaaatcgcctcttccggcgtcaggttgccgttacgctgcgcctccagggcaaaatcaaccatcatgatggcgtttttcttaacgatgccaattaataacataatcccaatcagggcgattaggctgaacggggcatcgaagatctccagcgccagcagagcgcccaccccggcggagggcagcgtcgagaggatggtcaagggatgcacatagctctcatatagcacccccagcacgatatagaccgtggcgatagccgcgaggatcaggatcacctgcgcgttcatggtctgctggaacacctgagcggtaccggcaaaggagccgcgcacgctcgacggcaccccgagctgggtcatcgcgcggtcaatggcctcgctggcttccgacagcgagcggccggtgggcaggttaaaggagatagtgaatgccgccgacagcccctggtggttcaccgacagcggggcattggccggctgccatttggcgaagtaggccagcgggatcggcttgccgtcgctgttaatgacgaacatcttatccagggcgctgacgtcctgggtgtaggccggatccacctccatcaccaccttatactggttgagcggctggtagatggtagagatctgccgctggccaaaggcgttgttcagcaggttgttggcgtcctggacgctgatgccgaggcgcgacatggtatcccggtcatagaccaggtccatttcggcgccattgtcctgctgatccgagttgacgtccgccagctccggcagcgccgccagcgctttgcggatcttcggctcccactcgcgcagcgccgacaggtcgtcggacagcagggtgtactgatagctggcgttcgactgccggccgccgacgcggatatcctgcaccgccatcaggaacaggttggccccgggctcgttggccagctttttgcgcagccggtcgatcacctgctgcgccgtctcgtggcgctggtcgcgcggcttgagggtgataaacatcatcccgctgttgacccgcgagccgccggtaaagccggtgacgttatccaccgccggatcttcgcgaatgatcttcataaagtcctgcagcttgccgcgcatcgcctggaaggagatgctctggtcggcctgaatgccgcccatcagcaccccggtgtcctgctccgggaagaaggttttcgggatcgaaatgtagagccaaacgctgagggcgatggtgcccagcaccaccaggccggtcagccggctatgcttcagcacccattttaacgatttaccatagccgccctgcacggccaccagcaggcggccaaagccgcggttgcgcgtcggctggtggggcttgccgcttttcagcagccagccgcacatcatcggcgtcagggtgagggagaccgccagcgagatgccgatcgccaccgacagggtgacggcgaactcgcgcagcaggcggccgggcaggccgcccatcagcagcagcggcaggaacaccgccaccagcgacagactcatcgacagcacggtaaagccgacctcgcggctcccctgcagcgccgcctgcagcggtttcatccccgcctccagatggcgggagatattctccagcaccacgatagcgtcatccaccacgaagccggtggcgatggtcagggccatcagcgacaggttattgaggctgaagccgcacaaatacatcgcggcgaaggtgccgattaaggataccgggacggcgacggccgggatcagcgtggcgcgccccgagcgcaggaacaggaacaccacgaggatcaccagcgccaccgaaatcaccagcgtctgctccacctcctccagcgaggcgcggatggtcggcgagcggtcctgggcgatctgcaggtcgatagccgccggaatggtctgctgcagctccggcaggcgggcgcggatgctgtccaccgtctggataatattggcttccggcagtttgcggatcatcagcaggatcgccggtttggcgttggtcatcccggcgttgcgtacgtcctgcaccgaatccgagacggtggcgacatctcccagccgcaccgcggcgccattttgatagtggacgatcagtggctgatagtcggcggcggtcttcagctcatcgttggtctgcacctgccagcggtgcgcgctgtcctccagcgccccctgcggtttgcgcacgttggcgtcgctgatggcggtgcgcaccgcgtccagcgacacgccctggttaaacagcgcctgcgggttgaggtcgacgcgcaccgccggcagggagctgccgccgacgtcgacatcgcccacgccgtcgatctgcgcgatggtctgcgccagctgggtggaggcgaaatcatacagctcaccctgggagtaggtgtccgaggtcagcgtcaggatcatgatcggcgcatccgacggattggctttgcgataggtcggccggctgggcattccgctcggcagcaggctttgcgcggcgttgatcgccgcctgaacgtcgcgcgccgcgccgttgatatcgcggtcgaagttaaactcgagaatgatgcgggtgctgccgagcgagctggaggaggtcatctcattgaccccggcaatccgccccagggagcgctccagcggggtggccaccgacgaggccatggtctccggcgaggctcccggcagcgaggcgctaaccatgatcaccgggaagtccacctgcggcagcggggccaccggcagcagccggaagccgagaatgccgcacagggtgatggccagcgagatgaggatcgtcgccaccgggcggtaaatgaagagggcgaaaaacttcacttacgcctcctcttcctgacgcgggaagcggcgcttcaggtgcagcgacaggcggtcgaacagcagatagatcaccggggtggtgaacagggtcagcacctggctgagcatcagaccgccgaccatgccgatccccagcggacgccgcagctcggcgccgacgccggtgctcagcatcagcggcagggcgccgagcagggcggcgagggtagtcatcaggatcggccgaaaacgcagcagacaggcctggtagatcgcctcccgcggcggcatgccctgctcgcgctcagcggccagcgcgaagtcgatcatcatgatggcgttcttcttcacgatgccgatcagcagaatgatgccgatgatggcgatcacgtccagctcgctgcccgccagccacagcgccagcagcgccccgaccccggcggtgggcagggtggagagaatcgtgatcgggtggataaagctctcgtacagcacccccagcacgatatacatcgccaccaccgcggcgaccaccagccagacggtgctgccgagcgccgactggaaggccagcgagctgccctggaactgggtgcgaatatcggtcgggaaatccagcgactgttcggcggcgaggatcgcctccaccgcttcgcccagcgagtagttgtccgggacgttaaacgagatggtggtcaccgggaactgatcgaggtggttcaccgacagcggggtaaagcgctgctccaccgtggcgatggcggtcaacggcacgatgccgccgtcgctgctggtgagacggatattctccagcgccgcgaggcccggcgtcgcctcggtatcctgctcgagcaccacgcgatactgattcgcctgagtgtaaatagtggagatcagccgctggccgaaggcgttgtacagcgcgttatcgacatcggccattgagatgccgaggcggctggcgctgtcgcgatccaccttgatataggcggccaggcctttgtcctgccagtcgctgctgacgtcggccagctgcggctgggcctgcagacggctgagcagcggcggtacccaggtgctcagcgcctcgagggagtttgcctgcagggtgaactggtactgggtgcggctcaccgtagtgtcgatggtcaggtcctgggtcggctgcaggtagagcgccacgccggggacgccgtccaccgcctgctgcaggcggctaatcaccgtctggacgcggtcgtcgcgttcgtccagcggcttgaggttgatctgcagacgggcgctgttcagcgccgggttggtgccgtcgacgccgacgaaggaggtcagactctccaccgccggatccttaaggataatactggccacctgccgctggcgctcggccatgctggcgaaggagaccgactgcggcgcctggagggtgccctggataatgccgttatcctggatcgggaaaaagcctttcgggataaagacccacaggataatcgacagcgccagggtgctcagggcgacgccgagcgtcagccacggatgattcagcacccggctcagccagcggccatagacggcgatcacccgttcgaagaaacgctcgctggcccgcgagaatcggttctgcttacgcagcgattcgtggcttaacatgcgggcgcacatcatcggcgtcagggtcagggagaccaccgccgagataagaatagcgacggcaagggtgacggcgaattcgcggaacaggcggccgacgatatcgcccataaacagcagcgggatcagcaccgcgatcagcgagaaggtgagggagatgatggtgaagccgatctcccccgcgcccttcagcgcggcggccagcggcttctcgcctttttcgatatagcgcgagatgttctcgatcaccacgatggcgtcatccaccacgaagccggtggcgatggtcagggccatcagcgtcaggttattgatcgaaaagtcgaggaacaccatcaccgcgaaagtgcccaccagcgacagcggcaccgcgacgccgggaataatggtcgccggcacgttgcgcagaaacaggtagatgatcatcaccaccagggcgatggccagcatcagctcaaactgggtgtcgcgcaccgaggcgcggatgttggtggtccggtcggagaggacctgcaccttcaccgatttcggcaggctctcggtgagctgcggcagcatctggcgaatgctgtcggcggtgtcgatgatgttggcccccggctggcgctggacgttcatcacgatggcccgctgctggttggcccacgccccgagccagctgttttcggccccttgttcgacgctggcgacatcgccgagccggatcggtgccccgttctgataagcgataatcagccggcgataatcctcagcggactgcatctgatcgttagcggaaagcgtcaccgcgcgggccggaccgtcgaggctgcctttcgcggagttaacgttggcgctggtgatagcggtgcgcacggtttcgctggtcaggccgagggcggcgatggcctgggcgttaagcttcacccgcaccgccgggcgctggccgccggcgagggtcaccagaccgacgccggaaacctgggagatcttctgcgccacccgggtctccaccatgtcctcaacctgggtcatcgggatggcggaggaggtgacggcgagagtcatgatcggcggatccgccgggttcaccttgctgtagaccggcgggttgggcagatcgctcggcagcaggttggtggcggcgttaatggccgcctgcacttcctgctcggcgacgtccagcggcagggtcagctggaactgcagcgtgactaccgaggcgccgccggagctttgcgacgacatctgcttaaggccggacatctggccgaactggcgctccagcggggcggtgatggcggaggtcaccacgtccgggctggcacccggatagagggtgactacctgaatggtcgggtaatcgacctccggcagggcggagaccggcagaaagcgatagccgatgatcccggccagcaggatagccaccatcagcagagtggtggccaccggacgcataataaacagccgggacgggccgccggtgcggcctgggggtaacacctgcatcaggaacgcgctccgtgtttaccgctctggcgcggggcgggctgcgcctgctcgccgctgctggcggtgacaacttccaccttcgccccctcggtcaggcggtcaatcccgtcggtgaccacgcgatctccggcggaaagcccggcgctgatgactactttctggctgtcctggatgccgggcgtcacgctgtgtttgctgaccttattctcatcgttcagcacccatacgaaatgcccttcgttgcccatctgcagcgcggcggcagggatcaccaccgcgttctgctgggtgtccaccagcaggcgggcgttaacgaactgattggggaacagcgcgtcgtccagattgctaaagcgcgccttcagcttgatggtcccggtggtcgcatcgatctggttgtcgaggctcagcagctcgccgacgctgattttctgcttattggtgcgatcccaggcttcgacgctgagcgctttgcccgctttttgcgcctgcaccaccgtggcgatgctgctttccggcagggtaaagaccacgtcgatcgggtgcgtctgggtaaggaccacgatcccggtggtatccccgctggagatctggttgccgatatcgacctgctttaagccgacgcggccgtcaattggcgcggtaatgcgggtccagtcgagctgcagctgggcgctggcgacggccgcttcatcagctttcaccgtgccggcggattccaccaccagcgactgctgagtgtcgagctcctggcgggagacgaggttggtcttcaccagctgctggtaacgagcgagatcgcggcgggcgttggcaagggtggcctgatctttcgccagctgaccctgcgcctgggcgagagcgactttaaactggctggggtcgatctgcgccagcaggtcgccggctttgacctgctgaccctcctggaagtgaaggctcagcagttggccgtcgacccggctgcggacggtgacggtgttggccgccgtcaccgtacccagcccggtgagatagcgcgggaccgcttcttcggtggcggtggccgcctgcaccggcgccagcgcggcgccaaagcggccatggcgtgcgccgcccggcccctgcgggccctgtccggcggcgggagccccgctgccgctcgtcccgcgatcgtgccagaaccagtaggcggccccggcgataatcactaccgccagcgcggcgccccaacgacgtatgttactgcctttcattagtttacggtctcatcctgaagcgtttcgctgaatgatactagtttagtgagggaaggggccgtaaaaatggaggaattatgaaaagaaggttgagaaatgtctggataaccgccgcgacgccgggcgctcccgcggccgatatccggggtgatatcaacttttagtttaaaaaagcaaaaaatagttgtatccgcgggggctttaattagatttatgcggtgaataaatcagtgcattctcataataataaaatatgcacttaaaaatcaacgtgttaaataatcaggggtcattgctgtggcaaacgcaaacaaactcacgctcttcatcgtcatttttatgctgatggggatcctctccggcgcggctatccatgcctacgcgacgccaaccaccgtctccgcctgggcggacaacattacgctgctcaccgatctgtttctgcggttgatcaaaatggtcatcgcgccgttggtgttcagcaccctgacggtcggcattatgcgcctcggcgagacggcgaccatcggccgggtaggcggcaaggcgatggtctggttcatcacctcctcggtattatccatgctcgtcgggctggtgatcgtcaccttccagcacccgggcgccggggtaaacctggcggtgccgaaagaggcggtggataccggcctggcggtcagcggcatgagcctgaaagggttcctgtcgcacaccatccccaccagcatcaccgaggcgatggccaacaacgagatcctgcagatcgtggtgttctcgatgttcttcggcatcgccggcgcgtcgctgggggagaagtttaatgctccgctggtggcggcccttaacgtggtgtcgcacattatgctgaaggtgacgggctatgtgatgtacgttgcgccgctggccatcttcgccgccatctcgtcggtgattgcctcccaggggctggggatcctgctcaactatgcttcgttcatcggcggctactacctggcggtgctgttgaccagctcggtgctgattgccgtcggctatatggtgctgaaaaaagaggttttccgcctgctgaacatgctgaaagatccggtgctggtggccttcaccaccagcagctcggaagcggcctatccgaagaccctcgagcgactggtgaagtttggctgctcgcgcaatatcgtctcgttcgtcctgccgattggctactcgttcaacctcgtgggctcgatggtctactgctccttcgccgcgatgtttatcgcccaggcctataacgtgccgctgagctttagcgagattacggtcatgatgctgaccctgatgctggcctcgaaaggtatcgccggggtgccgcgttcggcgctggtggtgctggcggcgacgatccccagcttcaatataccggtcgccgggatcctgctgctgatgggtatcgaccatttcctcgacatggggcgctccgccatcaacgtgctgggtaatggcatcgccaccgcgatgctgtcgaaaaatgaagggttgctgaccgacgaggaagcgcagccggactgggaagtggagaaagcggaagcctgatcctgccgcgccctttcactgagggcgctattccacacggaaaaaaagacccctgacaggcacgtcaggggcaatgtgacgaagtatcagttttcctcgtgtagcgtgttttttattatataaagacgggcggtaacgtctttataccgaggaagcgtcagagtttaacgttatgtccgccagcgctggatattttttagcatcctgcgactattttcggatttacgacaatatagccaggtcaatatcttatttttttgtgctgctgtttgcctaccagcgctcacgtaaaagattcataaactggaaaaattcatgattattattcaggctgtatttttccatgatcttattcttatgataggcggcggtgcggggactcacacgctgcagggcggcgattttactcatatccagcccttcgagaataccgtgcactacggcggtctgcgatcgcgataacacgcgatgcggacagctggcgcagctgagttcccggcctgcggcgtcggtagccgtgggggtcatacaatgctgaagctcgcttttaatgatcgtcagcaattgcggaatactggccgtttttagcgaaacaaaaatgacccctttcaggcagttaatcatgaactcatcttccggcagctggtcatagctatggagaataatcagcgagctacctctttttctgttcttaatcagggtattacacaggtatatttccccggggatcacttcgcagataatgatatcttcagctgacagatcggtgttacgccaggaaaaacgcgcccgcagatcgccccgggtgaggtcattgaccatggccaccagcgattcacggacaaaggcgttgcgggtgttgatggtgacattaatgtttctcatggcgttatttccttacgcaaaacataacgccatgctgtgacaaatcctccgggcgtatgcggtgtgttgaagatataaaagcacctacaataattttttattattttaaagtgaattatttacgacgcatcgaacgcttatcgttaaaagtaaatttctgccgcctcctgtctttcagataggaaataaaactgtatacagagatgctgaagaaaaaaatgcatagcaataaaactaaccacgtttgcatggccatcgtttttaccctgattgtgttgcatggtgtcagaatttgccgcgaacggctaatacgttttgttatatgcttttctgtcccgtgaaaatcttacgccatcatcctgatgtgctagcactataagaaagttcttaaggtcatcgtcagtctcattcctctcatttctctcagaaaatgagaaaaattaacacttacgagttttttatatcccgcgcggccgccgacgagccccgtcgttcaggaaataaaggccagtcccttaccaaagattgcgcgaacgggcaggtggatcccctgctggcgtgccttgtgacgcaggcggctaaccaccacgtcgatccggtgcaggtcaggctcgctttcatgggaaaacaggcaggcatggagatccagtttgctgcacacttcgttgcgattgcgcatcaggagctccaccaggcgatattcctgctgggttaactccagcgtccgggcgtcgggtgaaatcagtttatcctcttgcagacgccagctgccgggggagacggccggcggcgtgccgatcgcctccgcaggcggagccgccggacggtcctggcgcaggcgcgcgccgagggcggtgagggtctcggcaagatgggcgaagtttaccggtttgatcagataggcatcggccccaaggctcagcgcctgcaatttatcctgttgctgaccgcgggcgctgaccaccaccagaccgtagtgccccagctcatgcagatagttcagtacgctgaagccatcctcgccgggcaggccgatatcaaccagcacgatatccaccggatggctgtgcagttgccgccagaaggcttcggcgctacgcgtcccccacacctcgaagccgcgatagcccagccaggccagcagttcatccagcagatcggcgttatcttcaattatcgccagccgtaaagccatacgtcgttctcctcttaagcaaccgtggggagggtgagaataaaggtgcagccgtccgggccatgctcggccagccacagtttgccatcatgagcctgcactatctgacgcgcaacatacagtccgagaccggtgccgcctggcaccggcgatgtgtgctcgccgcggcggtagcgctcaaagatcagttccgcctgtccggcggggagtcccgggccgtggtcgcgaatgcgtagctccgtttgcccggcatcggaatgaatatcgatggcgatttcaccggggggcgaatacttgacggcgttatccagcagattagcgatggcgatgcacagcaggccggcatcggcctgcagctgcgggctttccaccgcgccgtgctggcggatgttcaggtagtgatcatgggagatggccaccaccgaggcggccatgttgatcaccgttagcagggcggtctgctggcgctcgacgtgcagatcgtgggaggcgagccgggcgtcggcaaggcagttatcggtgagctgcaccaggcgggtggcggcgcggccgatgcgatcgaagcgcgcctcctggctggtcgaggccgccgagaggcgaagattctccagcgcagcctggatcaccgccagcggggtgcggaattcgtgcgccaccatgcccataaactgccgctggtggaagctggcttcacgctcaatctgcagttcgcgcgccaggcgctgcttctgctccagctggcggttttcagcacgcacccgcaggatggcaatgatcagcaccgtaatgatgtggacgatcagcgcgtactgccagagggaatagatcgccatatggaacgggataatcccatggatcgacaactgcaccagcaccgcggcgacgacatagaacggcggcagcagacccagcagcagggtggtacggtcgatagcttttttgcgccacagccaccaggaggtgaacagcagcaccggggtgataatgatgaatactaccccttcaatctgcatcgcgaagccgtaaaacccgagcggaatactgacctgcagcaccaggttgagtatcacggcggcgatcagcagctgatgaagtcgcggcatattcttcttcagatcaaaaatctcgctatgcagccagagggcggtggcatagctgaacagcgagaggctactgatcataaaatcctggaacggcagcgcggcgtggccgaagaaccactccgggaagccgtgcagagcggccaccagcggataattgagcgagaaaagacagatgccccatagcaaacgccggcgcagggccagcgccagccaaagcgccacaccgctggcgacagcggccaggccgaagtagaagctccagaaagcggtgtcagcggcgggcgctgatacaaaacgtgcgctgacggcgagcgagaaaggcgagatgcgcgcgggggcggcaccagcgacataaaaaaaacgacgaaaaggcggagaaga

SEQ ID NO: 144 - DNA, 86787 bp, Unknown
  source: /note="Description of Unknown: MKP2_2161_1 Mutant Bacteria sequence"
ctgcagagtcaagcatttatttttgcttttctctgcgaggttctcaccggaaccccgctgacccggcggcttgtttgccgttgttccgtgtcagtggaggcgcattatagggagtaattctgaggtggcaaggggaaatgcaaaaaaacttttcgttcgctcgattttccatcacaacgcgagttttacgcgctatttgcgcgccatttgtgcgatttcccgagcaaaccgggatacctgttgccagtcggtatagaccacttctttgcgggtatccgtttcacccccggtcattttcataatcaggcggatcataaaccgatcgtaccagctgtagcgcgggtagcgcagcgcgccggcaaataccgcgcagctctgcggctgccacggcgagttcagcagaaacttacgcgtatagctgttggtctgcggcgtgcgcttctcgggtttacgcgccaccaggttaaccgaaaagaatgcccccggcagcgcctgcaatgctgccagatgctttttcacaaagcggtccaccgccggatgaaagtgcccatagcgaatcgacgcgccaatgaccacccgatcgtagtgatgccattcgacgacatcggtacggttcaggttcagggtgtccgcatcgatgcccagctctttaagctcagaggcgagaaacgaagcgatttcacgggtctgcccgtcgcgggtggagaagagaattaaagttttcacgagcactcctgttattcgcgccagaaagtgggggtaaagagcaccagtaaggtgaacacttccagacgaccaaacagcatattagcaatcaggatccatttcgcgaccgggttcatggtggcaaagttatccgcgacgacgccgagcccaggcccgaggttgttcaatgtcgccaccacggaggcgaaagcagagaagtcatccaccccggtggcgataatcgccagcatactaatgataaagaccagcgcataggcggagaagaatccccatactgcttccagaatacgttccggcagcgcgcggttacctaatttaatgctatacaccgcattcgggtgcaccagccgcttcagctcacggttgccctgcttgaacagcaacaggatacggatcacttttaatccaccgcccgtggagccagcgcagccgccgataaatgcggagcacagcaacagcaccggaaggaacagcggccagcgtgcaatgctatcggtggtgaaccccgcggtggtcgccatcgacaccacctggaaaaacgcctggttcagcgtcgtcaacaccgagccgtacacgttatgaagccatagcaccagcgtacagacgatgaccagcgtcaactggacgccaatgaacatcctaaattcagggtcgcgccagtacaccttcaggctgcgtccgctcaacaacgaaaaatgcagaccgtagttacagccggagatcagcaggaagatggcaatgatggagttgatcatcgggctgttgaaatagccgacgctggcatcgtgagtcgagaaaccgccgatggcgatggtggcgaaactgtgcccgatcgcatcgaacgccggcataccggcaaaccagagcgccaatgcgcaggcgatcgtgagtaacacatagatgagccacaatgtcttcgccgtctcggcaatacgcggacgcatcttgttatccttcagcgggccgggcatttccgcgcggtagagctgcatccccccgacgccgaggataggcagaatcgctaccgccagcacaatgatccccatgccgccgaaccactgcagcatctggcgataaaagaggatagcgtgcggaagcgagtccagccccaccagagtggtcgccccggtcgtcgtcaggccggaaaatgactcgaagaaggcatccgtcaccgtcaggttcggctgttcggagaagataaagggcaaggcccccacgctccccagcacggtccagaacagcaccacgatcagaaacccttcacgagatttcagttcgcctttttgcttacggttcggccaccacagcatggagccgatcgccagagcgacaaagaaggtttgagtgaaggcccgtcccgcgccatcgcgatatatcagggccactaatcccgggacgatcatcgtccccgaaaacaagatgaccagcagtccaacgattcgggttatggcgcgaaaatgcatctctggcgcttcctttgataggcaaaaaacagaggggattattcgttaatcttcagtaattgcaatgaaccacgactaaaatcagccagtcttgctgaaaaagccgccacttcggcctggggaagcgccacgcgcagccgaactgacgccagatattcgctttcaacgacgtttccggagaattgggcgagcagcgcttcgacgccggccagttgcccatactcacactgcaaagtatatgccgttaacggcgtcttgcgcagcgtcgtcagctgcgccagcgcctgatgcaccccgccgccataggccttaaccagaccgccggtgcccagcaggataccaccgtagtaacgcacgacgacagcggttatctcgccgacgccgcttcccatcagctgcgccagcatcggtttacccgccgttcccgccggttcgccatcgtctgaaaaccccagctgttgcgaatcatcaggcggccccgcgacccacgccacgcagtggtggcgggcatcagggtgatccgctctgacggactcgacaaaagcttttgccgccgccacgccgtcggtatgcgccaacagcgtgataaaacggctttttttaatctcctcaacgacggtaaccggcgccgccgggattaaccagctctccatcaggccagcttcagatcgcgcgtcatattttcgatactgttttcgtgaatcaccacgttatcttcgatacggatcccaccgaacggcttcatggcgtcaattttttgccagttaaagtgcttgctgaacgggccctcacgccacggcgccagtaacgactcgatgaagtagatgccgggttcaatagttaacaccatccgcggctcgataatacgggtgcagcgcagatacgggtatttcgacggcgccgccagatgcgtaccggtgtcatcctgcataaagccagcgacatcatgcacctgcagacccagcggatggccaatcccgtgcggcataaacggcccggtcaggtcattctccaccatcgcctcttcgctcatgtcggtaaccaactggtgtttacgcaacagcttcgcgatacgctgatggaactggatatggtaatcaatgtaactggtaccggccttcatggtactaatcagcgcctgctgctcatcgttaacgtctttgatcagatgggcaaagtcgttatcgccgtgcgccgcccaagtgcgcgtcagatctgcggcatagccgttatattccgcaccggcgtcgagcaggaaactgcgcatctccgccggggcacgatggtccagtttggtgtagtgcaggacggaggcatgctcattcagcgcgacaatattgctgtaaggcacgtcggtatcacgatggccggtggcggtgagataggcctggttgatatcgaattcgctcattcccgactggaaagcttcgtaggccgcacgatgaccattcaccgccgacttctgcgcttcacgcatgcaggccagctcgtaatcggttttgtaagcccggtagtcatgcaggtagtcgataacccctttcgggttgatcttatccgcggcgatacccaggcccagcgcgcgctcaggcaccggaccgatatagccaatattaccgcgagcagcaggcagctggctgccgatgccatcggccttcggtagcgcgatcacgtctatctcttcggtccagaaagaggtcggcaacggctcaacgttatgccagtaatctaccggcagatagaaccacagcttcggtttattcacaccgtccaccagcagccagcagttaggcacctgagtcacaggcacccaggctttgaactgcggattgaccttgaacgggtacggatggtcatcaaggaagacgttaaccagctcgccggagtgaatcagcagagcatccatttgaaaacgggccaggacgtcgcgggtacgttcttgtagggtaacaatatgatttttatagagcgcggccagggattccatcttttatcctttgcttttatgggatcgtgatacaccgcatcttagcacatcgacctgcgtgcgggtgatttccgccggatgtgatccgaccagcaattatttaaagagtaatttgcaattctttaacataaattccacactccgtttcatctggtatgaccagatcatattgctggattcaggagactgacatgctctacaaaggcgacaccctgtacctcgactggctggaagatggcatcgccgaactggtgttcgatgccccaggttcggtcaacaagcttgataccgcaaccgtagccagcctcggtcatgcgctggacgtactggaaaaacaaagcgatctcaaaggtctgctgctgcgctctgaaaaagcggcatttatcgtcggcgcggatatcaccgaattcctctcgctgttcctggtccctgaggagcagttaagccagtggctgcattttgctaacagcgtcttcaatcgtctggaagatctccccgtccccactatctctgccgtcaatggctatgcgctgggcggcggctgcgaatgcgtgctggcgaccgactatcgcctcgccacgccggatctgcgcattgggctgccagaaaccaagctcggcattatgccgggcttcggcggttccgtgcgtctgccgcgcctgctcggcgccgatagcgcgctggaaattattgccgccgggaaagacgtcggcgccgatcaagcactgaaaatcggcctggtggatggcgtggtcgctgcggaaaaactacgcgacggcgcgctggcgatcctacgtcaggccatgaatggcgacctggactggaaagcgaaacgtcagccgaagctggagccgctgaagctcagcaaaattgaagccgccatgagcttcacgattgccaaaggcatggtcgcgcaaaccgccgggaagcattacccggcgccgatcaccgcggtcaaaaccattgaagccgccgcgcgtcttggtcgtgaagaagccctggtgctggaaaataaaaactttgtcccgctggcccataccaatgaggcccgcgcgctggttggtatcttcctgaacgaccagtacgtcaaagcgaaagcgaaaaagctgaccaaagatgtcgagacgccgaagcatgctgccgtcctgggcgctggcattatgggcggcggtatcgcttaccagtcagcctggaagggcgtgccggtggtgatgaaagacatcagcgacaaatcgctgacccttggcatgaccgaagcggcgaagctgctgaataaacagctggaacgcggcaaaatcgacggtctgaagctggccggagtgattagcaccattcagccaaccctggaatacagcggttttgaccgcgtggacgtcgtcgttgaagcggtggtggaaaacccgaaagtgaagaaagccgtactagcggaaaccgagtcaaaagtgcgcccggataccgtgctggcgtccaacacctcaacgatccccatcagcgagctggccagcgttctgcagcgcccggaaaacttctgcggtatgcacttctttaacccggtgcatcgcatgccgctggttgaagtgatccgcggcgaaaaaacctcggataataccattgccaaagtggtggcctgggccagcaaaatgggcaaaacgccgattgtggtgaatgattgtcccggcttcttcgtcaaccgggtactgttcccctacttcgccggcttcagccagctgctgcgcgacggggcggacttccgcaaagtcgacaaagtgatggagaaacagtttggctggccgatgggcccggcttatctgctggccgtggtcggcatcgataccgcgcaccatgctcaggcggtcatggcggcgggcttcccgcagcggatgcagaaagattatcgcgacgccatcgacgccctgtttgacgccaaccgtttcggccagaagaacggcctcggcttctggcgctataaagacgacagcaaaggtaagccgaagaaagaagaagatgctaccgtcgacagcctgctggccgacgtcagccagtcgaagcgcgatttcagcgatgaagagattatcgcccgcatgatgatccccatggttaacgaagtcgtccgctgcctggaagaaggcattatcgccagcccggcggaagcggatatggcgctggtatacggcctgggcttccctccgttccacggcggcgcattccgctggctggacaccatcggcagcgcgaagtatctcgatatggcgcagcaataccagcaccttggcccgctgtatgaagtgccagccggtctgcgtgacaaagcgcgccataacgaagcgtattatccccaggtagagccagcccgtccggttggcgctctgaaaacggcttaaggagtcacaatggaacaggttgtcattgtcgatgcaattcgcaccccgatgggccgttcgaagggcggcgcatttcgccacgtgcgcgcggaagacctctccgcgcacctgatgcgtagcctgctgtcgcgcaatccgtcgcttgaggcaagcgcgatagacgatatctactggggttgcgtgcagcaaaccctcgagcagggttttaacatcgcccgaaacgcggcgctgctggcggagatcccgcattcggtaccagcaaatacggtcaaccgtctgtgcggttcttccatgcaggcgctgcacgatgcggcccgtatgatcatgaccggcgatgccagcgtctgcctgattggcggcgtcgagcacatgggccatgtgccaatgagccacggcgtcgatttccatccgggcctcagccgcaacgtggcaaaggcggcagggatgatggggctgactgcggagatgctggcgcgtctgcacggtattagccgcgagatgcaggatcagttcgccgcgcgctctcacgctcgtgcctgggccgcaacccagtccggcgcattcaaagcggagattatccccaccggcggccacgatgccgatggcgtactcaagtcctttaactatgacgaggtgatccgcccggaaaccaccgtcgagacgctgtccacgcttaaaccggcgtttgacccggtgaccggtacggtaacggcgggtacctcttccgccctttccgatggcgcagcggcgatgctgctgatgagcgaaagccgcgctcgcgagctggggctgaagccgcgcgctcgcgtccgttcaatggcggtggtcggctgcgacccgtccattatgggttatggcccggttccggcctcaaagctggcgctgaaaaaagcgggcttatccaccagcgatatcgacgtttttgaaatgaatgaagcatttgccgcgcagatcctaccgtgtattaaagatctgggcttaatggagcagatcgatgagaagatcaacctcaacggcggggcgatcgcgctcggtcatccgctgggctgttccggggcgcgtattagcaccacgctgatcaaccagatggagcgcaaagacgctcagttcggcctcgccaccatgtgtatcggcctgggacaagggatcgctaccgtgtttgagcgggtttaagcgaaagggtatctcaacgccattgccaccagaacctggcggctatggcgaagagagcaggtttagttgccgttcttcccgcctgtcaggggcgggttttttattttcagataaacgcaaacgcatcgccaaacaggcgatcttcacgcgcgccgcgctcattacagaacaggtcgcgagcgatcttcgccatctcaaaacgaccggcaatgtagatgtcatgctcggccagcgtaccgtaatcctgcagcacggcggtgagtaccgtaccggagcgaccacgccacccttcttccggctgttcgaccaccggctcgatgcgcagattcggatgcttgatgcttaacgcttccagctcggccagatcgtacagatgcttagcctcgcggccgccccaataaatggcgatatcgcgatccgggttacgcgccagcgcgcttaacagaatagaacgcacataagagaatccggtaccgccggcgatcagaatcagcgggcgatcttcgtcatcgcgcagccacgcttcgccatgcggaatatcaacctcaatttcacgctctttcagaatgcgatccatgaccgccatcgcgtacagattgagctccgaggcgccgatatgcagctcgataaattcctgttccgccggcgtggaagccatggagaacgggcgcttgtcgcgctcatccattaccaccatcagatactggccggcacggaaggaaaatgccgcttccggcactaatcgaacacgatatacggtatcggtaatcgcctccaccgaggtcactttacagcttaaggttgtcatgcgtcccctctgtcgggtcaatagagcaaaacagcggcgttagccccgcttactgttgtttaaagatggccagttcatcccagatggcgtcaatacgcgccgtaacggcaggatcttttttgattgggcgaccccattcacgctgggtttcgccaggccatttattggtggcatccagccccatttttgaacccaggccggaaaccggcgaggcaaaatccagataatcaattggcgtattctctaccagtaccgtatcacgagccgggtccatacgggtagtgatcgcccaaatcacatcgttccagtcgcgtgcattgacgtcgtcatcgcagacaatcacgaacttggtgtacataaactggcgcaggaacgaccagacgcccatcattacgcgcttggcatgtcccgcgtactgttttttcatggtcaccaccgccaggcgataggagcacccttccggcggcagatagaaatcaacgatttccgggaactgcttttgcaggatcggcacaaagacttcattcagcgccacgcccagcaccgctggctcatcgggcggtcggccggtataggtagaatgataaatcgcgtcttcacgctgggtaatatgggttaccgtaaataccgggaagctgtccacttcattgtagtaaccggtgtgatcgccatacgggccttccggcgccatttcaccggcctcaatgtagccttcaagcacaatttccgcgctggccggcacttcaaggtcattggaaacgcacttaaccacttcggtcttggtgccgcgcagcaggcctgcgaaagcatattccgacagggtatcgggcaccggcgtcaccgcgccaagaatggttgccggatcggcgccaagcgccacggaaaccgggaagcgttcgcccggacgcgccgcgcaccactcctggaaatccagcgcgccgccgcgatgagacagccagcgcataatcagtttgtttttgccgatcagctgctggcgataaattcccaggttctgccgctctttgtgcggcccgcgggttaccgtcaacccccaggtgatcagcggcgcggcatcttccggccagcaggtcataatcgggattttattcagatcgacatcatcgccctggatgattttttgctgacagggggcgccgcgcaggcgtttggtcggcatattcagcacttgcttgaactgcggcagcttatcaaacaggtcgcggaagccttttggcggctcaggttctttcagaaaggccaacagtttacccacctcgcgcagcgaactgacatcctcctgccccatccccaacgccacgcgacgcggcgtgccgaacagattgcacagcaccggcatggtatagcctttcggattctcaaacagcaacgccgggccgccggcgcgcagagtccggtcggcaatttcggtgatttccaggtgaggatcgaccggcagagtgatacgttttagttcgccctgttgttccaggagtgtcagaaagtcgcgaagatcgtgatatttcatggaagtgttattgacctctctacaggcggctaattatacggtgttcgacggcgcgatgctgtaattttgttaaattagcgtgaaagaacgctgaaatttggatttcaattataatggctttcgcgattacaccagccatttgttatgcttgccgttattagaagtggaatgagtcattatgcaagcctggtacttactgtattgcaaacgtgggcagctacaacgagcccaggaacatctggaacgtcagtcagttaactgcctgatgccgacgattgcgctggaaaaaatcattcgcggtaaacgcaccatggtcagcgaaccgttgttcccgaactacctgtttattgagttcgatccagaggtgattcataccaccaccatcagcgccactcgcggggttaacaacttcgtgcgctttggcgccctacccgctatcgtcccctcggcggtcatccatcagctttctatctacaaaccggaagggattaccgacccggaaacgccgcatgagggcgatagcgtgctaatcaccgacggcgcgtttgaaggcctggaggcgatcttcaccgagcccgacggcgaagcgcgctctatgttgctgttaaacctgctgaataagcaagtcctgcagagcgttaaaaataccgacttccagaaaatctaaacgccgttaatgtcgacgccaaacagcgccctgacgtttgcgtccgtttgcgcctccagccattgcgcctcctcgccgcgccaggccgcgacgctggccaggatatgcggcaaatacgcgggctcgttacgccgcgaggccggtttcggcttgagatcgcgcggcagcagataaggcgcatcggtctccagcagcagacgttccgccgggatcgccggcagcagctcgcgcagctccagtccccgccgctcatcgcaaacccaaccggtaataccgataaacaggcccagatccaggcattcctgcacctcgctgcggctgccggtaaagcagtgcagcaccgcgcccgggagcttctcaagccagggtttaagcagcgtcagaaaccgatcgtgggcgtcgcggcagtgcaaaaacaccggcatcgacagctcagcggccagcgccagctgggcgctgaacgctacctcctgctcgtgcggcgtggaaaaattccggttaaaatccagaccgcactcgcctatcgccaccacctgcggctcgccggcgagggtataaatcgcctcggcgaccgctggcgtccagctgctaccgtcatggggatgaacccccgccgtggaccagcagccggaatagcggctcgccagtttctgcgcctgctggctctccgccaaatttgtgccggtcagcagcatgccgttaacccccgccgccagggcgcgcgccactacctcatcatgatcgcgggaaaactgcgaactggtcagattaacgccgatatcaaacatgatcgctcccatatgccaaccgccctgacgggcggttggcggtattactcttctctgtgctctgcggcttcagcttcggccgcggcgtcgtcatcgcgcgtcaggcgcttcccggtgtagaagcgggcaaagaacaccccgacttcaaacagacagtacatcggaatggccagcagtgtctgcgagaatacgtccggcggcgtcagcagcatgcccaccacgaaggcacccaccagcacatacggcctttttttacgcaagtcttccggcgtggtaacgcccatccagcagagcaacacaatggcgaccggcacctcaaaggagaccccgaatgccataaacagcgccatcacgaagtcgagatagctgcgaatatcggtcgagaccagcaccccttccggcgccgcatgggtcaggaagccgaacgccagcggaaacacgacaaaataggcgaaagccatgccgatatagaacagcagggtactggataccagtaaaggcaccaccagccggcgttcgtgcttatacaacgccggcgcgacgaaggcccatacctggtaaagaataatcggcaccgacaggatcaccgacaccatgaaggtcaactttatcggcgtaaagaaaggtgaagcgacatcggtggcgatcatcgtcgcgcccacaggcatcttactgataagcggggccgagaccagctggtagatatcattggcgaaatagaccagcgccaggaagatcaccagaatagcaatgatgctgttgagcagacgcttgcgcagctcaatcagatgcgaaattagcggttgtgtatcgtctacgcccatgtttacggtttatcactcgatgcgggggaagaatggggaactgccgccgtagcggacgttttctctgcctgaaggtcagccggtgaagcagattgctcggcggcaacgggatctggcgcatgagccggagcgctggcctgatgttctgccgtcgccggcgtgacgtcctggcgctgcgcttcgctgcctttgaccaccggattaaggatggtattggcttcgtcgctggctttttcgggatcgtgggcgctataggagcgcttcatcgactccgcggcctcgcgcagttcatccatcgaggctttcagctccggcgtcaggttattcaggctagccttttccaccttcttcaggctctcctggaactcctgcagttttagctcctgggccagctcattttgtaccgtggtcgccagcgagcgtaacgtacggatccagccaactaccgttttaaccgctacgggaagccgctgtggccccagaacaatgaggccaatcacaaacaccagcagtagttcactaaaaccaatatcgaacacgagttacacctgctctttgtcgtggcgttttgtctcgtctttttttgcatcatcctgtttatcggcgatggttttcgccgtgaaatctgcgtctggcgccgacttttcgggtttatcatcatcactcatagcttttttaaagcctttgatagatgcccctaagtcagaccccagcgagctcagcttcttcgtcccaaaaagcagaactacgatgacgacaacaattaataactgccaaatactgataccacccatacacgttcccctatgacagatgatgaattgtgtggacgcattatacacgccatcctgcgagccgcctcttcgtcaggccgccgacatgattttgcgcaaataagcctgcgtcatgaagaggcgaaccgatcagtgggttttccgccagccaataagccaggtcaccacaccgccggccatcagccaaccgggcatcattccccactcagggcgatggataaagagcagcgtaccactgagcaataaaaccgcgcctataccaaacaggtaacgggattggccctggcgcacatgacgcacatgcatatcccgcacaatagtatcgacgctggtctgcagctgtttactctgctgcaggctctgatacaccagctcaggtatttccggcattctttcgatccagaacggcgctttgtctttaaacgcgcgcaccagcgccggaatgccgacctgatctttgatccacgactcgaggaaaggcttcgccgttttccacaagtctaactgaggatagagctgccggcctaccccttctacgtaaagtaatgtcttctgtagtaaaacgagctgcggctggacttccatattgaaacgccgcgcggtattgaacagattaagcagcacgtggccgaaggagatctccgccagcggcttctcaaagatcggctcgcagaccgtgcggatcgcgaactcaaactcttcaacgttggtatcgggcggaacccaaccggaatcgacgtgcagctcggcaactttacgataatcgcggttgaaaaaggcgataaagttttccgccagatagcgcttatcttctttgttcagtgagccgacaataccgcagtcgatgccgatatactgcggatcttccggatgctcgtagctgacgaatatgttgccaggatgcatatcggcatggaagaagctgtcgcggaacacctgggtgaagaagacctggacgccccgctccgccagcagctgcatattggtgccctgggcctccagcgcctccacatcggacaccgggataccgtaaatgcgctccattaccatcatgctttcgctgcagtagtcggggtacacctccggcacgtacagcatcgggctgtcttcgaaattacgccgcagctgaatagcgttggcggattcccgcagcaggttcagctcatccagcagcgttttttcatattcacgaactacctcctgcgggcgcagacggcgaccgtcaggcagcagacgcggtacccagcgcgccaggcggtagatgagcttcatgtccgctttaatgatcggcaaaatatccgggcggataaccttgatcaccacctctttgccattctctttcagacgcgcggtatgcacctgggcgatggacgccgaggctaacggctcaacggagaaatcatcaaaccaggtctcgaccggcagcccccccatcgctttctctatctgctgctgcgcgagcttcccttcaaagggcgccacgcggtcctgcaacagcgccagctgatcggcaatatgcggcggaaagagatcccggcgggtggaaagcatctggccgaattttatccacaccggccccagctcctggagcgccagccgaaggcgggcaccaagaggctgatcctgatggcggtttggcatccagaacagcatccgccgccagatacgcagcggcagcgtgatccgcattttggggatgagctcatcgagcccgtagctcaaaaaggtgtggatgatgaaatacaggcgccgtaattctcctggcgtcatttgccctccagcgtttccagccgtttttccagtgcggccagcgcgcgctcaatagccgttgtctcttcagcaaaccaggccagctccagcggccccggcgccaggcgccactcttcagtgatcgcttccgcgacatagcgctgctggcgctctgcccccttcagcagaaactgagcgccgccgcgcaggactttaccgacgccttcggccacaatatcgccggtatagggcgccagcagttcagcgggatcaaactctgccaggtcgcacagggagaccatattctgcaccacctgcagatcgccctgcacttccagatcaccgctgcgaataagcgccgtgagctgctgacgattgcgcagttttggcagcacgctgagccgggtaatcacggtgcaatcggcctctccgtcccaggcgctcaggacgtcaacctggcgttcgctgaataccagcaccacgggcgtggcgaaatcctgcagctggacccgcaataccttgcccagcaggcgctggcgagcgggtttaagcgctttgtcgcgccagaggaaagtattcagcgccgtttcaatgccagcggtaaccaggggtgtgaaaggcatagcgtccctcctgtcagaacttgtaaccgcgatgcaaagcaacgatacccgccgtcaggttgtagtaatccacgttttcgaagcccgcatcctgcatcatccctttcagggtttcctggtccggatgcatacgaatagattccgccaggtagcgatagctgtcgccatcttttgccaccagctcgcccaccttcggcaggatatggaaggagtaagcgtcgtaggctttgctcagcggttcgataatgggtttagaaaactccagcaccagcagacgtccgcccggcttcagcacgcgatacatcgaacgcagcgctttctctttgtcggtcacgttacgcagaccgaaagagatggtgatgcagtcaaaggtattatcagcaaaaggcagggcttccgcgttggcctgaacatactcaacgttgcctacgatgccgatattgcgcagcttttcgcggcccattttgagcatagaatcattgatatcagcaagcatgacgcggccggtttcccctaccaggcgggagaacttggccgtcaaatcaccggtaccaccagccagatccagcacggtctgcccgcgacgtacgccgctgcagtcgatggtgaaacgcttccacaaacgatggatcccaaacgacatcaggtcgttcatcacatcatattttgcggcgacagaatggaatacatgcgccaccatatctgctttctgctctttagcgaccgtctgaaagccaaagtgcgtcgtttcttgtgaatcctcaaccatctctatgcctgcttgcttttcaagaaaatgttcactgagtgtatcagactcagcgcatttcccatacgtttcagcatggcggagccgcctcccggctacgcaccgtctcggcagagtcgggtgaaaatgcgtcattttccggcaggttatcctcatcttcgagacgatattgctcgtcctgagccgtagcttgttcgactaaatcaggattaatcccgcgcttgacctccacgcccaggccgcgaaaggcctccgcctgggccagcagattaccacgcccggaagcgagctttttcatcgcctggcgatagctctcttgcgccttatccaggctctggccgatggcggacatatcatccacaaacaggcgcattttgtcgtaaaggcgccccgcccgctcggcaatcttttgcgcgttacgactctggtgctcatagcgccacagattggcgatagtgcgcagggctaccagcagcgtcgtcgggctaaccagcataatattattttgcagcgcctcgctgatgagctcaggctggcgatcgatggccagcaggaacgccggctcaacgggaataaacatcagcacatagtcgagcgagcgcaggccaggcagctgttgataatccttgcgtcccagcaggcgaatatggttacgcaccgaggcaaggtgttcctgcagcgcgacttcgcgggtgtagtcgtcttcggcgttgaaatagcgctcataggcgaccagggtcattttggcgtcgatcaccacgtccttaccctgcggcaggcgcacgataacgtccggctgcatccgcgagcggttgtcggtctcaatactgacctgagtctggtactcatagccttcgcgcaggccggaggcctccagcacgcgggttaagaccacttccccccagttgccctgagttttgttatcccccttcagcgctttggtcaggttcagcgcctcctgtgccatctgcgcgttcaactgctgcagattgcggatctcatgcgccagggtatgtctttcacgcgcctcctggccaaagctctcctgcacctggcggcggaacccgtccagctgttcgcgtagcggcgtcagcaggccatgcaggctctggcggttttgctcatcgacccgccggttgctgtgttcgaaaatacggttggcgaggttttcaaactgctcgctaaggcgctgctcgctgttcatcatctggcggatcttatcttccgcatgcagctgggtggattcgagccgggtggtgacctcacggagatcggcctcgagcgaggtattgatatcccgtaggctgcgcagctcgttgttcagcagctcacactcctcacgccagtgggcctcctgcgccagttgctggcgggcggcgctcagctcaatatccaactctcgccgttcctcgatgagatcggcccgaatttgatcggcgcgcgctttggtcgccagccagccgaccattaacccggctgccagtgcgataaccgcgctgataataatggagagatccacgacgccccctgcgataacctgatgacacaaaatagaattgtgctgtacaaacgtccagtttaaaaggaatttcctgcgagaggcgacgcaaaaaagaaaggccggaggatccggcctgacagggaaagtgttgagttacagcagacgacgcgccgcttccacgacgattttcaccgcgtggctttcggtttgcttcatggtttcggcgttagggatctcttgctgggtacggttcacgataaccccagccaccatcccggcgcgcaggccctggctggcgcacatggtcagcagcgtggcggattccatttcatagttcatcacgcccattgcctgccactcttccattgagcccttgaagcggctcacgacgcggccggagaaggtgtcgtaacgctcctggcccgggtagaaggtatccgaggaagcggttacgccgatatgggtggtggcgccgattgatttcgccgcttccaccagcgcggtggtgcaggcgaagtctgcgacggccgggaattccatcggcgcgaagtgcaggctggcgccgtccagacgaacggaggcggtagtcaccaacacatcgccaacgttgatgtgcggttgaatcgcacctgtggtgccgatacgcaggaaggtacgcacccccagctgcgccagctcttccacggcgatggaagtcgacgggccgccgatgccggtagagcagacgatcactggtttgccgtccagctccgcgcgccaggaggtaaattcgcggtgagatgccagtttaaccggcttatccatcagcgcggcgatcttttccacacgctccggatcgccagggacgatagccagcgtagccccttgtaaatcgttcttggtgaggccgagatgaaaaacatcagacttggacataaaaaactcctctgtgggtcgaattatcagcagaagcaaaacggtactgtacagaagcccctggcaacattttgtgatgatagtcaccaagaccaataatagttgcagttgtttttcagtaaatagtgatacacatcacattaacaagttatattcatcatcacagaacaaaagatagccgctttcaggcactgtgctttattaccgcccgaactaaaggtaaagggtctatagttactgatgcgctaataaataagggtacggagaataccatgaccaccaccaagcaacctggattcgcacctgcagcttcaccacacgccgcaaccgccgttcatacgccggaagagcatattatcgccggagagacgtcgattccctctcagggtgaaaacatgccggcctaccacgcccgcccgaaaaatgccgacggtccgctgccgatcgttatcgtggtacaggaaattttcggcgtgcatgaacatattcgcgatctttgtcgccgcctggcacaggaaggctatctggctatcgcgcctgaattgtacttccgtcagggcgatccgaatgagtaccacgatatcccgaccctgttcaaagagctggtcagcaaggtgccggacgcgcaggtgctggcggatctcgaccacgtcgccagctgggcggcgcgccacggcggcgatgcccatcgtctgctgatcaccggcttctgctggggcggacgcattacctggctgtatgccgcgcataacccgcagcttaaagcggcagtggcctggtacggtaagctggtgggagaaaaatcactgaattcgccgaagcacccggtagatatcgccgtcgatctcaacgccccggtgcttggtctgtacggcgctaaagacgccagcattccgcaggacaccgtcgagactatgcgtcaggcgctgcgggcagccaacgccacggcggaaatcgtggtctatcccgaagccgatcatgcctttaacgccgactatcgcgccagctatcatgaagagtcagccaaagacggctggcagcggatgctcgcctggtttgctcagtatggcggtaaaaaagggtaatcgccctaagcatgaaaaaaggaggcaaatgcctcctttttgatttttcgcgtaacgattaggcggactggcgcagatttcgcgccgcttgcaccatattcgccagcgcggcgcgggtttccggccagccgcgagttttcaggccgcagtccgggttaacccacagtcgctccaccgggatacgctgcgcagctttcttcagcagcgcttcgatccactccacgctcggcacgtttggcgagtgaatatcatatactcccggcccgatctcattggggtactcgaacgcttcgaacgactccagcagctccatatcggaccgcgaggtttcaatggtgatcacgtcagcgtccagcgcggcaatggagtccatgatgtcattgaactcgcaatagcacatgtgagtatggatctgcgtgtcgtctttggcgaccgcagcattaaggcggaaggcttccacaccccactgcagataggcatcccagtcgctgcgcttcagcggtaacccttcgcgcagcgccggctcatcaatctggatgatgccgatccccgccgcctccagatccgccacttcatcacgcagggccagcgcaatctgtttcgcgatggtttcacggctgacatcctcccgcgggaaggaccagcacagaatggtcaccggtccagtgagcatccctttcaccggcttgtcggtcagcgactgcgcatacttcgcccagtcgacggtgatcgcctgcggacggctgacgtcgccgatcaccaccggcggcttcacgcagcgggaaccatagctctgcacccagccgttttgcgtgaagataaaaccgtccagatgttcgccgaagtattccaccatgtcgttccgctcggcctccccgtgcaccagtacgtctaaacctaaccgctcctgctcgacgatcgcctgcttaatatgttccgcaatccccgtccgataatgactggcgtcaaggttaccctttttgaagtccaggcgcaggccgcggatctcggtcgtttgcgggaatgacccgatggtggtggtcggccatttcggcaggttaaagcgctggcgctgtgcctgcgcgcgaacctcataggggctggcgcgctggctgtcctgagcagtgatcgccgccagccgtttttccacctccgcgttgtgcacgcgggtcgaatggcgacgggcctggattggcgcgctccactcggtaatcgccgctgtatcgccgctgttcagcgcatcgcgcagcagcgccagctcaccgcatttctgcagcgcgaaggcaaaccagctcttcacttccgcatcaaggcgcgtctccacgcttagatcgatcgggctatgcagcagagagcaggatgacgcgacccatagctcgcgcttaccgacgaggtctttaatttgcgcatacttttcggtgagatcggcgcgccagacgttacgcccattgatcaagcccgcggacagcagccagtcggccggcaggcggttgtgcagttcggcaacatcatctttgccgtgcaccagatcgacgtgcagcccctggaccggtagcgcagcaatggtcgcgcgattgtcgctaacgccttcaaaataggtagtcagcagcagcttcacctggccctgcagggcgtcataagccggttgaaaggcctccagccacgctggcggcagctccagcaccagcgccggttcatcaatctgcacccaatcgatgccgcgcttcgccagttcggccagcacctgctggtaaaccggcaggatggtattcagcagggtcaggcggtcaaacggttcacctttcactttacccagccacagataggttaccggccccagcagcacgggcttgatcttgtggcccagcgccagcgcttcgtctacttcatccagcagttgggtccagctcagtttgaactgctggcccttcacgaactccggcaccatatagtgatagttggtgttgaaccatttggtcatttccgcagcggcggccggttcgccagtcggcgcgcggccgcggccaatgcggaacagggtatcgatgtcgatggatccgtctttgttctgatgacgagccggcacgttgccaagcagcaggctggtagtcagaacatggtcgtaccaggcgaaatcccccaccggcagcagatcaacgcccgcctgtttctgctgctcccagtgacgggcgcgcagctcacggcctaccgccagcagttcctcgcgagtggcgttgcccgcccagtagctctcttgcgcttttttcagctcgcggcgcaggccaacgcgaggaaaaccgagggtgtggttaataattgtcatttatgttcctctcttatttcattgaatctgaagaaaaaatctcaatagttcggcttgcaggaaggcggcaacgatgcgcatccccaggagcttactgaaggaagtgactggggtaagcaaggcagccaacgcatctgcaagtcgaaatatgacgagttttagacgtccagatgtttacacatccataattgacagttactgtatattcctcaagcgcaaattgctcatggcgaagtgaaggactttcatgatcgaaattaaacatctgaaaacgctgcaagcgttgcggaacagcggttcactggcgggtgcggcagcggccctgcaccagacccagtccgccttgtctcaccagttcagcgatctggaacagcgccttggctttcgtctctttgtgcgtaagagccagccgctgcgttttacgcctcagggggaaatcctcttacagctggccaaccaggtgctgccgcagatcgctcgcgccctgcaggactgtaacgaaccacagcagacccggctgaggctggctatcgaatgtcacagctgtattcagtggctgacgccggcgctggagaatttccgcgcccgctggccacatgtggaggtcgacttccattccggcgtcaccttcgacccacagcctgcgctgcagcagggtgaactggatctggtgatgacctccgatattctgccgcgcagcggcctgcactactcgccgatgtttgattttgaggtgcgtctggtgctggcgcccgagcatccgttagctatgaagacgctggttaccccggaggatctggccgcggaaacgctgttgatttatcccgtgcagcgcgggcgcctcgatatctggcgccacttcctgcagccggccggcatcagcccgcagctgaaaagcgtcgataacacgctgttgttgatccagatggtggctgcccggatgggcatcgccgcgctgccgcactgggtggtggaaagctttgaacgccagggcctggtggtcaccaaaaccctgggtgagggattatggagccggttgtacgcggccgttcgcgatggcgaacagcgtcaaccggtcaccgaagcgtttattcgctctgcgcggaaccacgcctgcgatcatctgccgtttgtccggagtgcggagcgacccagcggcgatggacccacagcgaggccaggatcaccaacgctccgctaataaagctcggccagtgcggctgctcctgccagatggcaaggttaaccagcagcccggcggggacatggacgttattcatgatccccagcgtgccggcatccacctgggtggcgccatagttccacataaagtaacccagcccggaagccaccacgccgagccacaccagcacgctccactgcagcgtggtggtcggcagcttctgggcgttgccgagcataaaccacgccgccaccgccacgataaaggccccgacatagaaccaggcaaaggcattgtgctgcggcatcggacgcacctccatcagacgcttataccccaccataccgatggcgaagcagaggtttgacagctgtaccagtaacagcccggtccagaaatgatcgctgactttgtcatagcggataatcgccgcccccagcaccgccagcgcggcactcagcagatagccccagcgcagcttacgtccgctgagcaggtcgtagatcagtgtgatatacaggggagtaaacacggtaaacagcagaaattccgagaccgtcagatagagataggcgcggaaagccagcaggtacatgatgcctagctgcatcgcgcccaccagcatatagagcacgatcgtgcgcggcgactggccgcgcgtgcgcaggaaaggcaggaacaccagcgccgccaggcccacgcgcatcagcaccgaaaaatagctgtcgacgctaccggccaggtattcgccaatcaggctaaaagaaaaggcccacaggatagtggtgataattaacagcgccacaatggtcgtctcgttggataaagaacaggcattgtagcgaagagtcaggttgacgactggacacttattcgccagtcgtcaatctttttcagtcgaggtatagcttacgcaggtagtgcgggacagcatcgtcggcgttactgccgatcacttccagttccggatgcagatccttcagccgctggtgggcgttggccatgatgcagcctttgccagccatcgacagcatctcagcgtcgttcataccgtcgccgaaggcgatgcaatcggaaagagtgtagccgagcatcttcgccaccgcctccagcgcatgccccttcgatcccccacccgccataacttccaggcaggttaaggtggagaagctgacgttcacccgatcgccccagcgggcgttcatcgcctgctccagcggcagcagatgctcatgatcctcgcaggtaaagaatactttgctgatcccctgcggatccagttcgcccggctcatacagcttgtagttaaacaccgcctccttgaagaagcgcatctcttccggacgatggcggttcatataccactcgtcttcccgataaacgttagtgacgattttcgggtcgttacgcacgatctcaaacaggtcggcggcaatatcgcgatcgaggttatgggcaaagatttgctgaccatcgctatcgtgaacgcgggcgccgttagaggtgatcatgtacgaccggatgccgagattatcgcggatttgcccgacgtcgatgtagtgacggccggtggcgaagacgaaattgatcccacgggcggtaagcagctttagcgtctctttggcatacggggtcaggaaatgatcgggggaaagcagcgtgccgtctaaatcagacgcaacaacctggtacataaaaaagttaacctctaagcagggcgacgagcgttatcgtcggattaagtatgtcgattgaaaaactcgacgatggcattgagcgcgactgagcgcatagcgtccttttcaaaaaggatctcatgatatgccccttcaatgacgagcggtttaccgccctcacaaggatggccggcagcggcccgtaattcgcaatagcggtcgtgcatcagattatcgaccacccgctcctcctccgcctgtaaaagcagcgtcggggcggtatctttttccacattcgccagcacttcgtcgccggccagcatgccctcacgcacccagtgccaggtcggaccgccgacctgcagccgcggctcatcggcatagaagcgcaggttgcgacgatagcgttgccgactgtgcgtcagcacgttaacggcaaaaggcagcgcccgccagcgcccggtgccgatggcatactcttcgcgaatgcgctgatggccctcagcccagtcgagaatatggcgcaccatccagtccggcagccgaatgataatcccgaacatcggcgcgcagagcgctattgcatcgcaatgcgcccggtaacgttgcagaaaaagcgtggcaatcgctccgcccatagaatgagcaaggataaaccgttttcgccagtgtccaggaaccacctgctgctgccagagcgcggccaggtcatcaacatagtcgctgaagttaaccacgtgtccgcggtgggtatctgagagcaggcggcccgagcgtccctgcccgcgatggtcaatgatcatcacgtcaaagccgcagtgaaagagatcgtaggccacttcagcatacttcacgtagctttcaatgcgcccggggcaaatcaacaccagacgatcgttatgttgcgcgcaaaagcggacaaagcgtaccggtacatcgtcgacgcctttaaattcagcttcttcgcgctgtcgccagaaatccgtcagcggccccatgctaaaggccgcaaacgcgttttctcgtgtttcccagtcctttttctgcccaaacatcgggtttacacccctgttaaccgctgaaaatcgtttttttaccgtgtatcacacaatgctgacacaatagcgtattgtggcataaaaacagacaatcagggagtttctcatgaccattgagtggtggttcgcctacctgctgacatcaattattctcagcctgtcgccgggttccggagcgattaataccatgaccacttccattaaccacggataccgcggcgcggcggcgtcgattgccggtttgcagaccgggctggccattcatatcgtgctggttggcgttggtctcggcactctcttctcccgctcggtgctggcctttgaggtgctaaaatgggccggcgccgcctacctgatctggctgggtatccagcaatggcgggcggcaggggcgatcgacctgaatacgctggcgaaggcgcagacgcgcggcaaactgttccagcgcgcggtgttcgtaaatctcaccaatcccaaaagcattgtttttctggccgccctttttccgcagtttatcctgccgcaccagccgcaggtgatgcaatatctcgttctgggcgtcaccaccatcgtcgtcgatatcattgtgatgattggctatgcgaccctggcgcagcgcatttccgcatggatcaaagggccaaagcagatgaaggcgttgaacaaagtctttggttcactgtttatgctggtcggggcgctgctcgcctccgcccgccatgcctgaatcatggaatctcgctcgcaaagagaggttcgcgaggtgaacgacgctttctctctgcgcgagccggcgcgcaaagtgggtaattaattttattgcccgctgtcggcgctgaacccgccgtgccaggatgccgccagatacgtgattcatggatgaacggcaatggcggaaacggcgacccctcatgatgcggtatttaaaacttttctctcacgggtagagacggcgcgcgattttatcgagctccacctgcctccgtcgttaacacagatctgcaaactggacaccctgcgtctggaatccggcagctttcttgaagacgatctcaggccttactacagcgatatcctatattcgctggaaaccacccgcggtgcgggctatgtccatgttctgatcgagcaccagagcgcacccgataagctgatggcctttcgcttaatgcgctatgccatcgccgccatgcagcggcacctggagagcggccataaaacgctgcctctggttatccctattctcttctatcagggacgacgcagcccctatccctggtcgatgcgctggctggataattttgccgatcctgagaccgccagccagctctatagcggggcgtttccgctggtcgatatcacggtgatccccgacgacgacatcatgcagcaccgcagcatggcagccctgacgctggtgcaaaagcacatccgccagcgcgatatggcgcaattgctggataagttgacccacctcttaatgctggagcagatgagcggacaacaaatcaccgtattggtaaactatatggctcaggcaggggatgccgaagatactcggacactcttgtacgggctggcacagcgcgtgccgcagcatggaggattactgatgacgctggcggaaacatggcttgcagaaggtatggagaaaggcgtacagcagggcataaaagaaggtaaacaccaggctctggtgcaggttgccgaagcgatgcgcagtcgcggtattgatgaccaggcgattatggaaatgaccggtctgtctgaagacgagctgcagcggcttcgccactgatactttcccacccggaaacaaccgggtgggaaacagcatgccggttaacgcgagataatcaggtggatgccgaagcccgcaaacagcgtaccggcgataccgtcgatccacttcgccatccgctgatagccgcggcgcatcccgggcagggcgaacaggctggcaaccaccataaaccaggccagcgtctcaacgataatcagcaggaaaatgccccagcgcgcgccggcgccgacgctgtcacccacgaacagcgaaaacaccgagccgaagtagataatcgctttcggattcgccagattggtcagcaatcccttcacgaagctgcgtccgctgcgggccagctccacctgcggctccgccgaggccaccttctcttttttcagcgcgccacgcagcatctggtagcccatccagcatagatacaggcccccgccgaccattataatgttatgcagccacgccatccgggcgaggatcaggttcaggccgagcagcgccactcccgcccagaccatgacgccgcaggtgatccccagcacacccatcatcgcctctctgcgcgagcggctgatggccgtttgtgagacaaagaaaaagtccggccccgggctcatcagcgcaatgatatgcaccagcgccacggtgaggaaaagcatcagcatagttaactcgcaggaaaataatgaagagagaaactattctggcactttttcagccagctgactactcatcgtcgccatcaacatgcgcccgaatcagcgccataaacggcttcccgaaacgctcgagcttgcgtgtccccacgccgttgacgctgagcatttcgccggcggtcagcggcgattgttcggccatctcgataagcgtcgcgtcgttgaagaccacatatggcgggatgttctcttcgtcggcgatcgctttacgtaatttgcgcagcttggcgaacagtttacggtcgtaattgccgccaaaggatttctgcatcgcctttggcttcagcgccacgatacgcggcacggcgagctgcagcggcacttcgccacgcagcaccggtcgcgcggcttcggtcagctgcagcgcggagtgctgggcgatattctgcgtcaccagcccaaggtggatcagctggcggatcacgctcacccagtgctcgtgactttgctcccggccgataccgtaaaccggcagcttatcgtggcccatctctcggatgcgctggttgttggccccgcgcaggacctccaccacgtaacccattccgaagcgttgattgacccggtaaatcgttgaaagcgccttgcgggcgtccattaagccatcgtactgctttggcgggtcaagacagatatcgcagttgccgcacggctcctgacgcccttcgccaaaatagttcagcagcaccagacggcgacaggtctgcgcttcggcaaacgcccccatcgcattcagcttatgccgttcgatatcctgtagcggcccggcgggtttttcttccagacagcggcgcagccacgccatatccgccggatcgtaaaacagcatcgcttccgccggcaggccatcacgcccggcgcggccggtctcctgatagtaggattcaatattgcgcggaatatcaaaatgcaccacaaagcggacgttcggcttgttaatgcccatcccgaaggccaccgtcgccaccacgatctgcagatcgtcgcgctggaatttctcctgcacctcggcgcgcacgtcgttttccagaccggcatggtaagccgccgcgctaataccgcggctttgcagcctggcggcggtgtcttccactttcgaacggctgttgcagtagataatgcccgatttgccgcgctgatcctgaacgtagcgcatcagctgatcgagcggcttaaatttctccatcagcatatagcggatgtttggccggtcgaagctactgacctgaatcagcggatcgttaagccccagcaggcggacgatatcgcggcgggtggtgtcatcggcggtggcggtcaacgccataaacgggatctgcggcatccgctgacgcagctggcccagcgcggcatattccggacggaagtcatggccccactgcgagatacagtgcgcttcgtctaccgccagcatcgccagattccagttcgccagatgctcaagaaagttatccagcatcagccgttccggcgcgatatacagcagacgaacctgcccgctgcggcagccggccatcacctcctgctgctgctcgcggctttgcgtcgagttcagacaagccgccgccacgccgttggccagcagctgatcgacctggtccttcatcagcgagatcagcggtgagaccacgaccgtcagaccgcccatgaccagcgccggcacctgatagcacagcgacttgccgccaccggtcggcatgaccaccaggcagtcccggccttcgagcgccgtctcgataatcgtttcctggccaggacggaactgctggtagccgaaggtctcttgtaaaacctgcttagccagcgattcctgatttaatacttccgcctgtgccacgttgaccccatttgcctgaaaagaaaacaggcgctattttcagcgcctgcgagccagagtgcaacgattaaaacagatcgttgagcattagcccgacgccgacgcgcgtttggttaaagttatagtcgataagcgactcgccatagccgctgtagatctgcgtataggcgcgaacatgtttggtaatgggatagctcacgccaagttccgccccgccgtagccggtgttccagttgtattgcccctgcgcgctgaggatcgcctctcccagctggtagcccaccttcagccggtaatagcccatatatttggtgatatccgggttatcatcggtgttgcccaccacataccagggcttcacttccaccagccagttaccgttttgcgccatcaggcgggcataaagccgattccagctgcgcgaggtggggtcggaacgcccattcgagtcgtggttataccccatctcgatatcgcgcagcgtccagccggcaaactggtagtcggtcgcaaagcccaaaaacagctggggttcataattggtttcgcgaaacggcgccgactctttgctgttagagagctgccaccaggatttctgggtataggacgcgcccagcagcgaattatcgcccaggataccgcgccacagcgggaacgccaggcttagctgaaacttcacttcatctttacgggcattttcggcccagtcatagctgcggatcgcctctttattgaggtcgctggtccacgtatagagcagatagttgctctcataagggtagagcaggaaaggattatcatggtcctggagcaggttggcgataatgctgccgcgcactgccggtttgtcgtgtaccgacgcgtcctgcgccataacaccggccggtagcgcgcacagcgccaccaggcaggccaaagagatacgcatgctggtctcctgaaaaatagtttttatttttgtttaacctgaagccattctacctgtttattaatcacctgccccctaatccgctccgaaagtggaaatcaatattttagaagcataaaatcaacattttattaacgaatggaaccggtgttatgtctgaacttactgccgaagcagccctgaaactggtaggggagattttcgtctatcacatgccgtttaaccgcgccctcggtctcgaactggaacgctacgaaaaagcgtttgcccagcttagctttaataatcagccgatgatggtcggcaactgggcgcaaagcattctgcatggcggggtgatcgcctccgcgctggacgttgccgctggcctggtctgcgtcggcagtacccttacccgccatgacaccatcaacgaagaagagttgcgccaacggctttcccgtatgggaaccatcgacctgcgcgtggactacctgcgtccgggccgcggcgaacgttttaccgccaccagcaccctgctgcgcgccggcaataaagtggcggttgcccgcgtggaactgcataacgaagctcaggtctatattgccagcgcaacggccacctatatggtgggttgattggccaaaatcgagtaacatcactctctttggcaatggattttaccgatggatgcgaaacagacgcggttggggatcattctggccctcgccgcctactttatctggggtatcgcgccagcgtacttcaaacttatctactatgttcccgccgatgaaattttgacccatcgcgtgatctggtctttcttcttcatggtggcgctcatcagcgtcagccgccagtggccacaggtgaaaaagctgctgaaaacgccgcgcaagatcttcctgctggcgctctcggcagtgctggtcggcggtaactggctgttgttcatctgggcggtgaataaccaccatatgctggaagccagcctcggctactttatcaacccgctggtgaatattttgttggggatgattttcctcggcgaacgctttcgtcgtctgcagtggctggcggtgatcctcgccttttgcggcgtgctggtccagctgtggacctttggttcgctgccgataatcggtcttgggctggctttcagttttgccttttacggcctggtgcgaaagaaaattgctgtcgatgcgcaaaccggcatgctggtggaaacgctgtggctgctgccggtggcggcaatctggttgttcggcatcaccgacagcccgaccagccatatgggcgagaacccctggtcgctcaatctgctgctgatggccgcgggcgtggtgaccaccatccctttgctgtgctttaccggggcggcaacgcgtctgcggctctccacgctgggctttttccagtacatcggtccaacgctgatgttcctgctggcggtgacattctacggcgaagtgccgggcaaggataaaatggtgacctttggctttatctgggtcgcgctggcggtgtttatcgtcgatgcgctgtatacccaacgccggttgcgcagaggctaagcctgcatcagccagtaaagaagggagccgacgctccctttttttacagccagtttttacgcttgaagtagagatatggcgccaggccggccaacatcataaacacgatggctcccggataaccaaagctccaatgcagctccggcataaattcaaagttcatcccgtagctggaggccaccagagttggcggcaggaataccaccgagaccaccgagaagatcttgataatgcggttctgctcgatattgataaaacccatcgccgcctgcatcaggaagttcaccttctggaacagcgattcgttgtgcggcagcagagattcgatatcgcgcaggatctcccgcgcctgctccagctggcccgccggcaggcgcgccttgcgcacgaggaagttcagcgcgcgctgggtatccatcagacagaggcgcaccttccagccgatatcttccagttccgccagcgtcgacagcgcttcgtcgtactcgtcgccctgatggccttccataatgacgcggctcagcttttccaggtcgctgtagatgttttcaatttcatccgccagctgctcgattttggtctcgaacaggtcgagcagcagttcgtaggcgttgccgtcgaccagcgtctggttacgcacgcgcatacggtagaggcggaaagcgggtagttcgcgctcgcgcagcgtgaacaggcggccttcgcggatggtaaacgccacggtagagttgccggcgtgatcgtcggcatcttcaaaaaagaagaacgagtggatgtgtaacccgtcttcatcttcaaagaaacgcgcggaggcttcgatatcttccagttccgggcgcgtcgccaggttttgacccagttccgtctgcacgcggcttcgctcatcgtcgtcaggctcgaccagatcgacccacaccgagctggcgaggtgtttgatctcatcggcttccaggcgcgttaaacgattgttttccagttgaaatgcgctcagcatgaccgggactcccaatgcaaaaaaattatcggacagttcggtgggcacacagaaacaaattgggtttcagaccattaagcctgactcagcgcgacgggaatggggcaggtcgctgacaaccgctaaggctatcagcataagaggatagccttaggagttgttcctgaatgacaggaagttgagccagcatctactgggtgtgtccaaggcgaatgtcctcttagcgtaatcgtgcgcgcatgttacgccagcgcaaaatcggcgtcaacacgcaacggaacgcgaaagcgcaaatcaggcgccttaacgtataaaggtagcagaatattacaaaataatgatatttttcttaaagttacactgcctccagccgggcgtaagccgccaccagccatttgattccctggccctgaaaagccacctgcagtcggctgtgctcgccgctgccttcgaggttgacaatagtgccttcgccaaacttcggatgccgtacgcgctggcctaacttgtagccggtatcgctctcggcaatcggcgcgcccagtcgctgatggtttaccgggcggctcaccgtggctcgcagacgcacttcttctacgcactcctgcggcagctcgccgataaagcgcgacgggcggtgataaacctctttcccgtacagacggcgggtttccgcataggtcagcgtcagcttctgcatggcgcgcgttacgccgacgtaggccaggcgacgctcctcctccaggcggccgccttcatcaagggccatctggctcgggaacatcccttcttcgacgccgacgatgaacacctgcgggaactccagccctttcgccgagtgcagggtcatcagctgaaccgcgtcctgccaggtgtccgcctgcccctcgcccgcttccagcgcggcgtgggagaggaacgcctgcagcggcatcagatcttcatcttcttcgttgtagctgaactggcgcgtcgccgtcaccagctcctctaagttttcaatacgggtctggcccttctcgcctttctcctgctcgtacatcgcgcgcaggccggagtctttaatcacccgatcggtctgaacgtgcagcggcatatcggtggtctcctgcgccagcgcgtcaatcagctccataaagcgctgcagggcgctggcggcgcgaccggccagcgctttttctttcaatagctcacgactggcctgccacagcgtcagctggcgatcgcgcgacgtctggcgcaccacgtccagcgtgcggtcgccaatgccgcgggtcggcgtattaaccactcgctcgaacgccgcgtcgtcgttgcggttggcgataaggcgcaggtaagagagcgcgtctttgatttcctgacgctcgaagaagcgcatgccgccgtagatacggtacggcatgctggcctgcaggagggcctcttccagcacgcgcgactgggcgttactgcgatagagaatggcgcattgctccagcgcgccgccgttctcctgccaggttttaattcggttcaccacaaagcgcgcttcgtcgagatcgttgaaggcgcagtacagcgaaatcggctcgccgtcggcgccgtcggtccacagctttttgcccaggcgcccgttgttgttttcaatcagggcgttggcagcgctgagaatattgctggtcgagcgatagttctgctccaggcggatggtttccgcgccggggaagtcgttaaggaagcgctgaatgttctcgacctgcgcgccgcgccagccatagatagactgatcgtcatcgccgacgatcatcaccttgccggtatcgcccgccagcaggcggatccaggcgtactgaatgttgttggtatcctggaattcatcgacaaggatattggtgaagcgctcgcggtagtgctgcaggatatgcggtttgttcagccacagctcatgggcgcgcagcagcagctcggcgaagtccaccagcccggcgcggtcgcaggcttcctgataggcctgatagaccttctgccaggtctgctcgaccgggttgccgtagctctgaatatgatgcgggcgcagcccttcatctttctggctgttgatgtaccacatcgcctggcgcggcggccactgtttctcatcgaggttcatcgccttaatcagacgcttcagcagacgcagctggtcttcgctgtcaaggatttggaagtcctgcggcaggttggcatccagatggtgcgcgcgcagcaaacggtgcgccaggccgtggaaggtgcccacccacatgccgccctgggtggtgcccatcaactggccgatacggtgacgcatctccgccgccgctttgttggtaaaggtcaccgccataatggaatacggggaacagttctccacgctcagcagccaggcgatacggtgcaccagaacgcgcgtcttaccactgcccgcccctgccagaaccagcatattggtgcgcgaggccgctacggcttcacgctgtttgtcattaaggctgtcgagcaggtaagaaacgtccattggcaccgccggaagagaaggggttccacgaacccctgttaatatatacagagtgactggtgattatatcagcgaggtcagagatgccaaccgtgaaatttcaatatgcggcagcaggcggctgtccgcggtgtgcatcaggtccgcgccttgcggtttgatccagcaggcctgcatcccacagcgaatagcgccggccacgtcggtggtcagatcatcgccgacgtgcagaatctgcccgagcggcacattcagacgctccgccgcaaggtggtacatgtcggcaaacggcttggagcggccatccggcccggcgcgcagcacgaagcggaaatagtcgctcagaccgaacagttccgggcgggcgttgccattggtaatcgccaccagcggccacttcttcgccagcttcgccagcgtatcgtgcgtttcctgcgggacatcgacgcggctgcgccagtgagcgaagtgttccatcgccgcatcggcccccgctttcgccgcttcggcggagagcccggcattacgcatacctaactccagcgcacggtggcgccagacggtcacgtcatgataaatctcaggttcagcagccagcagcgtctgacgcagctgattaagctcatgggcgtcgagctggctgagcgaaggatggtagctgcgcacaaaggccagcgactcgtgcatcgtccggtcaatcaccgggcggttatcgtaaagggtatcgtccaggtcaaacgtcagcgcggaaatctggcccagaggtcggtaaaaacgcattatttcccccgtttagcgcgcggatgcgcggcatcgtacaccgaggcaaggtgttgaaaatcaagatgggtatagatttgggtggtggagaggttagcatgccccagcagctcctgcacgccgcgcagatcgccgctcgactccagcatatgggtggcaaaggagtggcgcagcttgtgcgggtgcacatggctgttcagcccctgcttaatgccccactcggcgaatcgcttctgtacgttgcgcgccgaaatacgtttgcccagcttcgacaaaaacagcgcgtcgtcgtcggtaccgaacaggccgcgcaaatccagccagtgctcaatccatgccaccgcgttgcgaccgatcggcaaacgacgctccttgctgcctttgcccatcacccagacctcaccgctttcgagatcgaggtgtttgatatccaggttgaccagttcggacaaacgcaatcccgcgccgtacatcacctccagcatcgcccgatcgcgcaccgccagcggatcgttgagatcgatatccagcagtcgattgacgtcatcgacgtcaatattttttggcaggtggcggggaattttcggcgcggcaatccccttcgccggattggcgctgagctcgccctgaccgaccagccagtcgaagaaactgcgcagcgccgacaggcgaagcgccaggcttgccgggcctaaccccgcgcggcgactacgcaccgcaaagcttcgcacctgagcggcatcgcactgcgaccagcttttcaggcccgcctcatccgccagggcgatcagcgcgtccagctgtcgctggtaattcagtaacgtgatcgggctgagctggcgttcaacgccaagatggcgaagaaagcgggcgacggcggagaagagaggagaatcggtcatgcgcgttcaatccagcgctccagcaggccgggcagcatctgggcaatctcctgcaacagctgcgtcccctgccctggctgataatgctgcgcatcgcggctgctgaagagcatcacccccggggcattatcgccccccagcagcgatatcgccacagacccaatggccttcgcctccggcagcaccaccagcagctccgggccgttcagcggtccaagatagtggcgcgcctggcccagacgttgaatacggatcggctcaaacgcctgccggtttaatgccagatgggtaaacttcgagggcgcgccgaggcgccagcagtcaggaaacaggcgcaccgtggcgcccgccagccccagctcgcgtgcccagcggtgaaggcggttgagcatatcgtcaaggctctccgccgccgccagccgcgtttgcagctgcagcaggcgctggaacaggctttcattagcgaccgcctgctccatcagcagcgacatattttcttccagcacatgaatatggttacgcgcccgcatcatgtgccactccaccagcgaaatcgtaccgcgtaccggatgcgggacgcggagatgttcgacctgggcggcattacgaataaaaaattcaggatgttgcaacagatagtccaccactgcgcgatcgttcaacgcgctggcaacctcctgctgttcttccccgattggtttcataaatgaataaatccatcatagacatgggccgccgggccggtcataaacagcggctggcccgggcctttccaggcgatatcaagacgaccgccgggtaattccacgcgtaccgtttccgccagcagcccctgctggatccccaccgccaccgcggcgcaggcgccgctgccgcaggcctgggtttcccccgcgccgcgttcgtagacgcgcagacggatatgagaccgcccgaccacctgcataaagccgatattggcgcgctccggaaaacgctcatggctttccatcaccgggccgagagtttccaccgctgccgtatccacatcatcaacctggatgacgcagtgcggatttcccatggacaccacgccgcacaatactgtctgctcggcggcacgcatgatataggtcttttccgctttgttggcgcggaacggcacctgggacggctcgaagttgggctcgcccatgttcacccgcaccagatcgtcttccgttacgcttaataccatacgcccgttggccgtactcacgcggatatcacgtttattggtcaggcctttcagccggacgaagcgggcaaaacagcgcgcgccgttgccgcactgcgacacttcgctgccgtcggcgttaaagatccggtagtggaaatccagatccggatcgtagggcggttcgacgaccaatagctgatcgaacccgacgccaaggtggcgatccgccaggcggcgaatcagctccggcgagaaaaaaacattctgcgttaccgcgtcaacgaccataaaatcgttgccaaggccatgcattttagagaactgcatcatctactccagttgcgcggaacagaacgttatcgttagtaattgacctggctcggaccaccggtatcgccacgatcgttacgatccggcgttgcgctctgaatgccagggttaaccggtttggtcggcggcggcgcggttttgtccgccggtgggaaatagagaggccctttcagaccgcagccggtcaggctgaagatcgcaaacaaaacggcaagcgtaggaaaaacgtttttcattgatagttgcccgtgattcattctttctgctttctatcatcgcaggagaagacgtaaaagcaagcctttagcatccgactgcgcgcgcttttgtttcgcgctatactgcgacccatcttcaaaaatcaaaaaagcagaatcaaattatgaacgacagtgaattccatcgcctggccgatagcctgtggatgaccatcgaagaacgtctggacgactgggacggcgatagcgacatcgactgcgaaatcaacggcggcgtgctgaccatcagctttgaaaacggcagcaaaatcattattaaccgtcaggagccgctgcaccaggtgtggctggccaccaaacagggcggctatcacttcgatctcaaaggcgacgagtggatctgcgatcgcagcggcgaaaccttctgggatctgctggagcaggcggcgagccagcaggccggtgagacggtgaaattccgttaatgacgtgtttcccggatagcggcgcatcgcgccttatccgggctacccgacgacttagaaccgtagccctgctaagcgcagcgccagcagggaatatctgcggatagcggctcacgtcttctccgggccaaatctacgagtagcgctgctgcagcaccggcgaggcggtaacgtcctggctggtgggtatcgcggcggcaatcgcctgagtgcggaaagggatcacctgggtgcgcccgtctacctcgacaatctgatagaactgcggcaggttgaagttgataaagctggagccgtaggtgaaacgatcgtgcgatgacgaatagaagcggctgacgtcgcgcaccagctcctctttactgccctcgcagtgatgatagacctcggcgcggttgctctcatcaagaatatagatgttaaaaccgctgtcgttgttatccgcgtcttcaaagaagaactgaataatcccttcgctggcgaagccatccaccaccgccggcagcttaacgtgattggtttccacctgcaccgacagcccgtgcagcttgttgtgcgagatagcgccgtagaactcaatggcgttttccagcttctgcaccgaaacgttaagccgctcgaagaacagcccccacgtctggccggagacgcgcagcgctttgaagcgcccggtatcctggcgggtactggagagacgcagttcgatacattcggagatcatctgctgcacgcgggtgcggatcaggccgcgcaggtgctggctatagcagaacacctccacgctgtccggcggcgcggcgtcctggtgcattttgccgaggatcgttttcagcgcctcgatcatcgcctgttcgccgttaaagtgcagcgtacgcacttcgttccacgagttgcgatacagcaggtcgacgctgccgatcaggcatttttgctcttcgccgaagctgaaaacatccagtttacggaaatcgaagtgcaccacctggttgcggaaggccgcggttgggtcatattcgaggttgacgataatcgccaggtggcggatttcgcacgggctgtacagcgcctttggcgtcggcgccggcaggcgcagcgggaagtggtgcgacacgtcggccaccatctcctgcagcttcgccagatcgacgatgccgttgcccttaataaacaggcgggtgcgtgaggtcagcaggccgttaaaccaggcccaggccaccagcttattaagataacggttatattccagcggctgatggctgatgatcgattccatgtccggcgcgcggttgtacagataccaaccggtacggttggcgcggcccggcggcacgtggataaaggtcaggttcggttccgaaagatccggcgaaatttgcgggtttaccagcgtcactttccccggcagcgcttcaaaggccgcatacagcttacgggtcagcacgccaatatcctgcgggctggcggagacgctaaggttattgcgccgcgcgaagcggatcagattacgatagctctgcatcatggcgtcgagcagttcgttgtgcgccttgcgcacttcatcgattttccagttggcgcggttgtcgagcatcatcagacgcttttcgtcccagccccaggcattcaccaactggctgacgacttcgcgacgccagccgacgcaggcgcgttcgcggctgagtttttcacaaactttcaggtagaagcagcggcgcaccagatcgaggcgggtttcatcttcgatggcctgcagataggtggtcacgcgctccagcatcatgcagtacgggtcgaggccgaaggagacaatctccccgtcgtgcagacgctgtttgatatctttcgctaacaggcggttattggggtattcccaggagtaggcttccagcagcagcgttttcagcaccgctttatagggggagtcgatacttttatacagctgccataggctggcgccgaagtactcttccgccgacagcgaactgaggccgccgagatcgagccattcgttaggcgtcagcacgccctgggcatacagccccatcacgtaatcatcgtaatgctcctcttcatcgcacggcaccatattccacagaatacgcttgccggcgaggcgcaccgcggtgcggtagaactcatcaagcaacaggatatgctgggtcgaaccgcagtcttcgccgccgaggctaccgctttcgttatgacggaaacggttttcgtcgatcaggaagaagctgacttccacgccgagcgaggcagcccagctctcaagcaggctgcattttcgctgcagcagctgacgctcttcgctatccagccaggcctggtgacatacccagatatcaagatcggaagagcagctctggccgacggaggaagtactgcccatcgagtagacgccggtgatcggcagctcgcctttcggcggctcctgagtctgcataccgcgatgcagttccagttcttcaagatagtggcgttgggtttcatcaggcgtgtagaggcaaatgccacggggaacgttaccgtcaaggtaacccggcatcagcgggtgatgataatgtaataacgttggcagtagactgtaaacctgctggaaagcgggtcccatggcagcaagcgcgcgatccacgcgcaattggttgatggcatccagtctctgtttcagtgtctcaatatagaggtacaagacatatcgcctgatgttcaaaaacccgaggtacaatagtacggaggatttcagtatttcaacaaaaaccgtcaccattcgtcgtcggtgtggttgtgatgagcagcggactgacaaatggtttaaaacgtgatcaatttaacaccttgctcattgaccgtaaagaaagatgcgctacatacaagtgtagcaccgtttattacctgtaaattcctcactacgcctccggcaaccgccacgcgcatgaaaggttaaaaaagagtgggccggagccacctcccacataaaccgtgaaaactaacatccgtaagacaacaatgttaggatggatagtggtcgataatgacggtaacaagcatgttagacaaagttttgaaaattgccacacggcaaagcccgcttgcgctatggcaggcgcagtatgttaaagcgcgcctggaacaagcgcatcccggactgaaggtcgagctggtgccgatggtcacgcgcggggatgtcatccttgatactccgctggcaaaggtggggggcaaaggcttatttgtgaaagagttagagctcgccatgctcgaagggcgcgccgatatcgccgtccattcgatgaaagatgtgccggttgaattcccggagggcctggggctggtgactatctgcgagcgcgacgatccgcgcgacgcgtttgtctccaatcgctatgcctcgattgacgaactgccggccggcagcgtcgttggcacgtcaagtttacgccgtcagtgccagctggccgccacccgtccggacctggcgatccgctctctgcgcggtaacgtcggtacccggctgagtaagctggataacggcgagtacgacgccatcatcctcgccgccgccggcctgaagcgcctgcagctggaagcgcgtattcgccagccgctgtcgcctgagcaatctctgccggcggtcggccagggcgcggtcggcatcgaatgccgtcttgatgatgcatggacccgggggctgttagcgcctctcaaccatacggaaacggcggtgcgcgtgcgcgccgagcgggcgatgaacacccgcctcgaaggcggctgccaggtgccgatcggcagctatgcggaactgaaggacggggaactgtggctgcgggcgctggttggcgctccggatggttcacagctggtgcgcggcgaacgacgcgggccagcggaacaagcggaagccctcggcatctcgctggcggaagagcttctggataatggcgcccgcgagattctcgcggcggtttatgatggagaagccccgcgatgagcatcctggtcactcgtccactaccgcaaggagaagcgctggtcagccgtctgcgggccatgggacgcgtggcctggagctttccgctgatagaatttacgcccggcagggagcttcccgcgctgggcgatgcgcttgcccgactggggcccgacgatctgctatttgcgctatcccagcatgcggtggaattcgcccatgcccgtctgcagcagcagggcctgccctggcccacttctccgcgctattttgccattggccgcacgacggcgctggccctgcatacggtcagtgggcagcatatccattacccgttagatcgggaaattagcgaagtcttgctacaattacctgaattacaaaacattgccgggaaaaatgcgctgatcctacgcggcaatggcgggcgggaactcttaggcgcgacgctgaccgagcgcggcgccagggtcacattttgtgaatgttatcaacgtagtgcaaaacattacgatggcgcagaagaagcgatgcgctggcaatctcgcggagtcaccacgctggtggtcaccagcggcgagatgctgcagcagctatggtcgttaataccgcaatggtatcgcgaacagtggctcctgcactgccgcgttgtcgttgtcagcgaacgtctggcccttcaggcccgggaactgggctggcaggagattcaggttgccgatagcgccgacaacgatgcgctgctacgcgcattacaataactctcaacattggaagccataatgacggaacaacaaaatcaatccgccgtggttgaagagaccagggaggccgtggagaccacaccacagccagagaacactgagaagaagaaggcaggcaataaaaccagcctggcgctcagcgcgatcgctatcgccattgcgatagccgccggcatcggcctgtatggcctgaacaaacaacaggccacgcggcaaaacgcaactacctctgaattagcaagccaggtcgcggcgctgcaaaaagcgcaggaaaatcaaaaaagtgaactggaaggtgttatcaaacagcaggccgaccagctaaacgaagccaaacaccagcaggagacgctggccaaacagttggatgagctgcagcaaaaagtggcggtgatttccggtagcgatgccaaaacctggctgctggcccaggccgacttcctcgtcaagctggcgggacgtaagctgtggagcgatcaggatgtcaccaccgccgccgcgctgctgaaaagcgctgacgccagcctcgccgacatgaacgacccaagcctcatcggcgcccgccgggcgatcaccgacgacatcgccaccctctccgcggtaagccaggtggactatgacggcatgatcctcaaggttaatcagctggcgaatcaaatcgataacctgcggctggccgataataacgatgacgattcgccgatggacgctgatagcgatgagctttccagctctatcagcgaatggcgcgtcaacctgcagaaaagctggcagaactttatggacagctttatcaccgtgcgccgccgcgatgaaacggcggtcccgctgctggcgccgaatcaggatatctatctgcgggaaaatattcgctctcgcctgctggtcgccgcgcaggcagttccgcgccatcaggaagagacctggaaacagtcgctggataacgtctcgacctgggtacgcgcctattatgataccgatgacgccaccaccaaagccttcctcgacgaggtggacaagctcagtcagcaaagcattaccatgacggtgccggaaacgctgcagagtcaggcgttgctggaaaaactgatgcagacccgagtgcgcaacctgatggcgcagcctgccgttaccgcgggcggcgcgccttcgcccgcacctgctgcgccggccgcccccgctgcgccgcaaggagagtaacgcatgctgaaaattcttttactcttcgcactgttgatcgccgggatcgtgctcggcccgatgatcgccgggcatcagggctacgtcctgatccagaccgataattacaatatcgagaccagcgtgaccgggctggtgatcatcctgatcctcgccatggtggtgctgttcgccattgaatggctgctgcgccgcattttccgcaccggggcgcatacgcgcggctggtttgtcggccgtaaacgccgtcgcgcgcgtaagcaaaccgagcaggcgctgcttaagctggcggaaggtgattaccagcaggttgagaagctgatggcgaaaaatgccgatcacgccgaacagccggtggtgaactatctgctggcggcggaagcggcccagcagcgcggcgatgaagcgcgggccaaccagcatctggagcgcgccaccgagctggcgggcgatgacctgatcccggtggaaatcactcgcgttcgcctgcagctggcgcgtaatgaaaatcacgctgcgcgccatggcatcgataagctgctggaaattaccccgcgtcatccggaagtgctgcgcctcgccgaacaggcatacacccgcaccggcgcctggcagtcgctgctggacatcattccgtcgatggcgaaagctaacgtcggcgatgaagcgcaccgcgcggcgctggaacagctggcctggggtggcctgatggataaagcgctggccgatggcggcagcgaaggactacgcgaatggtggcgcaaccagagccgtaaaacgcgggcgctggtgccgctgcaggtagcgatggccgagcgcctcatcgagagcgacgatcacgataccgcgcagcaaattatcattgatggtctgaagaaacagtatgatgaccgtctggtgatgccgatcccgcgtctgaagaccaataacccggaacagctggagaaagtgctgcgccagcagatcaaagccgttggcgaccgtccgctgctgtggagcaccctgggccagtcgctgatgcggcacggcgaatggcaggaggccagcatcgccttccgcgccgcgcttaagcagcgtccggatgcctttgattacgcctggctggcggatgccctggaccgcctgcatcagccggaagaagccgccgctatgcgccgagatggactgctgctgacgctgcagaataatcctcagccataacctggcatggctatcgcctcctgcggggcgatagcccttctcccccgccttcgcattgacggatccctgaaagaaaaaaacgcctgcgctgaaatcagggcaggcgttaaaacaggtctgtttgacaacaaattgggtgcttcactcaacgtaatgtccatggtgtttgatgaggcataaatgcgacatctgtcagtggacgataagcaccgtaagaacggctctgcatcattccggagtttatgaggcacgaaggcgaacataagagatggaatgagcatctacccggttattatcgcacaggatccggggaaattgcatctaccacagtgatgaattgagagttttcctgacgcgtattcttaagcaaagagaagattttttatcagcaagatcagagaaataagagatggcggacggcagcagaaaacaaaaaaccccgccgaagcggggttcaaaattggtcggcgagagaggattcgaacctccgacccactggtcccaaaccagttgcgctaccaagctgcgctactcgccgaaatactgctttttgaatttttagttcaattcgttaaagtcgtggtgcgaggggggggacttgaacccccacgtccgtaagaacactaacacctgaagctagcgcgtctaccaattccgccaccttcgcaaattcacaactctatcaaataatggggtggctaatgggattcgaacccacgacaactggaatcacaatccagggctctaccaactgagctatagccaccactgcaaaccttttacgcggtattaaaaccaccgcagctccagcaccgggttaatggtgcgcccgacaggattcgaacctgagacctctgcctccggagggcagcgctctatccagctgagctacgggcgcttagcgccgttgcggggtcggataatacggacttcctaccccgctgtctagtgcctttttaaagaaaattatcgtttgctcatgctttgttcgttttgacggttattcagccgtattattgacttgcccctgtcttccgaggccaaacaccttataaatcagggtgacggcggccagaaaaataatgccgacgaagagcgacatccgggtttcatcattcagtcccatcccgaccagcacgcagatcaggaaggccatcgtgaaatagttggcccacggaaacagcagcgaacggaacggatggctggcaatcgccgcctgatgcacgcgacggaaacgcagctgactaatcaggatcacaaaccagggcaccatccccggcaggacgctggcgctatagacatagacgaacacccgctgcggattaggaataatgtaattcaggcaggagcccaccagcaggatcagaatcgacagcgccacaccgacggacggaacgccgttgcgcgataccttaccgatcgccgccggcagctgacggttcttcgccagggcgtacagcatacgtccgcagctgtacattccgctgttgcagccggaaagcgctgccgtcagcaccacgaagttgataattcccgccgccgcggtaataccgattttggcaaacgtcagtacgaacgggctgccattggagccgatttgatcccacgggaagatagtgacgataacgaaaatcgcgccgacgtagaaaatcaggatccgccacaacactttgcccaccgcgctgcgcagcgtcacctgcgggtttttcgcttcacctgcggtaatgccgatgagctccaccccctgataggacgcgaccacgatacacagcgccgtcaggaagcccttccagccgccagcaaagaaaccaccatgttcggtgagattaccaaaaccgatggagtggccgccgttgccaaagccgaagaaaatgacgcccagacccacgacgatcatcacgataatggtggtcacttttatcatggcgaaccagaactcgatttcaccatatagccggaccgccgcaaggttcgccagcgccaccagtcccacggcaattaacgccgggatccactgcgccatctccgggaaccagaactgcacatagaccccgatggcggtaatctccgagatccccaccgccatccacataaaccagtaggaccacgcggtcagatagccgaagaaggggctcatatagcgatgcgcatacaccgcgaaggagccagtgacaggctcaaggaacagcatttcgcccattgagcgcataatgaaaaagacgaacaggccagcgataatatacgccagcagcacggaaggcccagcccatttcaaggtactggccgcccccataaacaaccccacgccaatcgtcccgccaagggcgatcagttcaatatgccgggcctccagtccacgctggagctccgcttttttctcagtcatatatcctcttgtgtttgccgtattccgggtactcccggttattgttattaactgaaaccatagccttgccgacgcgcaggtctccccggcgcgtatgaagcctgcgaatggttaattaattttgcggaaatggcaaataaagtatcaggcgagtgaagagattacacagaatatgtatgcaaactcgcctggttgcagtggaatatcagagcttaccggaataatgccaacgtaaatagcgcagcagacggaactgtcttttgatacggctcggctgcaaaagcaggcgatagaaccactccagccccagatcctgccagaacttcggcgcccgatggacgtgcccggtaaaaacatcgtaagtgccgccgacgcccatatacagcgcgtgcggatacaggcgccggcagtcgcgcataaagatctcctggcgcggcgaccccatcgcgacggtgacgattttcgccccgctgtcgcgaatgcgttcgaacaatgcctggcgttgctcaggggtgaaataaccgtcctggctgccgacgatgttcacctgccagcgctgacgcagcctggattctgtctgcgccaggacctcaggtttaccaccaaccaaaaacaccggtgtcccttcagcgccggcgcgctgcattaacgcttcccagagatcggccccggcgacgcgggatacctgggcctgcgggtattttttgcgcagcgaacgcaccacgctgatgccatcggcatatttaaactccgccgcctcaatcagcgcccgtacctccgggttatcctctacggccagcattttctcagcattaatggctaccagcgtcccctcccggagcgcgccgtcggcaaacaaataatccagagcgtgcggcatatcgcgccagcctatgagctgcagccctcttaacaggtacaacggcgcggaaatggtcccagtcatgtccatccttctcagacttgcggttgcgaaagcggttttacgcgcttatgaatcagtcccacgctatccaggaaccagtacagcagtttcgccgccagcaagcagataccaaagatcacgaggaaaaacaccacgcgggagccgaacgaatccagcccctcgcgcgccagcactatcatgttgaagatagcgccgaaacagaaactgtgcaggatagccgctttatagcgattgctctcccggttgcccagctcatacagccagtcgaaccatttaataatcaaccctaccgccacggcgcccagcggtacgaaccagacgccgcccatcaccaccagcgagccaatcagcgtcggcgagatcgccagccccgaatggttgtttaatacttcccaggtaaagtagttggcggtattgagcaccatcgtcgggcgaccgtgccacagccagctggggataaagacgtagaagtcgcggatcatcggcgccagaccctggaaatcgatcttttcgtagttctgcagcagcagcgccaggttctcccacggtgagaaggtgtcgcgcgtgagatacagaaaggtataaaacgcttcgtcgccgctgacgttcatcccgtagcgcttcagcgccagccagaacatgccgacaatacccagcacacccgccgccgccagcatccacaggctgatccagccgcgaataataccgatgaacagaaagatggcgaaggcgatgataatattggcgcgcgtcccgccgacgatggcgtaggtcagcaaaccaaaggccaccgtgctgacgaggaagaagatccacgccttataatcctggcgcagaaaatagaccaccagcatcgccggaataaagaagtaaaagaagcgcttcaacgccacgccggacacttcagcagagaaaatctggctgtaggagttgagcttaaacagcaggaaaccgttgtgggcgaagaagatgccgacgcacagcagcgccagccccatcaaaatgccccacgccagatgggtttccacccggttcatggtaaacagcgggcgatgcgcaacctcacgcgatgccgaacgcagccgcgttttataggtcacgtagtagactgcgtagaagcacaccgcgatcagcagcgtctgcagcaaaatctccggcggcgccacgctgacgtcaaagcggaacaccagaatactggtcagcgggaagccgaagaaaaaggtcagcagaaacagcaacgagaaaaaaacgttgaagttaaagcgtacccgacggaactcaaaccaggtggcggtggcgatgaacagcgtcgacagcagccagaccaccagcagcccgctaaattgcattaacgtcatgcctgcccctccgccgctaaccgtagcgcccgccgccagcccgtcagatagttcggccggaagaaggcgatagcggatttatccacgctcgccagctgacgctgcgcttcgcgcaccacgctgacgtccagcgcgtcgctggtgaacagcaccggcacatgctgctcggccatatcctgccagaacgggttttcccgattgagcacgcaggggatgcccgcctgaatcagcagacacagggtgccgatcccctgctggcgggcaaacagaaaatagcccagatcacagcggcgcagcagcgccagataatcatgaaactccagcttctcgctgaggatctgcagatgctcaccgctaaacagcgccgcccccgcctcgcgaacctcattgatataggcgtcgttattcgctggatagcccatcggcacgatgacgtttaccgtatcgccaaactgctgatggattgccttcagcgcggcaatatgttcattgctgcgatccccggagttgcccaccagaatagtcagggtatcaccgcgcggagcgttatcggccagggtattcagcgccggatccatacgggtcgggaagtagagcagctcgcccgggacgcgcggatggcggttagcgaaccagctgagatcgccgcgggtggcgaaaacgcgccctacccgcccctgcgccatacggcgcagcggatagaacaggcgaaacttcaggctggcagaattttcatacagatccgccccccagatatgccagttaaactgcgacgggcggatgccgccgctcaacagcgccagccacagcccggtattgaactggccgtggaagaaaaagcgctgctggcggttggctttcgcggtagcaatcactgcctgcgccagcgcctttttccccggataacaggtgacatccagcgccggatacccatcacgcacgctggcctcatcaccgacgatcataaatctcctggcctgcgggtcggcggccagttcgtcgttaaagaaccgcagtacggtctggttatgatgcgggatatccgatcccagtacatgtatcagtgctgtcatgcccgtttacgccagagtaaaaacacgccactacaaagggcgaaataaacaatataagtggccatatatgcctgcgccgcgccaaccgcgccgtgcgccggtataagccagtgtgagaatgcggtcagcagtgcgaactggctgatttccgtcagaatataaaaacgcagcgacgctttggcgatcaccagatagccatagacgtaagcacctacttttaaaacgtcgcccaccagctgccaggcaaacaggtcacgcatcgcggtaaagcgatcggaaaacagcagccagatggcaaaatcgcgcagcagccagaccgtcaggctcgccgccgctactgccggcaggacgaatttcagcgacttgactatctcgcgggtgatatccattttggcgctcagccgcgacagcgtcggcagcagatagacgctaaacgaggcggtaataaactgcaggtaggcatcggagatgctgctcaccccctgccagatcccgaccgcctcccagccgtaatgcgccgccagcagattacgcatcatcacataggctaccggcagggtcaccgaggttatcagcgccatcagggtaaatttcgatagctgtcccgccagaccgttatcccagcgcggacgcagggcgctcagcgggatattaccccgccgccagagcataatacccgccgggaccaccaccagcgctggaactaacgccagccccagcagcgcgccctgatagcctcccaacacgtagcaagcatagtaagccgccacgccgatcaggctcccggcaatcagcgagaaggcgttacccgccgcatcgcgaaagcctttcatcagcgccagcaggaaattcgcccaggcgatccccatctgcaccagcgccaccaggcgtaccagcccctgatagtgcgtatggccgaacagcccctggcttaacggcgccgccgccagtaaaaataccagcgccagcagggtggaaaagccaagcaccatcgccgacgaggtgcccaccacctgcttcaggcgcgggggatcgtcgtgatgctgcgccaccagcttcgtgacgccattaaatatcccggccccggccagcacgccgagtacggtgaccagttgccggaagttaccggcctggccaacgcccgccggcccaaacgagacggccagcagcttgacgaccagcagaccggcgccgattttgaccagcgtcgatgccgccgtccacagtgaggcttttgctaacgacatatcaggagaagtagctcagcagcgagttaatcaccgtccgctggttcaccacagacagattgtaaaacagcggcaggcgtaccagacgctcgctctcctgagtggtgtagcggtcttcaccgcggaattcgccgaactgttcgcctgccgggcagctgtgcaggggaatgtaatggaataccgcgaggatctccgcctctttcagccaggcgatcagtctgctgcgatcctcgatatcacgcagcttaatgtagaacatgtgcgcgttttgcccgcagtcggccggaaccgtcggcagttcgatacgcccggcgcgcgccagcggcagcagcgcatcatagtagttctgccacagggccaggcgctgctggttgatgcgctccgccgcttccagctgcgcccacagataggcggcctgcaggtcggacatcagatagctggagccaatgtcccgccaggtatatttatccaccaggccgcgaaagaactggctgcggttggtgcctttttcgcgaataatctccgcgcgttccaccagcgtgcgatcgttgatcagcgtcgccccgccctcaccgccggcggtgtagtttttggtttcatggaagctgaagcagccgatatggccgatggtgcccagcgcgcgccccttgtaggtggacatcaccccctgcgcggcgtcttccaccacaaacaggttgtatttgtcggcgatggccatgatggtgtccatctcgcaggctacgccggcataatgcaccgggacaatcgcccgggttttatcggtgatggcggcttcgatgagcgtttcgtcgatattcatcgtatcgcgacggatatcaacgaagacgattttcgccccgcgcagcacaaaggcgttggcggtggagacaaaggtatagctgggcataatcacttcgtcgcccggctggatatccagcagcagcgcggccatctccagcgaagccgtgcaggaaggggtcagtagcgcttttgccgtgccaaatcgctgctccatccactgctggcagcggcgcgtaaagccgccgtcgccgcacagcttgccgctgttcatcgcagactgcatgtaatcaagctcggttccaaccaccggcggcgcgttaaatgggatcatgggggtcacctgtatagccagtaggcggtgctttccacgttagcaccgctgagaatataacgtttaagcgcggcggtgttgcccatctgggtcgccacccgcagtgtagaaagtccgcgcgaggcggcccagtaccgcgccgcctgcatcaactgcgccccggcgccgcgtccggccagcaggccgatacgcgcttcggtcgcagtgatctgccgcagggagacaaaggcgcgaatatcgccctcaggatggcggtaaatcaggcactgatgatcgaaggtgccgcgcaccgcattttcaatccactgggcatagaagcggccgctggcgtcggcagcgtaccagggcgcgcgaaagcggctcatggcaaatgcctgcgccgcctgctcgcgcagcggcgcaatatccgcttccacggcgacgtctgcgccggcatctgcagggctgcccaccggcagcgccagatcgacctcaccttccaccagctgaaaacccagccgctgcagcgcgtccagccggacggtgtcgctggcggcgatcttcgcctgcactcgcgaccaccccgccagcgcctcaggcgtcagccgcggcgcgtgctcgtcaaagcgcacgatcgcgctgttcacggcaaagaagcggttctcccactccagggggtcaatactggcgcggacgggcacggagcagatccagcagatattggccgtagccggttttttccagccgcttcgccgcacgtttgacgccgtcgtcgtccagccagccgttacgccagccgatctcttccagacaggcgattttaaagccctggcgcttctcgacggtctgcacgaacatgctggcctcgatcaggctatcgtgggtgccggtgtccagccaggcaaagccgcgtccaagcagttcgacggtcaatgcgccatcctccagatacatctggttgatggaggtgatttccagctcgccgcgctcggatggcttgacccgtttggcatactccgtcaccttgccatcgtagaaatagagaccggtgaccgcccagttcgacttcggctgcttcggcttctcttccagcgatagcgcacggaagttatcatcaaactccaccacgccaaagcgctcaggatccatcacctgatagccaaaaatcgtcgccccttccgtgcgggcagcgacgctgcgcagcttcgggctaaagctttggccgaagaagatattgtcgcctaacaccagacacgccggttcgccgttaagaaaggcttctccgatgataaacgcctgggctaaaccatccggcgtcggctgtacggcatagtgcagcgcaatgccaaactctgagccatcgccgagcaggcgctggaaatcacgtaggtcgtccggcgtggtgataatcaggatctcacggatcccggccagcattaataccgacagcgggtagtagatcatcggcttatcgtagatcggcaacagctgcttcgatacgccgcgggtgatgggatgtagccgcgttccggaaccgcccgccagaataatacctttcatcattccccccagagatgattagctttgcagcccaagacgctcgccctgatagcttccgtcctgaacccgacgccaccaggcctcgttcgccagataccacgccacggtcttacgcataccggaggggaaagtctctgccggcgtccagcccagctcgcgggcaatcttcgaagcatcaatggcatagcgcagatcgtggcccggacgcgcggcaacgaaggcgatcagatcgcgatagtgcgccacgccctgcggcttatccggcgccagctcttccagcagctgacaaatggtttccaccacctcgatatttttccgttcgttatgaccgccgatattgtaagtttcgcccggttcgccgcgggtcgccaccagatacagcgctctggcgtgatcttccacgtacagccagtcgcggatctgttgtccattgccatacaccggcagcggcttgcccgccagcgcgttaaggatcgtcagcgggatcagcttctcgggaaagtgatacgggccgtagttatttgagcagttggtgataagcgtcggcaggccataggttcgcagccaggcgcgcaccaggtggtcgctgctggctttcgaagccgaataggggctgcttggcgcatagggcgtggtctcggtaaagaaatcatcgctgccgtgcagatcgccatacacttcatcggtggagatgtgatggaagcgaaacgccgatttttgcgccatagccagggtattccaccagctacgggccgcctccagcagcgtataggtgcccacgatattggtctcgataaacgccgccgggccgtcaatcgaacgatcgacatggctttccgccgccaggtgcatcaccgtatccggttgatgctgacgaaaaatgcgatccagctcggcgcggtcgcagatatccacctgttcaaaggcgaaacgcgcatcctgcgccaccggcgccagcgacattaaattgccggcgtaggtcagtttatccaccaccaccacgcgatcggcggtgtgctggataatctcccgcactaccgccgaaccaatgaagcccgcgccgccggtgaccagaatggttctcaccgccacactcctttggtgtcgacgataaacgcctgggtgacgctatcgccgctaacggctttaaattggttatgatcgaccagcatcaccagcacatcggcgctggccagcgccgcctcaagggtcgccagcgtacacagtccatcgagtttcttcggcagcgcgtgaatgttgggctcaaccacctgggtcgtgccgctgtgccagcgggcaatctgcgcggcaatttccatcgccggactttcgcgcaggtcgtcaatattcggtttaaaagcgaggccaaaacaggcgatcgtcagttcgctggcccgcttgttggcggcattcaggcagtccgccacctgcgctttcacctgttcgataacccattccggcttgtggtcgttgacctcgcgagcggtgcggatcagacgcgcctgctgcgggttttgcgccacgataaaccatgggtcgacggcgatacagtggccgccaacacccgggcccggctgcaggatattgacgcgcggatggcggttcgccaggcggatcagctcccagacgttaatcccctggtcggcgcaaatcagcgacagttcgttggcaaaagcgatgttgacgtcgcggaagctgttttccgtcagcttgcacatctcggcggtgcgcgagttggtcaccacgcattcgccttcaaggaagattttatacagctcgctggcgcgagcggagcagaccggcgacatgccgccgataacgcggtcgtttttaatcagctcgaccatcacctgaccgggcaatacccgctccgggcagtaggcgatattcacgtctgccgcttcacccacctgctgggggaagctaagatccgggcgcatctccgccagccactcggccatctgttcggtcgacccgaccggtgaggtggactcgaggatcaccagcgaccctttctttaacgtcggcgcaatggatttggcggccgactcgacaaacaccatatccggctcgtggcgatctttaaacggcgtcggcacggcaatcaggtaagcatccgcctccaccggggtggtggcggcgcttaaatacccctgctcgaccgcggtcttcaccacgctcgccagatctggctccacgatatgaatctctccacggttaatggtctccacggcatgttgattaacatcaacgccgaccacccgcttctgccgggaggcgaacgcggcagcggttggcagcccgatatagccaaggccaatcactgaaatggtagaaaaactcatagcgttacctgattatttttaagtgcagacaaaatgcgacgacatgcttcgccatcgccatagggattatgcgcgcggctcatcgcctggtatgcagcatcatcctccagcagtcgcgtcacttccgcgacgatgcgctggctgtcggtgcccaccagacacacggtgccggcggccaccgcttccggacgttcggtcatatcgcgcatgaccagcaccggcttacccagcgagggggcctcttcctgaatgccgccggaatcggtcaggatcagccaggcgcgatccatcagccagacgaacggcaggtaatcctgcggttcaatcaacatcacattgtcaatatgaccaagaatacgattcaccggctcgctgacattaggattcaggtgaaccggatagacaatctgcacctcagggtgggtatgggctatctcggccagcgcctggcagatctgttcaaaaccgagcccaaagctttcccgccggtggccggtaaccagaatcatctttttaccgtggctgatgaaaggatagcgctgcagcagggtctcccgtagcgcttcatcacccagcacccgatcccgcacccagaacagggcgtcaatgaccgtattcccggtaaccgtgatccgactgtcggcaatattttcccgcagcaggttctgccgcgaggtttccgtgggggcgaaatggtatgtcgccagatggccggtcaacgtacggttgccttcttccggccacggcgaacttaaatcgccggtgcgcaggccggcctctacgtgacccaccggtatccgctggtaaaacgccgccaggctcgccgccatggtggtggtggtatcgccatgcaccagcaccacgtcgggtttaaacgactccagcaccggcttcagcccttcaaggatgcgacaggtgatctcggtcagcccctgccccggcttcatgatgttgagatcgtagtccgggacaatagagaaaagtttcaacacctgatcgagcatctcccgatgctgcgcggtcacgcatactttcgcctcaaaatgaggatcctttgccagcgcatggaccagaggcgccatcttgatggcttccggcctcgtgccaaatacagttagtactttcacatcgattctcttcgattaggcgatgaaggtcatctgcccttcaccacaggccgcaatcacaggacacgacgacgcgataacgccacgcctgcgccgatgagcgcacccacaatcccccacatcaccatcagaaatacacggcgcgggctatcgcgttttacaggttcttccggcgtccgcaaataccggtaagtctgaaaacgcggatctaacgttggaccgacgttcaacgtgctcagcatggcgcggttctggtcgtaatcgaggtcatattccggcccgacggcctgcaggttttccagcctggcctgcagcatcggcctgcccaataaaaatagctctgaatccggcaactgatcggcaggaacatccgtttcgctacgtgaaatattgtgctgctgagccaccttcagcgcctgctccacgctgtgcgtccggcggttgaagatggcctcggccacctcttcctggcgcttcacctgcgccttcatctgcaccgtccgcgccgcccaggcgcctttaagttcgtcgttaagatggcctgccgcccgctggctggcgaaggccacatactgacgcaacagattattggcatcctgcccggtctcggcggtcagtttgacgctgtcgttaatgctcttggccgcatcgcctggcataaactggatattgttaatcaggtcatccagcatcgccgcatcagcgcgggcattacccgactgacgctgcttgtagtagtccgtttgcagccagaaatcgcgccgggtatcccaggaggccagctgcatgatgaactctttatacgcttcatccatggcggaaggctggtcgaccgaggcgaggtcggctttaatgtccagattgcgtaagaactgctgttgggaatagtatccccccaacatattgacagtaggccgatcggtgatcgccgtggcgctccactcctggcgagcaaagaaggtgtacaccagcacgatggcggcgaagagtacggcgccgccgactatccagccttttcctgcccataaagcgcgaaacagcccgcgaatatccagctcgttctcaacgttcactgcttgtgctcccggtaatggttgagtcatcacatccccagctctacttggttagtttcggattattgccgctgtgtcgccgaattctgcgtctgatgcgcttaaccaggcgcgccactttccaggcgcgcttaatacagtagccataaagaaagaaggctaccaaaaagagaattaacatcacccattccggcacaatgcgggtgtattccgccacgacgccaaccagcgccagcagggcggcggccagggtaatcaggacaaacgcctggcgggaagtaaacccggcgcgcatgatcaaatgatgaatatgctgacggtccggtgagaaaggactcatgcctttgcgcaggcggcgatacataatcgccaccatgtccatcagcgggatagcgataatccacagcgcggtcaccgggctaatgggatgcgttttaccttgcgtggtttccagcaggatccagatgatggtgaagccaatcatcgtgctgccggcgtcacccataaagactttatagcggcggccgagggcgccaagattgagaagaatatagggtagaatggcggcgatcatcgcgaaacaccacatcgccaggctgtactgaccatcaaaccaaaggataatcccggtcgccgcaaaagagaccgatgacagtccgccgagcaggccgtcgataccatcgaccatgttgaacgcattgatagcggcccagacggcaaacagcgtcaggaagaagccgaagggccccagcaccagttcccacgatccaaaaataaagcccaaactactcagatgcagattccctgccatcatcataatcacggcgatcgcggcctgaatgaccgcgcgaattttcacgctgatgtcgaagcgatcgtcaagcgcgccaaccagcaccaatacccccgcgcaggccagatacagcgaggcgtgaggaatataataatcggcgatggcgaaagtgaaacagatacctgcataaactgagataccaccgaccaacggaatcaacccctgatgccgtttgcgatagttgggtttatccactaacccgatcttttttgccactttccgcgcgacaaaaataaagagggtcgtgaataagaaaatactgattaattcagtaatagcagtgagtaaattcacaacgcatgtgctctcagcatagttaatccgggaagtatagcgatgatgccccaactccagaaggggaaaagcagaacattacaaatttattgtatagattttagtctgttaaagctgtctccgcctgctatccggcgccattatacgacaactttcgtcccgctttctctgtctctggatcatacaaaccccaaaatgaaaacgccacgcaaaggcgtggcgtttttggctttttttaccttacgagcgcttcatcatatcgaagaagtcatcattcgtcttggtcattgccagcttattgatgaggaattccatcgcatcaatctcacccatcggatggataattttgcgcaggatccacattttctgcagctcttcctgagtggtaagcagctcttctttacgggtaccggaacggttgtagtcgatagccgggaagacgcgtttttcagcaatcttacgagagaggtgcagttccatgttaccggtgcctttaaactcttcgtagataacttcgtccattttggaaccggtgtcgatcagcgccgtggcgatgatggtcaggctaccgccctcctcgacgttacgtgccgcaccaaagaaacgcttcggacggtgcagggcgttggcgtccacaccaccggtcaacactttaccggaagccggaaccacggtgttgtaggcacgcgccagacgggtaatagagtcgagcaggatgataacgtctttcttgtgttcaaccagacgtttcgctttctcaataaccatctcggcaacctgcacgtgacgggatgccggctcgtcaaaggtggaagcaaccacttcacctttcaccagacgctgcatctcggtcacttcttccggacgttcgtcgatcagcagtaccatcaggacacagtccgggtgattgtatgcgatgctctgcgcgatgttctgcagcagcatggttttaccggctttcggcggcgcgacgatcagaccacgctggccgcggccaatcggggaggccagatccagtacgcgagcggttaagtcttcggtagaaccgttaccacgctccatacgcaggcgagagttcgcgtgcagcggcgttaagttctcgaacaggatcttgttacgcgcgttttccggcttgtcgtagttaacttcgttaactttcagcagcgcaaagtaacgttcaccctctttcggaggacgaatcttaccggaaatggtgtcaccagtgcggaggttgaaacggcggatttggctgggggatacgtagatgtcgtcagggccggcgaggtaggagctgtctgcggagcggaggaatccaaatccatcctgcagtatctccagtacgccgtcgccaaagatatcttcgccactcttcgaatgctgcttgaggatggcaaaaataatatcctgcttacgcatacgagccaggttttccagccccatattttcgccgagagtaatcagctcagaaaccggcgtattctttaattcggtaagattcatagtggtgtgggttcttaaactcggggtaaatctcgaacttaatgttgtgaatggtatggcaggaacttccatgcctgttaacggccttcatctcgtgtctgtacgttgcctggtcacaggaaagaacgcagaactgaaacgactagacggaatgagtgaaaagcccggaattattagcttcacgcgcatttatgcgggatgcttcgggtaaaacaagattcaaacaaggtatgtttaaaacgaagtctgtggattaacttagcacgactccagccgggcgtccagagttccgcaaaaaataggaatctggacgccggaacagcaattcgcttacgccaggttagcgtcgaggaactctttcagctgacccttggacagtgcgccaactttagtggccgccacttcgccgtttttaaacagcagcagggttgggataccgcgaatgccgtatttcggcgcagtgcccgggttctggtcaatgttcagcttagctacggtcagtttgccctgatactcttcagcgatctcatccagaatcggggcgatcattttgcacggaccacaccactctgcccagaaatcgacgagggtcagcccgtcagccttgagtacgtccgtgtcaaaactgtcgtcagtcaggtgaataattttatcgctcatatttaactccacaggaataagcctggtgtgttggtgtcgtagccatcaacgacgcgctgcggctacgttatgcacgctattcttcaggatacctcaattctctggcctgccaactggcgcaatccatcatggactcgcctgttgacgccagggtgcctgaacgcgaactgcatgctgcagatttatcgctcccgactcgcttagtagtctaagctatcctggattcgttcagttaccgtagacgtaccttgaataatttcgtacaccgccaacgaaaggttgacgttatttcaccggatacgctttcttaatgcaatagttagctgatattctaccacactatgagcaaaacacatttaacagaacagaagttttccgacttcgccctgcacccggcagtcattgaagcccttgaaaagaaagggtttcataattgcacacccattcaggccctcgcccttccgctgacgctggaaggccgcgatgtcgccgggcaggcgcaaaccggtaccggtaaaacgatggcgttcctgacgtcaacgtttcattatcttctctctcacccggctatcgccgatcgccaggttaaccaaccgcgcgcgctgattatggcgccgacgcgtgaactggcggtacagatccacgccgacgctgagccactggcgcaggccaccggtctgaagctgggtctggcttacggcggcgacggctacgataagcagctgaaagtgctggaaagcggcgtcgatattctgatcggtaccactggtcgtctgatcgattacgcgaagcagaaccacattaacctcggcgccattcaggttgtcgtgctggacgaagccgatcgcatgtacgatctcggctttattaaagatatccgctggctgttccgccgcatgccgccggccactcagcgcctgaacatgctgttctccgcgaccctttcttatcgcgtccgcgaactggcgttcgaacaaatgaataacgccgagtacgttgaagtcgagccggaacagaaaacgggccaccgtattaaagaagagctcttctacccgtccaacgaagaaaaaatgcgcctgctgcagacgctgctggaagaagagtggcccgatcgcgccatcgtcttcgccaataccaagcatcgttgtgaagatatctgggggcatctcgccgccgacggccatcgcgtaggtctgctgaccggcgacgtggcgcagaaaaaacgtctgcgtattctcgaagaatttacccgcggcgacctcgatatcctggtcgcgaccgatgttgccgctcgtggtttgcacattccggccgtgacccacgtctttaactacgatctgccggacgactgcgaagattacgttcaccgcatcggccgtaccggtcgcgctggcgccagcggtcactccattagcctcgcctgcgaagagtatgcgctgaatctgccggcgatcgaaacctatattggtcactcaattccggtcagtaagtacaacccggacgcgctgatgaccgacctgcctaaaccgctgcgtctgacccgtgcgcgcccaggcaacggcccgcgccgtaacggtccaccgcgcaatcgtcgtcgttcaggttaagagatctatgccatacgctcagtcattcagaatctgccagggcgaccttcctctggcgacccgctcagtgatgtggatcgggcctaagcgccccgccgaccagggagccttctgaacgatgaagagtatgagctccacctcgctatatgccgccattgatttgggctccaatagtttccatatgttggtggtgcgcgaggtggcgggcagcatccagacgctgagccgcattaagcgtaaggttcgactggccgccggcctgaatagcgacaacaccctctccgcagaagcgatggaacggggctggcagtgcttacgcctgtttgccgagcgcctgcaggatattccgccgacgcaaatccgcgtcgtggccaccgccacgctgcgtcttgccgtcaatgcgggggagtttctggcgaaagcgcaggagatcctcggcactccagtgcaagtgatcagcggcgaagaagaagcgcgcctgatttaccagggtgtcgcccacaccaccggcggcgccgatcagcgcctggtggtcgatatcggcggcgccagcaccgagctggtgaccgggaccggcgcacaaacaacctcgctgtttagcctgtcgatgggctgtgtcacctggcttgaacgctattttgccgaccgtagtctgacgaaagagaatttcgatctcgccgaagcggctgcgcgcgaggtgctactgcccgtcgccgatgtgctgcgctatcacggatggaaagtgtgcgttggcgcctccggcaccgttcaggctctgcaggaaattatgatggcacaggggatggatgaacgaatcaccctcgccaaactccagcagcttaaacagcgcgctatccagtgcggacgtctggaagagctggagatcgaaggcttaacccttgagcgggcgctggtgtttcctagcgggctggcgatcctgatcgctatcttcagcgaactgaatattcagtgtatgaccctcgcgggcggcgcgttacgcgaaggcctggtgtacggcatgctgcatctctccgttgagcaggacatccgcagccgcacgctgcgtaatattcagcgtcgttttatgatcgacaccgaacaggcccagcgcgtcggcggccttgccagtcatctgctcagtcagttggatggcagctgggagctggatccgctaagccgtgatttactccttagcgcctgtgcgctgcatgagattgggctgagcgtggattttaagcgcgcgccgcagcacgccgcctatctggtcaataacctcgacctgccgggctttaccccggcgcagaagaagctgattgccacgctgctccttaaccagactaacgctatcgacctctcttcgcttcatcaacagaatgccgtcccaccgcgggtggctgagcatctgtgtcgtctgctgcgactggcaatcctgtttgccagccggcggcgcgacgatctgttgcccgccattcagctgaccgctcaagacgaacaactgacgctgatattgccgggaaactggctggatgaacatccgctgggtcgggagatggtcgatcaggagtgtcagtggcaaagctacgtccactggatacttcgggtcgccagcggcgatacgctgaaataatatccagccaggagggcggatgcgggaagaactggatttcaaatcgctacgctttttctctgcgctctaccgcttgggcaatgtttccccagcagcggacgcgctcgatatcagccagcccaccggcagccttttgctgaaaaaactacgagatcattttgctgacccgctgtttgtccgggtcgggcagcggatgatcccgacgccgcgagcggacgcgatcgcccccaccatctcgactcttctccagcttgccgataacgatttagcggtcaaacctgaatttcttccccagcagagccagcgtaattttacgatcggtatgaccgatatcagccaaatgacgctgctgcctttattgcaaattgcgctccagcagcaggcggcggacgggatcacctttacggtacagaatctggatgagcagaccctcaacgccctcgaatccgggaaatgcgatctcgcgatcggctatctgacgcagcttccggaaagcgtctaccagcaacatctcttcgatcaatcatatgtctgcctggctgcggaaaaccatcctcgcattcgtgcacagctccgcgccgaagactggcgccaggaaaagcatctggcgatccgcgtggaggggactgcccatggcgatatggataagctgcttgatgagcaccacatgccccggcgcattgcgctaacgttaccaagttttttaggtaccggtgagctggtggccgaaagcgatatgattgccgtcgtcccggaacaggtggcgcggcatatcacccggcgctatccctgccgcagctggccgctgccttttcccctcgccaaaatcgccatccgtcaggtctggcatcagcggctgcaccgcgatcccggacatatctggctacgctcgctgatcgctacgcttgccgatcccgcacagcagagtacttctattaaaatctaagtaacaaattacgcccgtgtattggttttattaataacccctattacgtttggtttattgctggtaatacgtgaaagcttttattctcctcgcatcaagccacactgacacatatcgcaaggaaaatatcatgcgcggaaaaattgctttagaagaacacgtatccactcctgaaaataaccgtctgtgggattcatctggtgaagcaggtcgtaacggcacagaatatatgaaagatgttgaacgccgcctgctggatcgcagcattcagctggaagaaatggcgcagcgtcatattgatcatgtaattctttctctgacttcacctggcgcccagtctattttagataaagccaaagccgtctcttttgcccgcgataccaacgattttatcgttgagaattatgttaagccaaatccggacaaattcagcgccttcgccaccctggcattgcagaacccggaagccgcggcggaagagctggagcgcgccgtgaaaaagttaggcatgaaaggtgcgctgatcaacggctacaccaacgttaaagatagcgagcatggcctgtatcttgatgacgaatccatgctggtattctgggataaggtcaacgagctgaacgtgcctgtctatctgcatcctcgtgaaccgctggaaggcccggcgcgcggcatctataccggttacgaaagcctgatcggctccgcctggggcttcgctcaggaaacggcagtgcatgctattcgtctgatgatgagcggtctgttcgatcgttatcctaacctcaatctggtgctgggtcacctcggcgaagggctggtacatatgctgccgcgcactcaacatcgtctctatcgtcagcgtttcggctgcggtctgggtaaagcggaaaaaccgttaatgcactacctgcagaataacttcatcgttaccaccagcggccatttcaatacccattcactgaataatgctattgaagtcatgggcgccgatcgcgtgatgttctctgtcgattatccgtatgaagatattcatcaggcctgcgactggtttgatcctttagaacttgaagcaggcctgaaagagaaaatcgcctggggtaatgccagccgcgtatttaacattaaataattaatttaaatatttcagggcctgtatattcaggccctgatttttattagggaaaataaattatggctataggtatatttgtctgtagcggctcgcttctcgttggtgcgctggcgggcgcttcactgaatcgttttattccggaacatttcaaaaaaaccttaccgttgatcgccggactgatctcaatcagtatgggcatattctttgtcaataaattgcataacctgccgccgattgccctggctattattgtcggcacgattatcggcggcctgttgaatattgaaaaatggattgaacgagccggaacaacgctgcgcagccccattgaacgtatttttccggcgcagtccagcgccagcgtcggtgcggaagattttatgaatcagtttatcgccgtgctgatcctgttctgcgccagcggtaccggcatcttcggcgccttaaccgaagggatgaccggcgacccgaccattctgctgaccaagtcgatcctcgacttttttactgccgcgattttcgcctccacgctggggtatatcatcaccgtgatctttattccccagctgattgttttcgttatcctgtttttcgcggcaacctttatcatggcgttaatcaatccgtcgatgatcgccgacttcaccgcctgcggcggcatcattatgctggcgaccggtttccgtctgtgcgggatccgtgccttccctaccgccaatatgctgccctcgctaatactggtgatgcccttctccgccgcctggcagcagtttatcgcctgagacgctaagcttttttcgcctttgccagcatcgcccgaatattagcgacgttggcctggcctttttgcatccgctcttcaggcgtaatggttttgcgtgcctgctcccagataaggtcgtcctgaggtagctccagcagaaaacgactcggttcaggacgcaccagttcgccatattgccggcgctccttacagagcgtaaaggtcagctctttctgcgcacgggtgatgccaacgtaggctaaccgtcgctcttcatcgacgttatcttcatcaatgctgctttggtgcggcagcaatccctcttccattcccaccagataaacgtaggggaactccagcccctttgacgcatggagagtcatcagctgcacctgatccagctcttcatccgattcgccgcgctccatcatgtcgcgcagggtaaagcgggtgaccacctgggtcagggtcatcggctcatcgatttcgctgccttccagcatctcggtcatccaggtaaacagctggttgacgtttttcatgcgcatttccgcggctttcgggctgggcgaggtttcatatagccaggattcgtagtcgatcccgcgaatcaaatcgcgcacggcgttgaccggctcgcgttcggccagctgctggatctcgcgtagccagtgggtgaagcgggtgagggattcatagccgcgcccggtcagcgtctggctgagacccatatcaaagctggcggtgaacaatcctttgttgcggcccatcgcccactcaccgagcttttgcagcgtcgccgggccgatctcgcgcttcggcgtgttgactatacgcaggaaggcgctgtcgtcgtccgggttggtcagcacgcgcagataggccagcagatctttaatttccggacgcgaaaagaacgacgtgccgccggagattttgtacgggatgcggttctgcatcagcatcttttcaaagacccgcgactggtgattgccgcgataaaggatcgcgtagtctttgtaattggttttattaatgaagtggtgggcgatcagctccccggccacgcgctccgcttcatgatcttcattgttggcggagagcactttcagctccgcgccatatcccagttcggagaacagccgcttttcaaagacgtgagggttattggcgatcaaaatgttggcggctttcagaatacgcccggatgagcggtagttctgctcaagcttgatcacctgcagcgccgggaagtcctggctgagcagcaccaggttctgcggccgcgcgccgcgccaggagtagatcgactggtcgtcatcgcccaccacggtaaagcgcgcccgctgacccaccagcagtttcaccagctcatactggctggtattggtatcctgatactcatctaccagcaggtagcggatcttattttgccagcgctcgcgcacctcctcgttgcgctgcagcagcagcgttggcagcaggattagatcgtcaaaatcgaggacattgcaggccttcatgtgcgcgtcgtatagcccatagcagtgggcgaaaatacgatcccgttcgcctttcgcgccagcggcggcctgcgccggggtttttagatcgtttttccagttggagatcgtcgagatcagctgctgaagcaccactttgtcatcttcgatcaacccttcggtcagttccttaagcagcgccacctggtcggtatcgtcgaataaggaaaagttagacttcatacccagcgcagcgtattcgcgcttaatgatatccagccccaaagtgtggaaggtggaaatcatcaggccacgcgcctctttgcgccccagcgtttgcccaacgcgctctttcatctcgcgcgcggctttgttggtaaaggtcacggccgcgatatggcgcgcctgatagccgcagccgcggatcaggtgggcgattttattcgtaataacgcgggtcttaccggaaccggcgcccgccagcaccaggcacggtccggtgacgaattcgacggcttgttgttggccagggtttaaacgcatgggagtcttgctcaatcttcgaacggggtggggattgtagcagaaagcggagccgagatttactgactgatggtaaagtgtcagccacgcaaaccatcctgagaatgatgtcatggcaaaaagcgcagcggccctgcatatcctggtcaaagaagagaaactggcgctggagatcctcgccaaactggagcggggcgtcagcttcgatcatctggcgaaacgctattctaaatgtccgtctggccgcaacggcggcgacttgggcgagtttcagcaaggcgcgatggtcggtccgtttgatcaagccgtcttcagctgtccgctgctcaaaccctatggcccggtgaaaaccaaattcggctaccacatcatcaaggtgctgtatcgccgctagcgcgtgatactatggcgccctgatttatcccaactcactcaaggcgcaatcatggctaaaaccgcggcagcactgcatatcctggtaaaagaagagaaactggcgctcgatctgctcgagcagctcaaaaacggcgccgatttcggcaagctggcaaagaaacactccatttgtccgtcaggcaaacgcggcggcgatctgggtgagttccgccagggccagatggtaccggccttcgataaagtggtcttctcctgccctgaactggagccaaccggcccgctgcatacccagttcggctaccacatcatcaaagtgctgtaccggaaataataaaaaaacccggggatcttaatctccgggtttttgcctgatggcgcttcgcttatcaggcctactaaacaaatccatgcctctatggatttcggcttgccggaaggcggcaaggaagtacatccccaggaacaaagattactatgtgactggggtgtacgtaccgtagccaacgcatcggcaagtcgaaagacgacgaggaattagccggctaccgcgatacgcttcatatcggtcatataaccgcgcagtttcttaccaacctgctcgatagcgtggctgcgaatcgcttcgttcacatcgcgcagctgcgcgttatctaccgcgccttcggcaatcgctgtgcccaggtcgccggtctgcagggtggtcatgaactctttcagcagcggtacgcaagcgtaagagaacaggtagttaccatattcagcggtatcggaaataaccacgttcatctcatacagacgcttacgggcgatggtgttggcgataagcggcagctcatgcagtgattcgtagtaagcagactcttcgatgatgccggaggccaccatggtttcgaaggccaattcaacgcccgctttcaccatcgcgatcatcagaacgcctttatcgaagtactcctgctcgccgattttgccttcatattgcggcgcggtttcgaaggcggtttggccggtctcttcacgccaggtaagcagtttcttatcatcattcgcccagtccgccatcatgccggaggagaattcgccggagatgatgtcgtccatgtgtttctggaacagcggcgccatgatctctttcagctgctcggacagcgcataagcgcgcagtttcgccgggttggagaggcgatccatcatcagggtgatgccgccctgcttcagcgcttcggtgatggtttcccagccgaactgaatcagtttttctgcatacgccggatcggtaccttccgccaccagcttgtcgaagcacagcagagaacccgcctgcagcatgccgcaaaggatagtttgctcgcccatcaggtcagatttcacttccgccacgaaggaagattccagcacgcccgcgcggtggccgcctgtcgccgccgcccatgctttggcaatcgccatgccttcgcctttcgggtcgttttccgggtgtaccgcgataagcgtcggtacgccgaaaccgcgtttgtactcttcacgcacttcggtgcccgggcacttcggcgccaccatcaccacggtgatgtctttacggatctgctcgcccacttccacgatgttgaagccgtgggagtaacccagcgctgcgccgtctttcatcagcggctgtacggagcgcacaacgtctgagtgctgtttgtccggcgtcaggttaaccaccaggtcggcctgcgggatcagctcttcataagtgccgactttgaagccgttttcagtcgctttacgccaggaggcgcgcttctcagcgatcgcttctttacgcagcgcataggagatatccagaccggagtcacgcatgttcagaccctggttcaggccctgcgcgccgcagccgacgatgaccacttttttaccctgaaggtagcttgcgccatcggcgaattcgtcgcgcgccataaagcggcatttgcccagctgtgccagctgctggcgcaggttcagtgtattaaagtagttagccatgtctgtaactccgtgatgttgtgtcgtgcttattgttcggttcgcttttgcgagaatgaacttactatatgacaggaattttattgcggaaattgatatattcacaacgtcacgttgcattttatgaaatacaaaaccggggagtacgcgccgtggatttacgcgatctgaaaacttttctgcatctggcggaaagccgccattttggccgcagcgcgcgggccatgcacgtcagcccgtcgacgctttcgcgccagatccaacgcctggaagaggacctcggccagccgctgttcgtgcgagataatcgcacggtgacccttaccgaagccggggaagagttacgtacctttgcccagcaaactttattgcagtaccagcagcttcgtcacgtcatcgatcagcagggcccttcgctctccggcgagctgcatatcttctgctctgtcaccgccgcctatagccatctgccgccgatcctcgaccgctttcgcgccgcgcacccctcggtggagatcaagctctcgaccggcgacgccgccgacgctatggagaaggtcgtcaccggcgaagccgacctggcgattgccggtaagccggagactctgccagggtcggtggcgttttcgatgctggagaacctcgccgtggtgttaattgccccggcccttccctgcccggtgcgcaaccaggtgaccgtcgagcgccccgactggtcgacagtgccctttatcatggccgaccaggggccggtacgtcggcgcatcgagctgtggtttcggcggcataaaatcagcaatccgtcgatctacgccaccgtcggcgggcacgaagcgatggtgtcgatggtcgccctgggatgcggcgtggcgctgctgccggaagtggtgctggagaacagtccggagccggtacgcaacagggtgatgatcctggagcgcagcgatgagcaaacgccgtttgagctgggtgtttgcgcacaaaaaaagcggctgcatgagccgcttattgatgctttctggaaaattcttcccaaccactaacccgcgaggaaaaagcggaatgccgggttatgcgtttcgtcgtggcactcatagcccagctcattgagacgagtttcaaagtccggctcgtgctcgcccaactcgaaggccgccagtacccgaccatagtcagtgccgtggctgcggtagtggaacagtgaaatattccagtgggtgccaagggtatgcaggaatttcagcagcgcccccggcgattccggaaactcgaagctgaacagccgctcctgcagcgcttttgacggccggccgccgaccatatagcgcacatgcagcttagccatctcatcatcagagagatccaccacgctgtagccgccgtcgttcagtaactggaggatctctttccgctcttccaggccacgactcaggcgtaccccgacaaaaatacaggcgtctttggcatcggcaaagcggtagttgaactccgtcaccgagcgtccccccagtagctggcaaaacttcaaaaagctacctttctcttccgggatcgtcaccgccagcagcgcttcgcgctgttccccgagctcgcagcgctcggacacgtagcgcaggccgtggaagttgacgttggccccggacagaatatgagccagacgctcgccgcggatgttatgctgggcgatatactttttcatccccgccagcgccagcgcgccggaaggctccgccaccgcccgcacatcttcgaacagatccttcatcgccgcgcagatagcatcgctatcgacggtgatgatatcgtccagatactcctggcataaccggaacgtttcatcgccgatgcgtttgaccgccacgccttcggcaaacaagccgacgcgcggcagatccaccggatggcctgcgtccagcgccgccttcaggcaagcagaatcttccgcctccaccgcgatcactttgatctgcggcatcagctgcttgatcagcaccgccacgcccgctgccagaccgccgccgcccaccgggacgaatacgcggtcaatatgggcatcctgctgcagcagctccagcgccagggttccctgtccggcgatgaccattgggtgatcgaacggcggcacccaggtaaaaccctgctgttgcgccagctcaatcgctctcgccttcgcttcgtcaaagttggcgccgtgcagcagcacttcgccgccaaagccgcgaacggcatcgactttgatatcggcggtcgctaccggcatcacgatcagcgccttaacgcccagccgcgatgcggaaaacgccacgccctgggcatggttgcccgccgaagcggtgatcaccccgtgggatttctgttcggcagtcaggctggacatcatcgcgtaagcgccgcgcagcttaaagctgtgtaccggctggcgatcttcacgcttcaccagaataacgttatccagccgcgacgagagcttatccattttttgcagcggcgttttctgcaccgcttcataaaccggcgcgcgcagcactgctcgcaggtactcggcgccctcaggggcgccggacaagggttgtgaatccgccatgattagccacccagcttggatttatcgcgtaccgcgcctttgtcggcgctggtcgccaggctggcgtaggcgcgaagggcaaaggagacctgacgctggcgattcttcggcgtccacgcctggtcgccacgcgcttcctgggcttcacgacgcgccgcaatttccgcatcgctcagctgcagctggatgctgcggttcggaatatcaatcgcgatcatgtcgccatcttcaatgagcgcaatgttgccgccgctcgccgcttccggagagacgtgaccgatagagagccctgaggtgccgccggagaaacggccatcggtgatcagcgcgcacgctttgcccagccccatcgacttcaggaagctggtggggtaaagcatctcctgcatccccggcccgcctttcggcccttcgtagcggatcaccacgacgtcgccttccacgactttaccgccgaggatggcctcaaccgcatcgtcctggctctcatatactttcgccggaccggtaaatttcaggatgctgtcgtccacgccggcggttttcacgatacaaccgttttctgcgaaattgccgtacagcaccgccaggccgccgtccttgctgtaagcgtgttccagagaacggatacagccttcggcgcgatcgtcatccagggtatcccagcggcagtcttgcgagaacgcctgggtggtacggatgcccgccgggccggcgcggaacatttttttcaccgcgtcgtcctgggtcaccatcacatcgtactgttccagggtctgcggcagcgtcaggccaaggacgtttttgacctcgcgattcagcagcccggcgcggtccagctcgcccagaatgcccagcacgccgccggcgcgatgcacatcttccatatggtatttctgcgtgctcggcgccaccttacacagctgcggcactttgcgggagagcttatcgatatcgctcatggtgaagtcgatttcagcttcctgcgccgccgccagcaggtgcagaacggtattggtggagccgcccatggcgatatccagcgtcatagcgtcctcaaaggccgccttgctggcgatattgcgcggcagcgcggaagcgtcatcctgctcgtaatagcgtttggtcagctccacgatacgtttcccggcgtttaggaacagctccttacgatcggcgtgggtcgccagcagagagccgttgcccggctgcgacaggcccagcgcttcggtcaggcagttcatggagttcgccgtgaacatcccggaacaggagccgcaggtcgggcaggcggagcgttccacctgattactctgctcgtcggacactttcggatccgccccctgaatcatcgcatccaccaggtcaagcttgatgattttatctgacagcttggtcttcccggcttccatcgggccgccggacacaaagatcaccggaatgttcaggcgcagggaagccatcagcatccccggggtgattttgtcgcagttggagatacaaaccatggcatcagcgcagtgggcgttaaccatatactccaccgagtcggcgatcagctcgcgggatggcagtgaatagagcatacccccgtggcccatagcgatcccatcatccactgcgatggtgttgaattctttggccacgccaccggcggcttcaatctgctcggcaaccagtttgccgagatcgcgcaggtgcacgtgcccggggacaaactgggtaaaggagttaacgacggcgataatcggtttgccgaaatcggcatcggtcattccggttgcgcgccacaacgcgcgggcgcccgccatattgcggccatgtgtggtggtggcggaacggtacttaggcatgctctttttactcccatctgtgtttattaaatgggacggtgcgtgccgtcccatttttaattacttacttaccggatccaaccagccccatttatcttctgtttcaccggtgaagaggccaaagaaggcttcctgaatgcgtttggttaccggaccgcgacggcctgcgccgacctggatgccgtccacgctgcgcaccggggtgatttccgccgcagtgccggacatgaagacttcatccgccagatacagggattcacgggacaacacctgctcgcggacttcgataccaagatctttcgccagtttgatgatcgcgtcgcgggtaatgcccggcagcgcggaagaggtaaacggcggggtgaacagtacaccgtccttcacttcaaacaggttttcccctgcgccttcggagatatagccgttaacatcgagggcgataccttcctgataaccgtgacgacgcgcttcgctgccgaccagcagagaggagaggtagttgccgcccgctttcgccgcggttgggatggtgttcggcgccgcgcggttccaggaagagaccattgcatcgatcccctgctcaagcgcttctgcgccgaggtaggctccccatgggaacgccgcgatgatcacgtcagtgttgtaacccggaggcgggtttacccccatgccgacatcgccaacaaacaccagcggacggatataagcgctggtcagattattggttcgaatgacttcgcggcaggcttccatcagttcgtcgacgctctgggagaccgggaaacgataaattttggctgaatcatgcagacgctgcatatgttcgcgatgacggaacaccaccgggcctttgtgcgagtcgtagcaacggatcccctcgaataccgaggtaccgtagtgcagcgcatgggacatcacatgaactttcgcttcgccccacggaaccatctcgccattgaaccaaatgtaatcagcttttttcgtcgtcatttttcttcctttgcgctcaggcgcggatttgttgtgatgtgggttgctggatctcgacgcaggcaacgtcgaccagtttgcttaattgactaaacagtaattcgacgggccgcgggctggcaacggtcaattcgatatttatgttctgtgcgtccggcgcggtttccatgttcattgcgcagatgtggaaaccccggtggcggacaacgcgcagcacgcgctctaaggtttccggattgaaacgtgcctgtaaagcgacctgatgttgcatcatgataatttctccagcatttcagagttactggcgccgggcggcaccaacggccagacattctcaagttcgtcgattgagacatgaagcaggtatggcccctggctcgaaagcatggtgtcgagtgccgcttcaacctggtctttacgggtgatgtgttggccaggaataccgaaggcgctggccagcgtgaggaaatcagggttatcagtcagagtggtttcgctataacgttcctggaaaaacagctgctgccattgtcgaaccatccctaaccgctggttgtcgagtaacacgatcttcagcggtaactgcttgcgtttaacggtgcccagctcctgtacattcatcatgaaggagccgtcaccggagatacagatcaccgtatcgttagggcgcgccacctgggcgccaacggcggccggcaggccaaagcccatggtgcctaagccgctggaggtgataaagttttccgggcgggtataggtcatatgctgagccgaccacatctggtgctggccaacgtcggtggtcaccacgctgtccgccggcttgcggtcggaaagctgcttcagcagcagcggcgcgtagattgcctcaccgggatgatcgtaacgccaggcatgctcggcacgcagtgcggcactccgctcgcgccagccatcgatagctaacggctgctgcagcgccggcagcaggcagttcagatcgcctgtcagaccgatatgcgcctgacgcagcttgttcagctccgccggatcgatgtccatgtggatcactttggcatgcggtgcgaaggtattgagcttaccggtcacgcgatcgtcaaagcgcgcgccgacggcgatcagcagatcgcactcctgtactgccaggttggccgccttagtgccgtgcattcccagcatgccgagataatagggataatcagcatccaccacgcccagccctttcagggtgcaggttgccggcatcctggtcaccgccaggaattcgcgcaaagccggtaccgcctgcgccatgccgaccccgccgccaacatacagcatcggttgctgcgattgggccagcatctgcagagcctgcgccacttccgcctgcggaaatgccatctcatcggcgacggtagagaaatggggatcgaggtcgccctgcgccatctgaatatccttagggatatcaaccagcaccggacctggacggcctgagtttgccacctggaaagcctcagcaataacccgcggcagttcgtccagagactgcacaaggaaactgtgcttagtacaggccagtgacaaaccgagaacgtctacttcctggaacgcatccgtgccgatgaagggtgcggccacctggccggtgatagctacgatgggaatagagtcaagcagggcgtccgccaggccggtgatcagattggtcgcgcccgggccggacgtcgcgatacacaccccggttttaccggttgctcgcgcataaccaatggccgccatggctgccccttgctcatgccggcacagcaggtgctccacgccgccgtcatacagtgcatcgtaaaccggcataattgcgccacccggatagccaaaaactgtgtcgactccctgtgtccgcaaagcatgtaccacccactgcgcgccattcatagttagttccccgtcataaatcgggagaaacagaattttatgctaaaagtcatcatctgctcctcgcttaggttatttcagttataaaaaaacccccggacctttcggtgcgggggtcttagttcgttaaggcttgatttctaagcctttcctcgtccaagtgcagccccgcacggtgggataataatcaccaccacgctaatcacgaccaggctaatcactcgtagaagggctgtcattttctatactttctggcttcttgttcgaaggaatacctaaagagttaccacagacatcacataaagcacaagatttttttatatcttcgttgctaatcagcctaacggtttcaataaaaataattgttttatatgaaaaaaatcaaaaatgaaaaaaattcagttttctcacccctgccgcgctcttcggcgccctctttgccaacatagctctgttttgcgatcaaacgtccattttcggctaaatgtaacgatatgccgcgaaaagtatggatacgcagttctaaattcgcactttttccattctcgctttacgtcatgccaaccataattcttctctgtccaggaggttttatgtcgctcgctatcgtctatactcgcgcggcgctcggtatcgaagcgccattgattaccgttgaggttcatctcagcaacggtcttcctggtctaactatggtcgggctgccggaaaccaccgtgaaagaggcccgcgaccgggtccgcagcgccctgatcaacagcggctacgcttttcctgcgaagaagataaccattaacctggcgccagcggatctgcccaaagaaggcggacgatacgatttgcccatcgctctcgcgcttctcgttgcctcagagcagctcaacacgacgcgactgaatcaatatgagtttgtgggcgaactcgcccttacaggtgggttacgaggcgttccaggggcgatccccagcgcaatggaggccatcaaagccggccggcgcattgtcgtctcctctgacaatgcggcggaggtcggcctgatcggcggcagcgattgtctggtcgccgaccatctgcaggaggtttgcgcatttcttgcggggcagacatcgctttcgccgcctctcgccgaggcgcctgctcgggatgaacgttacgaagatctgctcgatgttatcggccagcagcagggcaaacgagcgctggagattgtggccgccggtggtcacaacctgctcctgataggcccgcccgggaccgggaaaaccatgctagccagccgactccccggtctcctgccgccattaagcaatcaggaagcgctggagagcgcggccatacagagtctggtcaacctccacaccgcaaagacgcggtggcgtcagaggccgttccgcgccccccaccatagcgcctcgctggcagcgatggtgggcggcggctcgataccggtccccggtgagatttccctggcccataatggcgtgctgtttcttgatgaactgccggagtttgagcggcgggtactggatgcgctacgcgaacccattgagtcaggcaagatccacatatcacgctcgcgcgccaaaattgactatccggcgcgctttcagcttattgcagcgatgaatccaagcccgacaggacattatcagggtaaacataatcgtgcatcgccggagcagacattgcgctaccttggacgcctatcaggccccttcctcgaccgcttcgatctttccttagagatcccattgccaccgccaggaatactgagtcagggctcgcagggcgaagaatcgagcgcaacggtccggcagcgggtgctggcggcgcgtgaacgacaaatgctcaggcaaaataaactcaatgcccatcttgagaatcgtgaaatgaagaactgctgtcgcttaaggcgggaggatgctgtctggctggaacagacgctaacgcagctggggctttctattcgcgcctggcagcgtctgttaaaggttgcgagaaccattgccgatctggcagaggttgaagagattgaacgctgtcatttgcaggaggcgctcagctatcgggcaattgatcggatgctcaaccatctgcagaaaatgatggcgtaaaaaaaagggcttacgcccttttttcttagtcatcgctttcggtgtaatcgtcagcgccttccatctgcggtttgccgccggacagagtatggaaacgcttcggccgcttgatacgcgccatatacttaatccatacgcgttctgcttccgtcaccggctcacgttcaccacggcacaccgagacaaattgtttttcatcttcggtaacaggttcgcgcttacccagttccagttcgttaaaggcataaccatgacgttccagcagttgcgcctctttgatggtgaaatcaccgtgacgggagaacccgcgtggataatttttattgtcgaaaaaacgattagtcgtcgtaaagctttccgccatcctacacgctcctgattctttggccgagctatttatggcgcggagtattagttacgcttgacagagcgtcaaacaaaacatttaaatcatcacgacaaataattttgtggagaacggtgtggatacggaattgctcaagactttcctggaagtgagtagaactcgtcactttgggcgagcagcagaggcgctttacctgacacagtcagcagtcagctttcgtattcgtcagctggaaaatcaacttggtgtgaatctgttcacccgtcatcgtaataacatccgcctgacgaccgccggcgaaaagctcctcccctatgccgaaacgctcatgaatacctggcaggctgcgcgcaaggaggtggcacactcttcgcgacataatgaattctccattggggccagcgcctccctgtgggaatgtatgcttaacagctggctcggtaccctctacagcgcaccttacaatctccagtttgaagcccgtatcgcgcagcggcagtcgttggttaaacagcttcacgaacgccagttggatctgctgatcaccaccgaatcgccgaagatggatgaattaagcagccagctgttgggtaattttactcttgccctgtattgcgcatcgcctgcaaaaaacagaaatgaattgaattacttgcgccttgaatgggggcctgattttcagcaaaacgaagtgggactgataggaagcgatgatgttccgctgctcactacctcttcagctgaactgatctatcagcaattatcgcgcctgaacggctgctgttggctacctgttcgctgggcgaaagagaagcatgggttacatacggtcatggacagcgctacgttatcccgtccactttatgcgatctggttacaaaatagcgataagcaggcgcagatccatgagatcctgaaaaaccctattctggaataaacgctactctccatggacggagatcagcaaggtattttcgtaggggatattgccaatggagattagagataaaaaaaaatcctttgcctgagcaaaggattcttataaatggcaggggcggagagactcgaactcccaacacccggttttggagaccggtgctctaccaattgaactacgcccctaaaattttcttaccactaagcctgctatttgagcaggcttaatgttaaataagtggcggaacggacgggactcgaacccgcgaccccctgcgtgacaggcaggtattctaaccgactgaactaccgctccaccgaatttcttcgctttattaccaccggttgtcaccccggcttactgcaatttgatgcctggcagttccctactctcacatggggagaccccacactaccatcggcgctacggcgtttcacttctgagttcggcatggggtcaggtgggaccaccgcgctagtgccgccaggcaaattctttgtgctcagtacgcaattctttatattgcgtactcaactctgaatctaagctgacaattctctcaa

SEQ ID NO: 145 - DNA, 83348 bp, Unknown
  source: /note="Description of Unknown: MKP2_2161_1 Mutant Bacteria sequence"
gtcgcccgcctgcaggccccgcacggcacaggcatgggcggcgcgccgcgccccccccgggcgcccgcccgccccccccccgccctaccgccggggtggtgtttagcgcccgcatgattgaccgcgtcggcacaggcatgggcggcgcgccgcgccccccccgggcgcccgcccgccccccccccgccccaggcgccgccccacgcagcgccccaaacatctcccgaccggttcccacgcgcgacgcgctgaggtcagggatatgcggctgacgcgccgccagttcggcctcatccaccagcagcgtcagttcccccgtctgtccgttcacgcgaataagatcgccatcgcgcactttcgccagcaagccgccatcatacgcttcaggcgtgacgtgaatggctgacgggactttaccggaggcgccagagagtcggccatcggtcaccagcgctattttgaaacggcggtccaataatacaccaagtggcggcataagtttatgtaattctggcatcccgttcgcttttggcccctgatgacggaccaccaccacgcagtctttgtccagcagccccgcttcaaaggccggcaacacgtcgtgctggctctcaaataccaccgccggcgcttcaatcacctggttctccaccgggaccgccgaagttttcatcaccgcgcgtcccaggttgccgctcagcaccttggtgccgccgtggcgggagaatggtttttcaaaggtcgcgatgacctggtcgtccaatggcgctgtcgccccttcgcgccagtccagctcgccgttattcagccatggctccagggtgtagcgcgacaggccaaagccggccacggtgtgaacatcctcatgcagcaggccgcctttcagcagctcgcgcaccagtaccggaacgccgcctgccgcctggaagtggttgatatccgccgggccgttgggatagaggcgcgccagcagcggcaccacgtctgacaggtcggagaaatcgtcccagttaatgataattcccgccgcgcgggccatcgccaccaggtgcatagtgtggttggtggagccaccggtcgccagcagcgccacgatgccgttgaccaccactttttcgtcaaacattttgcccagcggcatccactcattgccgttgccggtcatgcgggtgacctggcgcgcggcggcggcggtcagcgcttcccgcagcggagcatccggatggacaaaggacgagcccggcagctgcatgcccataaattcgaccaccatctggttggtgttcgccgttccgtagaaagtacaggtccccggcgcgtgataagaggcggcttcggactccaggagcgccatacggtcaactttcccttctgcatacagctggcgaatgcgaaccttctctttattcggcaggccgctggccatcggaccggagggaataaagaccgacggcagatggccaaatgagagcgccgccatggtcagaccgggaacaattttatcgcagaccccgagatacagggccccgtcgaacatgttatgcgacaggccgatggcggcggacatagcgatcacctcgcggctcaggagtgaaagctccatcccgtcctgcccctgcgttacgccgtcgcacatcgccggcacgccgccggcgacctggccgaccgcattggcgctgtgcagcgctttgcggatgatctccgggtagtgttcatagggctggtgagcggacaacatgtcgttgtaggaggtgatgatggcaatgttgttgcgcaacatgctcttcagggaggctttgtcgtcagcctggcaggccgcgaatccgtgagccagattgccgcaggccagttgcgcacgatgcacggtgtcggttttggcctggttaatccttgcgaggtaagccgcgcgggtgtcacgcgaccgttcgataatgcgatttgttacccgtaacattgtcgaattcataaaggctcctcaaatttttatctgtccggccgctgcgtgatgacgtgttgacgtggtaaaggccacaaacaccagcgctcaggggcaaaatgtctgcaggcagtgtaataaaaaaagccccgtgggtgaatcctcacggggcttaaaagattaaaaagcgtgcgactttctgcgtcagatcatgttaccggtaaaataaccctgacggattagcctccagccttactcaaactcgttccatgaacgaccgtcgcgagtgatcatggccaccgacgcaaccggtccccaggtcccggcctgatacggtttcggcgcatcgcggtcggctgcccaggcttcggtaatggagtcaacccatttccacgcctcttctacttcgtcgcggcgaacgaacagcgcctggatgccacgcatggtttccagcagcagacgttcataggcatcggccaggtgcgtctggttgaaggtttcggagtagctcagatccagtttagtgatctgcaggttatgtttatgatcgaggcccggcactttgttcagtacctggatatctaccccttcgtccggctgcaggcgaatggtcagcttgttctgcggcagctcctgccaggtctctttaaacagattcagttccggggttttgaagtaaaccactacctctgagcatttggtcggcagacgtttgccggtgcgcagatagaacggtacgccagcccagcgccagttatcgatatcgacgcggatcgccacgaaggtttcggtgttgctggtcttgttggccccctcctcttcgagatagccaggcacttttttgccctgggcaaagccggcggtatactggccgcgaacggttttctcgcgcacgttggagcggtcaatacggcgcagggatttcagcaccttgaccttttcatcacggatgctgtcggcgctgagatcggacggcggtgacatggcaatcatgcacaggatctgcagcaggtggttctggatcatgtcgcgcatctgcccggcctggtcgaagtaaccccagcgcccttcaatacccacctcttccgcgacggtgatttcgacgtgatcgatggtgcggcagtcccagttattgacgaacagggagttggcgaagcgcagcgccagcaggttgaggaccgtctctttaccgagatagtggtcgatacggtagacctgacactcttcaaaaaactcgccgacctggtcgttgatttcacgggaggtttccagcgaggtgccgagcggtttttccatgaccacgcgcgcaggcttggcattaagcttcgcttcgcccagccctttacagatcgcgccaaaggtgctcggcggcatggcgaaatagttgatggtgacacggttcttttgatccagcatctcacccaggcgggtgaagccgctggtgtcattgacgtcaagattacagaactccaggcgtccgctcagggtatcccacaaaccttcatcaattttttccttcatgaaggtttccagcgcttcgcgcacgactttggtataagccgctttatcccagtcggcacggccgacgccaatgattctggtgtcagcgtggatctggcccgccttttcaagctgatacagggaaggcaacaatttacgccgcgccaggtcgcccttcgcgccgaaaatgaccaggtcgcatgcctgggccgtttgcgttaccgccatgtcattctcctcagttgatagtctggtgcttttgccaggctatatttgtaattttcttacactgcactgtactgtgtttacgtatttcccgaaagccttccccttcgtttgcggcggtaaaaccgcacagggtgaaaacattcggcgatgatttgggcattcggccgttattgttcgttgtttgtacctggttcaggtcagtaaaatacgaccctgatcatgtaatgaaaaaaaacaacatcatttcacgtcattcctcaccgcttgcgcttgcggaggggtatattcttgctaaaacgcccaatgatttcacccattaatgaaatcgtttccattgatgagcgccctgttactaatgaacatgctggaaaaaatccagtcccgactggaacaccttagcaaatctgaacgcaaagtggcggaagtgatcctcgccacccccgagcaggccattcattcgagcatcgccgccatcgcccttgaggccggggttagcgaaccgaccgtcaatcgcttctgccgtagtctcgaaacccgcggattccctgacttcaaactgcatctggcccagagccttgcgcacggcacgctctatgttaaccggaatgtcgatgaagacgacagcgttgagtcatacacgggaaaaatattcgaatcggccatggcgagtttagatcaggtgcaccattctctcgacatgtcggcggtaaatcgcgcggtggatctgctgactcaggccaaaaaaatcgcctttttcggcctcggctcctcagcggcggtcgctcacgacgcgatgaacaaatttttccgctttaacgtgccggtcatctattccgacgacattgtcctgcaacgcatgagctgtatgaattgcgatgacgatgatgtggtggtgattatctcgcataccggaagaaccaagagcctggtggagctggcgcagctggctcgtgaaaacgatgccatggtgatcgctctaacctccgccggtacgccgctagccagggaagccacgctcgccattacccttgatgtgccggaagataccgacatctatatgccgatggtctcccgtttggcccagttgaccgtcattgacgtgttggcgactggctttaccttgcgtcggggggcaaaattcagagataacttgaagagggtcaaggaagcgctgaaggaatcgcgttttgataaagaaccattcgtacccagtgataatcaataaaagttgataacaagcagtaccccattacaccttcgataacgatccggctgtgcgacgttgcaggctggcgctaccgaatccatgttcacgcaacaccaaagttgtatcagtcaacggagtattacatgtccagaaggcttcgcagaaccaaaatcgttactaccttaggcccggcaactgaccgcgataacaacctggaaaaggttatcgccgcgggcgcaaacgtagtacgtatgaacttctctcacggcaccccggaagatcatcagctccgtgccgacaaagtgcgtgagattgcggcaaaactgggccgtcatgtggccatcctcggcgacctccagggaccaaaaattcgcgtatcgaccttcaaagaaggcaaaattttcctcaacgtcggcgataaattcctgctcgacgcaaaccttggcaaaggcgaaggcgacaaagagaaagtcgggatcgactataaaggcctgccggcggacgtcgtgccgggcgatatcttattgctcgacgatggtcgcgtgcagctgaaagtcctcgaagttcaggggatgaaagtgttcactgaagtgaccgtcggcggcccgttgtccaacaacaaagggatcaacaagctgggcggcggcctgtctgccgaagcgctgaccgacaaagataaagctgatatcgtcaccgccgctaaaatcggcgtcgactacctggccgtctctttcccgcgctgcggcgaagacctgaactacgcccgtcgcctggcgcgcgatgccggctgcgatgcgaaaatcgtcgccaaagttgagcgtgccgaagcggtttgcgatcaggatgcgatggacgacgtgatcctcgcctccgatgtggtaatggttgcccgtggcgacctcggcgtcgagatcggcgatcctgagctggtgggcatccagaaagcgctgatccgtcgtgcccgtcagctgaaccgttccgtcattaccgccacccagatgatggagtcgatgatcaccaacccgatgccgactcgcgcggaagtgatggacgtggccaacgccgtgctggatggtaccgatgcggtgatgctctccgcggagaccgccgccggtcagtatccttcggaaaccgtggccgcgatggcgcgcgtgtgtctgggcgcggaaaaaatccctagcctcaacgtctccaaacaccgtctggacgtccagttcgacaacgtggaagaagcgattgccatgtcggcgatgtatgccgccaaccacctgaaaggcatcaccgccatcatcaccatgaccgaatcgggccgtaccgcgctgatgacttcgcgcattagctccggtctgccgattttcgccctttcccgccacgagcgcaccctgaacctgaccgccctctaccgcggggtgacgccggtgttcttcgacagccagaatgacggggtggccgccgcgcacgacgccgtcaatctgctgcgggacaaaggctatctggtctccggcgacctcgtggtcgtgacccagggtgacgtgatgagcaccatcggcagcaccaacaccacccgtatcctcaccgtcgagtaagcacggtagagataaaaaagcctcctgacggaggctttttttatttctttttcgggaacagctctttgcgtttatagggctcgatttcacccggcttgcgcgttttcagcagcttcaggatccaggtatactgctcggtgtgcggcttaacaaacacttccacttcttcgttcatccgccgggcgatggtcgtatcgtcagcgtccagcagatcgtccatcggcgggcgcaccagcaccgtcaggcggtgcgtcttgccatcgtagaccgggaacagcggtacgacgcgggcgcggcatactttcattaagcggccaatcgccggcagcgtggccttgtaggtggcaaagaaatccacaaactcgctgtgttcggcgccgtgatcctgatcgggcagatagtagccccagtagccctggcgcaccgactgaataaacggtttgatcccatcgttgcgcgcgtgcatacgcccgccaaaacgacgacgcacggtattccacacgtaatcgaacaccgggttaccctggttatggaacatcgccgccatcttctgcccgccggaggccatcagcatcgccgggatatccacaccccatgcatgcggaacgagaaaaataaccttctcattattgcgctgcatctcgtcgatgatcgctttcccctgccagtcgacgcgggcaaggattttctgcggatcgcgcaggcccagctcggccatcatcaccatcgcctgcggcgccgaggcatacatggcgtcgatgatcgcttcccgctcgtactcacttttttccgggaagcagtacagcaaattaatctgcgcccggcggcgcgagcttttcgccagacgccctaccagacgaccgagtttgccgaggagcggatcgcgaaaggatggcggcgtcagcgcaataccggcgaaggcaaagacccccagccaggcgccccagtagcgcggcagtaaaaaggatttttcaaacttagggataaactcaatattattttttttcgtttccatgcccaatccgcagatcgactgcttaatcaagataatgggatagtgtagcgagacgtcgggtatcctacaaaagaaaaagccggcgccctggggcaccggctttccactgaccggtggttagtcaaaccgcagctgcggaacgacctctttgacctgtgccagatagtcggtccggtcggaaccgctcagcccttcggtacgcggcagcttagccgtcagcgggttgaccgcctgctggttgatccacacttcgtagtgcagatgtggcccggtagagcgtccggtattccccgacagcgcaatgcgatccccgcgcttcactttctgccccggcttcactaacagcttacgcaggtgcatgtagcgagtggtataggtgcgaccgtggcggatcgcgacgtaatacccggcagcgccgctgcgtttggccacgactacttcaccatcgcctaccgccagcactggcgttccctgcggcatcgcgaaatcgacgccacggtgcggcgcgacgcggccggtgaccgggttcagacgacgcggattaaagttagaggagacgcggaactgacgcgccgttgggaagcgcataaagcccttcgccagacccgtcccgttgcggtcgtagaatttgccgtcttcggcgcggatggcatagtaatccttaccgtcagagcgaagacgcacgccgagtaactggctttgctcacgtttgccgtcgagcatttcgcgcgacatcaataccgagaattcgtcgcctttcttcagcttacggaaatccatctgccactgcatggccttgatcaccgcgttgatttccgtgctggtcagcccggcatcacgcgcgctggagacaaagctggcgccgacggtgcccttcagcacgctgttgacccaatcgcctttctgcagctcgctgctcattttaaaaccgttatccacacgggtataggtgcgggtctcgcggcgggacatctcccaggtcaggctctgcagatcgccgtcggcggtcagggtccaggagagctgctggccaatcttcaggttgcgcagctctttatcggcggaggaaagctgggcgatatcgcccatatcgataccgtactggttcagaatactgctgagcgtatcgccggtcgacaccacgtattcgtgcccgccggcatcgctatcggctttttcgtcgagctcatcctgaggaatggcttcttcttcctgcggggcctggtcgatcggctcggaggcttccggcagcagggagcggatctcgcttttttccagttcaatggttctgacgatgggggcggattccgggtggtaaatgtagggtcgccagacggcgaccgctaaggtaagaacgctaagcgaccccagcataacgcgatgaggtcgtggcagattgttgaatgcctgagtgacagcgcgggctatctgttgcacgtattcacttcctcgttaatctcctttcaggcagctcgaatactgattcgccagttgggtgaggaattgcgggtaactcgttttacccagcgtaattcctgtccccagtggatccagggtccccatgcgcacagacgtgccccgggcaacagcttcgataaccgctggcctgaactgtggctcagcaaaaacgcaagtggctttctgctcaaccagttgtgttctgatttcgtgtaaacgctgcgcaccgggctgtatttcagggttgacggtaaagtgccccagcgaggtcaaaccgtagtgtttttcaaagtaaccgtaggcgtcatgaaaaacgaaatagcccttccctttcagcggtgccagctcattgctcacctgcttgtcggtcgccgccagcgcggtctcgaactgctgcaggttgctgtcgagtttggctcgactctgcggcataagttccaataatttatcgtggattgcaaccgccgaaagccgcgctatctctggggataaccacagatgcatattgtaaataccgtgatggtgatcgccgtcacctttttctgctgcgccatggtcatgaccatggtgatcgtcatcgtcgtccgccccggtgatgagcagcggtttgaccccatccagctcggcaatcgtcacctttttattcgccgcaatgctttgcgtcgacttatccataaaggcttccatttccggaccaatccacaccactaagtctgcgttctgtaagcgttttacatcagaaggacggagggaataatcatgctcggaggcgccatcgggcagcagcacctgggtctcggtcaccccatcggcgatggccgccgcgataaagcccagcggtttcatagaagtcaccacggcggcgctggccagcggtacctgcgcgaacaaaaaaacagcgccaagtccagcgcaaagaagcgtatttttatgtaacataatgcgtctagtcatcgaaataagtgagtttgatgtgatattataacattcactagcttgtgcaacccctaaattactatgacaaaccttgtaacgctggaaaatgtctcggtggcctttggccaacgccgcgtgttgtctgacatctcgctggctctcacgccaggcaaaatcttaaccctgctgggccccaacggcgccggcaaatcgacccttgtgcgggtggttctcgggctggtagcaccgacagagggtgttatcaagcgtgacgcacgcctgcgcatcggctatgtgccgcagaaactgcatctggacgccacgctgccgctgaccgttagccgcttcctgcgtttgcgcccgggcacccgtaaagacgacatcctgccggcgctgaagcgcgtgcaggcggggcatctgatcgatgcgccgatgcaaaagctctccggcggcgaaacgcagcgcgtactgctggcccgcgccctgctcaaccgtccgcagctgctggtgctggatgaaccgacccagggtgttgacgtcaacggccaggtggcgctctacgatcttatcaaccagctgcgccatgaactggactgcgcggtgctaatggtatcccacgatctgcatctggtgatggccaaaaccgacgaagttctgtgcctgaaccagcatatctgctgctctggcgcaccggaggtggtctccatgcacccggagtttatctccatgttcggcccgcgcggcgcggaacagctggggatataccgccaccaccataatcaccgccacgaccttcaggggcgaattgtactgcgtcggggaaacagccgctaatgattgaacttctgttacctggctggcttgccgggatgatgctggcctgcgccgctggtccgctgggctcctttgtggtctggcgccgcatgtcttatttcggcgacacgctggcgcatgcgtctctgctcggcgtcgctttcggtttattgcttaacgtcaatccgttctatgcggtgatcgtcgtgaccctgctgctggccggcgggctggtgtggctggaaaaacgaccgcatctggcgatcgataccctgctgggcatcatggcgcacagcgcgctgtccctggggctggtggtggtcagtctgatgtctaacgtccgcgtcgatctgatggcgtacctgttcggcgatctgctggcggttacgccgcaggacctgatcgccattgccattggcgtggtgattgtgattggcattctgctctggcagtggcggaatctgctggcgatgaccatcagtccggacctggcgtttgtcgacggcgtgaagctgcagcgggtcaagctgctgttgatgctggtcaccgccctgactatcggcgtggcgatgaagttcgtcggggcgctgatcattacttccctgctgattatcccggccgccaccgcccgccgttttgcccgtacgccggagcagatggccgccgtggcggtgggcgtgggcatgctggccgttaccggcgggttaaccttctcggctttctatgataccccggccgggccgtcggtggtgctctgcgccgcggtgctgtttattctcagcatgacgaaaaaagccgccagctgaaaatgaaaaagcccggtcacgctgctgaccgggcttcaccatgaactgctcaaccgcaacgcgctacggcatttccggcggcgtaatcccgaaatgattccaggcgcgcaccgtcgccattcttccccgcggcgtacgctgcagaaagccctgctgaattaagtagggctccagtacatcttcaatggtttcccgctcttcgccaatcgcggcggcgaggttatccagccccaccgggccgccaaagaacttatctatcaccgccagcagcagcttacggtccatatagtcgaacccttccgcatcgacgttaagcatatccagcgcctgggcggcaatatcggcggagatggtgccgtcgtggcgcacttccgcgaagtcacgcacccggcgcagcagacggttggcaatacgcggcgtgccgcgtgaacggcgggctacttccagcgcgccctcgtcgctcatctccagccccatatggcgggcgctgcggctgacaatatgctgcagatcggggatctgatagaactccagacgctgcacgatgccaaagcggtcgcgcagcggcgaggtcaacgaaccggcgcgggtggtggcgccgatcagggtaaacggcggcagatcgatcttgatggaacgcgccgccggaccttcgccaatcataatatccagctggtagtcttccattgccggatagagcacctcttccaccaccggcgagaggcgatggatctcatcgataaacagaacatcgtgcggttcgaggttggtgagcatcgcggcgagatcgcccgccttctccagcaccgggccggaggtggtacgcagattcacccccatttcattggcgacgatattggccagggtggttttccccaaccctggcgggccaaaaatcagcaggtgatcgagggcgtcgccgcgcagcttcgccgcctggataaagatctccatctgcgaacgcacctgcggctggccgacatactctgccagcaattttgggcggatggcgcggtcagcggcctcttcaaagccgctgctgtctgccgataccagccggtctgcttcaatcatcccttacctcacaacgcagcgcgcagcgcttcgcgaattagcgtttcactgttggcgtccggacgcgcgatcttgctgaccatccggctggcctcctgcggtttatagcccagcgcgaccagcgcggcaaccgcttcctgctcggcatcgtccgccgttgggcctgccggcgaggtcagcaccagatcggccgccggggtgaacaggtcgccgtgcagccctttgaagcgatctttcatctcaacgatcagacgttcagcggtttttttgccaatccccggcagcttcaccagcgaggcgacctcttcccgttcaacggcgttgacgaactgctgcgccgacatgccggagaggatcgccagcgccagcttgggccccacgccgttggttttaatcagctctttaaacagggtacgttcctgtttgttgttaaatccatacagcagctgggcatcttcacgcaccacaaagtgggtgaagacgatcgcctcctgcccggcctccggcagctcatagaagcaggtcattggcatatgcacttcatagccgacgcccgccgtttccagcaacaccagcgggggttgtttttcgagaatgatgcctctgagtctgcctatcacgtggggctcctgcgttatggtctaagtatctggcggtatcataaaaaaaggctggatagatatccagcctgatttgcgattatcgtaagcgcccccgcgccagattgagccgggtctcgctgatctgagcggcattctggctgacatggcaatgggtgatggcaatcgccagcgcatccgccgcatccgcctgcggattggcgggcagcttgagcaaggtgcgcaccatatgctggacctggctcttttcggcgctgccaatcccgaccacggtctgcttgacctgacgggcggcgtattcaaacaccggcagcgcctgattggtcgctgcgacgatcgccaccccgcgcgcctgcccgagctttaacgccgagtcggcattcttggccataaagacctgctcaatggcgaaatagtcgggctggaactgggtgatgatctccgtcaccccggcgtagatcagcttcagccgcgacggcagatcgtccactttggtgcggatgcatccgctgcccaggtagctcagctgccgcccaacctggcggatcacgccataaccggtaacgcgcgaccccgggtcaatgccgagaataatagccatcacgcgcctccggttaaccgtggatgcggctgcatcacagggtggctgcgacctcgtcggagatctcgccgttatggtacacttcctgcacgtcgtcgcagtcttcgagcatatcgatcagacgcagcagcttcggcgccgtctcggcatccatatccgctttggtggacggaatcattgagacttcggcagcgtcggctttcaggccggcggcttccagcgcgtcgcgcacagcgcccatctcttcccaggcggtgtagacgtcgatggcgccgtcgtcataggtcaccacgtcttctgcgcctgcttccagcgccgcttccatgatagtgtcttcatcgcctttctcgaaggagataacgcctttcttgctgaacaggtaggagacggaaccatcggtgccgaggttacccccggttttggtgaaggcgtgacgcacttccgcaacggtacggttacggttgtcggacagacattccaccatcaccgcggtgccgccaggaccgtagccttcataaatgatggtttccatgttcgcgtcttcatcgccgccgacgccgcgcgcgatggcgcggttcagggtgtcgcgagtcatgttgttagacagcgctttatcaacggccgcacgcagacgcgggttggaagccggatcgccgccgcccagacgcgcggcggtgaccagctcgcgaatgattttcgtaaagattttaccgcgtttggcatcctgtgccgctttgcggtgtttggtgttggcccatttactatgacctgccataaaaaactctccaaaaagcgcgccctttcaggcggcgttaattacaaattcttcaatcgcctgccggttgctccacgacttggtcagcgcagcggcttccgtcgcgctgacccagcgataggccagatgttcggtgaaagtaatctcccgctcatgaggcagcgcaagacagaaccagaattccgtattgcgctctacacccggcgcatagcgatgacgcaaatgagaaaatatctcgaactccaccgtgcgctgacagtcgattaaggtcagttgctcgcaggcaacgtcaatggcgacctcttcctttacttcacgcgcggcggcctgcagcgcggtctctccagcttccaggctgccggtgaccgactgccagaacgcgggatcgtcgcgccgctgcaacatcagcacccgtttcgtatcttcggcgtaaatgaccaccagcaccgaaacgggcagcttaaatgacatattacttgttctccagagacgcttttgcctctttctccacaacctgaatacccagctcaccgagcgccgccggattggcgaagcttggcgcttcggtcatcaggcaggcggccgcggtggttttcgggaaagcgataacgtcgcggatgttatcggtaccggtcagcagcatggtcagacggtcaagaccgaaggccagacccgcatgcggcggcgtaccgtacttcagcgcatccagcaggaagccgaatttctcacgctgttcctgttcgttaatgcccagaataccaaatacggtctgctgcatctcgccgcggtggattcgcaccgaaccgccgccgacttcataaccgttaataaccatatcgtaggcgttggctacagcctcttccggggcggctttcagctcatccgcggtcatatctttcggcgaggtgaacggatggtgcatcgccgtcaggccgccttcgccgtcgtcttcgaacatcgggaagtcgatcacccacagcggcgcccatttgctctcgtcagtcagactcaggtctttacccagcttcagacgcagcgcgcccagcgcgtcggccactactttcttgttgtcggcgccgaagaagatcatgtctccatcctgcgcgccggtgcggtcaaggatcgcttccacgatttcagcggtcaggaatttggccaccgggctgttgatcccgtccatgcctttggcacgctcggtcactttaatataggccagccctttcgcgccgtagatcttcacaaagttgccgtattcgtcaatcagcttgcgggtcagagaggccccgcccgggacgcgcagggccgccacgcgccctttcggatcgttggccgggccggcaaagaccgcgaattccacagacttcagcaggtcggcgacgtccaccagctccatcgggttacgcagatccggtttatcggagccatagcgacgttcggcttcggcgaaggtcatgatcgggaactcgcccaggtcgacgcctttcacttccagccacagctgacgcaccatcgcctccatgatctcacgcacctgcggcgcggtcataaaggaggtttccacgtcgatctgggtgaattcaggctgacggtcggcacgcaggtcttcatcgcggaagcatttgacgatctgatagtagcgatcgaagccggacatcatcagcagctgtttgaacagctgcggcgactgcggcagcgcgtagaatttgcctttgtgcacgcgggaaggcacgaggtaatcgcgggcgccttccggggtggctttagtcagcatcggggtttcgatgtcgaggaagccatggtcgtccataaagcggcgcacaaagctggtaattttcgcgcgggttttcaggcgctgcgccatctccggacgacgcaggtcgaggtagcggtatttcagacgcgcttcttcggtgttgacgtgattggagtccagcggcagcgattctgagcggttaatgatcgtcagatcggaagccagcacttcgatagcgccggtggccatgtccgcgttgatgtttttctcttcacgcgcgcgaacggtgccagtgacctgaatgcagaactcattacgcagttcagaggctaacttcaacgcatccgcacgatccggatcgaaaaacacctgaacgatgccttcgcggtcgcgcatatcgataaaaatgaggctaccgagatcgcgacggcggttgacccaaccacacagagtcacctgctgcccaacgtgggactgtcgaagctgtccgcaatattctgtacgcatgagatatcccttaacttagccgtcggcggattgtcgtctgccctgcaggcgacgaggtcgcagctttagctgatgtcacaactgaatgaaaaaaggcggctattatactggaaattctgtcgttcgataagtccgacgcacgatgtacgctgctttgctgcgcgcttaacgtccacactcacataaattaacaaaatttgttactcttttgctgaagccgcaaaggtattgtagccgcctgacaacagatgaagatacggggataccatgttagaactcaatgcaaaaaacacggcgctggtggtaatcgatctgcaggaaggcattctgcctttcgccggcggcccgcatcgggctgacgaggtggtggcgcgcgccgctcgcctggcagacaagtgccggcaacagggttcgccggtcatcatggtccgcgtgggctggtcggccgatttcgccgaagcgctgaaacagcctgtcgacgctcaggccggggcgcatacgctgcccgaaaactggtggacctacccggccacgctgggtaagcaggagagcgatatcgaagtgaccaaacgccagtggggcgcgttctatggcaccgaccttgagcttcagctgcgccgccgcgggatcgacaccattattctctgcggcatctccaccaacatcggcgtcgaatccaccgcccgcaatgcctgggagctgggttttaacctggtcatcgccgaagatgcctgcagcgccgcctccgccgagcagcatcagggcagtatgacgcatattttcccgcgcatcggccgggtgcgcagtaccgaggagatcctcacggcgctatgatttatattgggcttccccagtggtcgcacccgaaaggggtgcgccttggcatcaccagccttgaagagtacgcccgccactttaactgcgtggagggcaacaccaccctgtatgcgctaccaaagccggagattgtcgcccgctggtacgaacagacccacgatgacttccgcttctgcttcaaattcccggccaccatctcgcaccaggccgccctgcgccattgcgacgagttaagcagcgaattttttgcccgcctggcgccgctggcctcgcgcatcggccagtactggctgcagctgccggcgacgttcggtcctcgcgatctccccgcgctatggcattttctcgacggactgccgaaggatttcacctacggcgtcgaagttcgtcatcccgagtttttcgccaaaggggaagcggaacagcagctcaaccgcgggctgcacgagcgtaacgtcaaccgcgtgatcctgaagagacctttctattgatacactctaaagatgggattttgtagcggggattaagcggcttcaagcagatgggacagtgcaatcattcggattcgttctggtgaatatccggctagacgatactttctaaccaactcatatcctacacggtcaaggttatctaaagcgggtttagagagcttcacaatgatgttattgctattgtctccaccttctgaatggaacggtgcaacggctgctgtagctgttatacgggcaacctttggttttggcttaggcggctgacgtgtctttgaacagtccacgcaactacccgatgagatatagcgaacagttgagccgcaatgaatacacggcttatcaggggtgttaatcgtggttgtattagacattggttaagagtccttctaagtattctgtaattcgggcttgctgtgtacgttttgagccatcaccagcacggcgggttaacttatccattaactgaggatgaatctttccgataaggtttgctccaataaccaaacagccgttagagtcgtaatagttaataggtgcgttaattgtctcttccattttatcagctcccgcttaccatccgtttaatagcagcctttaaagctgcatccctttgctgttcaactgttggcggcttaggcttcaccttatacgtggtgacagctttagctggtttcacagttggtttaggtttattacctgaagcaagtagcttataagttgattcactgatttctgcttgaccgttgaaatatttgtattcgaccgaatcagttagattattatagctcccgcgttttgttagtcctttcattggaatactcattcggacacctcttcagaatcagttacaatcacgtttaaatagctttcaaatgatttaatcgaatccagagttttacgggcttgggtaacaatcacattacgctggtggacagcttcagaggcttttaccttcagacgttcagtcatattatcaatataactctcagcttcagcagttgccttgtcagttgcgtctttcagagcattctttttagttgagatgaaatagattaatcccattcctacacgatgaaccatgtagccttgttcagccattgactgaataatctgctgttggttcgttggataaacctgcttcacaataaatccgtgacgctctgaaggggatgctaagaactcttgagctttgcgattaatcaattgctggcgtgattctactgcatcctgatattcagcttcagccttattcattcggtcagttgcctgttgaatccgtgggaagtacaatttttcgatatgctgtttctgttcgaacggtaacaggtgactgattgaagcaactggtgattcaatttttacagcttgatgtaaagtagtcattattaatttactcttagtctggtttgcttagatttcagaaagcacaaaaccccatccagccaactcaatgttacgggacgaggttcaatgttttctaattagggtttatctgtcttctcaaggggaacttgaaatggatgccttaaaaagacagataagaaggaaattgtttgagtcagaaataagtcggtgatttgatggacggtgaaatattcctaactcatataaccattctgtcatatattaacaaattgtcaacgtttatttttaatcttttcacagattgatttaatgagtaataagcgtcttgctttggtcatcagtttggggatgtgatattccttgttaggaattggactaatcaaatcaccaatcttccgtaactcagtatggatagtgtgacaggttctccctgttactttgtaatatcttctcattcataatcgaacctttctcaatgcaaataaaaaaggccactcataagagcagcccttttacattgctttctcaaaacctcttgaacgacctgcaccagtattttgagatttaagcaaaaccagataaaacaattatcacatgataactctaatctgtaaaactcaaacagacattaatcgcccaaatgttcagcattaatattcaggtcttcaaagccaccagttaaaacctgtgtctggaatgttccaattttctggctatccatgttcacactaatattaatgcgctggtcattcttgatagttgtctgagcagggttatacattgatggtacagcaaatgtattagtctgaccgttcagtgcattgttaccctgaagccaatcaccaaatgaacccatagcacgtgtgaacgggctgttagtgattgaatcaccatcctgagcacctaacaccttagaagggcttgaaagccagttaagagcctttgcaatagggttatcgacacctaaagcggttgggtacttctgttcaactcctgaagcgtctacagcatcatgagcgactaaagcaactcctacagggccagctaaacgggaagcacctttcagcatcccacctgcaccagcagccgcaccagcttcagcaccaccacctaacagagcacttaaccatttcagcttattggctactccagcgatagacttaaccagcaccaatacaccagcagccccaatagcgaactgttcagcagaatcaaccagtttcttttgaccgtctgataagtcatcgtaccacgctgaagttctgaggattaacgctgagagtttacggctccattcgtccacgtggtcaaccgccccagaggtcatagaggcaacttttccgaggatgtgacccaaagcctctgcgattggtgaagcatcgttaagcatgttagctacagaagcgttaaactggcctaaacccttttcagagcttgtgaaagccttgtttaaatcgttttccatcgctgctttaacacgtccgatacctgttacagccatattagaaacggtctctaatccccctgcttcatcagccattttcttcatctgagcagatacacggggaagaacatctttagacagtaacttaccgttactcatgagcttatcaagctgctgagtgttcacacccaaagcatctgcgaacatctgttcagcacccggtaaacggtctcccaactggcctctgagttcttcagcctgtacgcgcccttttgatgccatctgtgtgaatgctatcatgatgcctttaagctgttcagcatcaagccccctgatgcgaccgaatacagcagcattcttatagaagtcctgtgtaccctgatagcctaacgagttctgagcaccagcagcaaagccagtgtactgtttcaaggtctcagtgacaccctgtccgatttggtcagagaactgagccgcgaatgtcttagcatttttcgattgccccttgaaaacagcttcagcggagagattcacaccttcacgggccacacctgtttcaaccaccttacggacggcttcaaatgtcccatataacgctgctgaaacgcttaccagacgcccgaaggagcttgataacccttctgcattagatacctgcttacggttctgagaagcccatttagacgcgctgtcagtggctgcacggagagctaaacggaactggttcaggctggctgaaggattggctaaagcatcatctctcaatccgtgaatctgctgacgcaatttcatcgcccttgcttgtccagttgaacccataccctcaagacgtctggtcagattcgaatagaactgagtgttagcaagtgaacggattgaattagaagctgttaaatctgagcctctgccttgtggctttccggctggtggatttgagcggccttttcctttagctccataggcgtcctgatacatatctttaatgcgctttgcagaagccttagcagcgttctctacagatttcaccgatgatttaccagcttcatcaaaatccatactctttgagaatgcacggttaatttgttttgatgcgttatttgctgaagaaattactcttccaaaatcaccctttggtgtgaatgaacggttgagattcttttcgattcgttcagcgacttttaatgttctgctttcgagtttttgaagattctttgaaacgttttcgttaaagcccaattggatgataaattcatctacagtatagttagccattcatatttttaacctcatattcattccagattaaatctgtcattgcatcgtgtgccttgagtaccatttcatagattagtgcagcacccatcagtgatagcccttgaccgctgaagaatgtagcaatagtgatttggttaatctctggaagagttttcaggactgttaagcataactctggttcagataccgaattaaaaattgcgtctgttaaatcgggatgcggtacaggattgtttagcatattcaaaaatcggtttttcattggttcatttccttcattttcttgttgagtaatactgctaatgtttgctgtcgtggcaaatcatacttttcacttaactggttcagcagttcaagagtcttagctgaaagattgataactgagcgttctttcttattcgacattattcaattcctctttcaggataatttctaaagtctgctgacggttcaggccgtacaattctgataacgcttccagctttttcattaacgctggtgcaatgtgaattactgagtgtttcattttacaattcctcgtaaattggcattttaaatggctcgtcgtcttcctctgcatcagtagcaaacagataattcagtttactttctggtttaggctttggtttagaaagacggataataactggttcaatctcttctacagcgtcaataactggattttcattcctttcgattaacgggaaaggtaagacattatcggaatcactggtgattgcggcctctgattcagatactgattcaggtttattttcttgctggtggcttttaatcaattctggaggcatgatttcaactgtgtataccttagagctatcataacgctgaatagaactaataagacctgattcatgtaattgggttaaagcccctaaagcaacctttcgcccaataccgaacaattcacacaggtaattgattgaggggaagacttcttgaccgtttctttgaagacctaccataaacaggtaaatcattttagctgaaagagataacttaacaccgttgaaagaagtgattcgggttacatcactataagcgggggtaaacgggatttcatagagtttcattcatgggattttcctaatatcagaaatgcctcttaacaaggccgtatattgttcgatttaagctgtgactacattttcacgaatcatgtttttaatcagggctgagtagctcacaccctgtttagctgccatttcaacaattttacggtgaatggcgtgggacacttcaacacggatagttacctgttgtgggatgtcttttctcattgggatttccttcttgcaattcaataagctatataaatactgtaacaacacattaacaatttgtcaataaatttgtttgacttatttttcttgatggtgtaagtgatttcgaaataatgaataggggggtataccaaaacggcatggggggtatgtcataaagggataaggggtatgccaaaacggcacagggggtatgccaaaagggaacactataagactagagataagattagaaataaaactaatttatcagaatattgtaaagagggctaacgccctgaatcacatgatttatttacatcaaccgattgtaattgattgttttttatgctaccctaaaacctcttaacagattctttttgttctttgtttttcatcttcttgtctctgagtatcttttaagagttctttaaagaaagcctttctaaacctcacctgctttcagctcatcggtgattctggtttccaccttgtagcttgacagtaaatcatgtagggatccgtgaaagcggctttgaagctggtggatgaattttcacaaatattatttttctaaaaaatcttcagacctgtttttatttcagcttcaccagaaacttccagcatatctaaagcaccttctaagattttggatagtctgaatctctctacttggtagcgaccttttctaaggtttcgtaccaatggcaaaaaatgaacatatctgagcctgtgcagcgttctaagcgattgtttaatgatagcaaccctgccccataggttaataataaagactgcttagaatgcgttacagggattctgataaacgacagacataaaaaagccccaatacaggggcattgtgaatcactatctaattgttacttgttcagtcgatagaaagttgccttactaatctgtaactctttctgtacctgagcaggggaacaaccttgtgcaatcagttcctgaacctgttcagcggttgctttaattggtctgccacagtgaaccccttcggactgagcacgtttaatccctgctgttctacgctctgctattaggtctttctctaaagaggctaaaccagccatcatagtgagcattgctttaccaactggtgtagagaggtcaaacccttcacgcaagctgataactttcacacctttggcctgaagaagttcaaccgttgagagaacatcaatagtgttacggcctaatctgtctatcccgataacaaccagtgtgtcaccttcacggacatagtgcagtaggtcagagaaacctttacgctctgtagccttaaccccacctgatacagcttcatcggtgaaccacttagccacttgataaccagcttcttcaatctgctgtttctggttggtaactgtctggtcagaagttgatacacggacgtaagcgattacagatgacatgatggtgattccctgaaagttgtctcaaaacctagtttcaaaataatacctgtatcaaaactcaaattcaaccttttgagacagcctaaacacacctttttagacctttttcagcagtatcaaaactatctccttttgaggcaatccaaaccattgaaacaggttatataaatactgattcttatctcttttcggaactaaaacagttaataggctagagctattgaaatcactggtgttgataggggttttaacaccatttggagagactgttttttactgttaatttagccatctaaacggctattcttcagcgttagcaagtcattgaaggggtcattatggaaatttcaagaatcgaaaaggaaatctggctaaccatagcggctaaataactgtctcacaaactaacttttcactaagatgataaggatgactcagcataaggagcttcaaaggaaatgaaagaaaccatttataacatcttctgcttttgtcctgatggagttcacatcacgcattgcggaatcgttgctcatgattttgaaggtgacgataatcaaaagctggaatttttaagaaaacagttagacattgatttagcctcctgtaggtcatttcatgacattcacccttcggtgcttgatggtgacaaacaactaactctggcaagatataattcgaatatgagggtaggaaacaatttagccccttttgaattagctctacaggctatgaatgccccccttcaccctttatctattgttacgccagtggtagaaggtaaacttcattatcacatccaactatcattgtctgaacaactaaggcataagcacatgccccatcaccacatagaaggtgttaaaagcttccctgattaccttgatgattacatgaaagaagatggttttcatattaagaaattactcaatgacgaccatatgaagcccatcagaatgctttttaatgaaaaacattacctgtctagtttcaagctgttaatgtccttcattgacaccattgcttacattgaatatggtaattccaaaagggttttccaaaactggcttgatacttactcagaaattaaaaaacttgaaataacatctgatgaattatatgagttaagaaactcactcttacacatgactaacctgaattcacataaggtgacacaaggcaaagagcgccgccttagtattgctgtttgcaaacgaggccacccaactcagtgtcacgctgacattgtttatttgaactttacagattttttatttttatttgatgaagctattgataaatggcttgatacttatcgtgacagcaataaacagttaacgtttattgaaaggtatgatgaagtggtgagggataactattaaaccttcataaggggctgtttcgcccctattcattcaccgaactcgtaccaattgaggcatccctttaaaagggactaatcaacgaattgagccatcagggtaaagatacattccaccttcaagataaactggttcaccatcttcaacagccatatcttcatatagtgctgctaattcattcggttctttttccagtgaaagatatgtctcaacatcataatcttgtgcttctaattcttcatttgaagagacacctaatttttgctttaaagctacaatatcaaaaatccaaatctttccatccttgacgtaataagcaccattatcgtaaccacgctcatcaagaaccttttcaaagcccattgtaagagctttgaacacgctatgttttttgttagacataactacccctgagaatatttttgtttgagcaataagttaccccctttagagggcttactcaataatcctgtaagtgtcaaagtcgaactcatcagcttctaacaggggtaagacttctaagaaaatttccccatcaacaactctatccagtgggaaatttaacaatttcaagccgttgtgtaagaagacatcacacttcttttgagccgtgtttagtcgaatctctttcactatccgtttgatgatgatttgagcctccaccctgtctttcttcacagtcaaatccaaatggctgattgtctcaagctggcttgattgctctcgttggtgaacctctgagacagccttttcagcgtccttaatttgactattcagggctttcaaatccttagccattgattcggtatcatctgccagcatagccagcttaatgagcctctcacgctgtttctgaagctgttctaactcactttgaagagagcctatagcagaggctttataactattcagggtaaggcggttagtgttgtaaagcagcccctgaaccaatgcgcggtcagtctgtaatctgctgaacccaacactattacagcgcccttcactcttcatcgagcatttgtatataccagacctcttagcagagacacccgcaacaacgacaataaacccacactcagagcacctaagaacgcccttgaagagatttgttagcaaaggtaggtcagaggaaggtttacgccctgaaccctgcttaagctgctgtacagcgtagaattgctcatcggtaattattgacgggtaatagttaggaatctctgagaccccctttacagccattgatttagaaggaactttgaaaccaatcactgaacggtttgaaagtaactcagtgaccgacgattgagaccagccacctgtaacggatttgaactggttcagagtggaaaacccctcatcattcatttgtttggctatcttgacgtgagacaagccctctaaccgtagctgaaagacacgttgaacagctttcacattctcagggatgaattcaaagtgtgaacggtcttcagagacctttaaccatgctgcacaacgcttagacatgatttcacctttagcagccctttccctcttagcagcccatacagaccttaaacgggttgatttcatcgctgattcttcgtgtgctctttccatcaccagcattgctttaatcatgctgagtgaatctttgagactttctttcgtgtaccactcgttatcgacaagtgtcaccacttcaacgccagacctgagaatttttctaagctgctcacctgctgtgtcgatgtcctgacggcttaccctgtccagagattcgacaagaagaactgaacccgcttcaatgtagccagattccacagcggctagaaattcactgaaagcccctgacttagcattagcgccagagaagccgcttatacccaaatcctgaaagcgtagtgattcgtctaaatagtaatcaggattcctttttaaccagtcgttaatgtacttgctttgacgcttagtagaatcaccaactgattgaatcttagtagaaaatcgtatgtatgagattgcttttggcatggtgtttatgatgagttatgaagagattgaagaagtgtatcataagaaaggtgtaattctcgacagccgcccggtccatagcgctgcggccaccagtccggcgatgatcgatgcccaacaaaagaaaccgaaggtgccggtacatgcggtgatgaccgcccgacagccaatggtgcgctttatcggcggtgacgatatggcccataaccgggaactgtttcgcgtctggctgcagaccctggcgaagtggcatcagtcggggaccccgtggttgttcctgcatactccggacattgccttcgccccggcgctggtggataccctgtggggtgacctgcgcgctgccctgccggcggcaggaaatgcgccgtcgattccgcagcaatcttctcttttctgatatcctgctatcatatccggagccatctgccagagttaaagggagttttcgtatggtcagcgcgctgtatgccgttttaggtgcgttattgttagtgaagttctcatttgacgtggtgcgtctgcgcacccaataccatgtaggctacggtgacggcggctttagcgagctgcaggttgccatccgcgttcacggcaatgccgtcgaatatgtgccgattggcctcattttgctgttatttatggagatgaacggcgctcagacctggatggtgcacgtttgcgggattttattgattgtcgggcgactgatgcactcctggggctttcatcaccgcgtctactactggcgccgctccggcatgagcgccacttggtgcgcgttgttgctaatggtgctggccaatctttggtatatgccctgggagttggttttctccctccgttagcgcacaatacgccgttttcgttttttcgggtttaacgttatgtctcaccgcgatacgcttttttccgcgccgattgccagcctcggcgactggacctttgatgaacgggttgctgaagtcttccccgatatgatccagcgttctgtgcccggctactccaatatcatctcgatgatcggcatgctggccgagcgcttcgttcagcccaacactcaggtttacgatcttggctgttcgctgggcgccgccaccctctccgtgcgccgcaatattagccatccgggctgtcgcattatcgccatcgataactctcccgcgatggtggagcgctgccgtcgccatattgacgcttataaagcgccgacgccggtcgaagtgattgaaggggatatccgcgacgtgaccattgaaaacgcctcgctggtgatcctgaactttactattcagttccttgagccgggcgatcgccaggcgatcctcaataaagtctatcaggggctgaatcggggcggcgcgctggtgctctcggaaaaattcagcttcgaagacgcccacgttggcgaactgttgttcaatatgcatcatgactttaagcgcgccaacggctacagcgaactggagatcagccagaaacgcagcatgctggaaaatgtgatgctgacggactctgtcgaaacccataaagcccgcctgcgtcaggctgggtttgaacatgccgaactgtggttccagtgctttaactttggctcgctggtggctgttaaagccggggagcaggcatgatcgacttcagtaacttctatcagctgatcgccaaaagcccgctgtctcactggctggagacgctgcctgcccaggtagccgcctggcagcgcgatgccctgcacggcaagtttcgtgaatgggagcgcgccgtagaatttctgccggagttaacgccctggcgtctggatcttctgcacagcgtcaccgccgagagcgaaacgccgctcagcgaaggccatcagcggcggatcgaaaatctgcttaaaaacctgatgccgtggcgcaaaggcccttattcgctgtacggcatcaatatcgataccgaatggcgatccgactggaaatgggagcgcgttctgccgcacctgtccgatctcactggccggactatcctcgacgtgggctgcggcagcggctatcacatgtggcggatgatcggcgccggcgcacatctggcggtcggtatcgatcccacccagctgttcctgtgccagtttgaagcggtgcgtaagctgctcggtaacgaccagcgggcgcatttgctgccgctgggcatcgagcagctgccggcgctggaggccttcgacaccgtgttctcgatgggcgtgctctaccaccgccgctcgccgctggaccatctgtggcagctgaaagatcagctggcgccagggggcgagctggtgctggagacgctggtggttgaaggagatgaaaatacggtgctggttccgggcgaccgctatgcgcaaatgcgcaacgtctattttatcccctcggcggcggccctgaaaatgtggctggagaagtgcgggtttattgacgtgcgcatcgtcgacgcctgcgtcacctcgacagaggagcagcgacgcaccgaatggatgacgaccgaatcgctggccgatttcctcgacccacaggatcagcgcaaaacggtggaaggatatccggcgccattacgggctgtgatcattgccaccaaaccggaaacccagcagtcgctggcgaaaaaagcgagataaaaaaaggcccctgtttaatgggcaggggcctggtacgggcaatcatcatattgggcgacatgatgtgcagcaaaaaaccgtttaacttctccaggcggagataatccttttcatctccgccaccgctgcgccattcacggcgtagcgtctgtattcatcggcatcgggatcggctgacatcgaaacgcccggatgacgaaagcgcatttccgacggcaaccagtggccagcagagctatggacctctttcacccccgcctgcagaaacagcggcaggttcgcggcgcggactcccgcaccggccataatgattggagtatcccctgcggcaataagttccgtaattaatgaaatacctttctccgccgaggattgctgaccggaagtcaggatacgtttgacccccagctcacccagcgttttccaggcctgacgcgggtcagcgcacagatcgaacgcgcgatgaaaggtcaccgccagcggccccgccgcggccattatttttttcatccgcgggatatcgacctggccatcagcatccagcacgccggtcaccagcccgggaaagcccagatcccgcaccatgcgaatatcgttaagcagcgcggcgaactcttcctcggtgtagcagaaatcgccgccgcgcgggcgaacgatcggatgcaccgggagagtaatcgcctcgcgggccgagaccagcaccccataagagggggttaatcccccttcctgcggcgcggcgcagagctcaatacgatcggcgccgtagcgctcagcctcccgggcgcacgccacgctgtagcaacccacttccagtaccgccattcctctctccctgatccagacaacctttgcagcatgtcacaatttcacgcggcagacgccgcgcggcttcacactgttacgtatcggcttgctcgctggcgacgatttgttcaatagaccacggatgaaatttgaccgtcacgctgccgtcggtcaccgccagggtaggattcggcaggcgctcatgctcccctttcggcgagctggttttgaccacgatccccggctggctgagtccgtcatcggccagcagcgccagagcgcgggcatttaaggttgccggatcgccgggcaggacgatttcgatatgctcccagccttcatggggataacgcttttcacccggccacggcagctcaacgatatggaagcgccagtgcgccacgcagaccggctccgccagtttgaacaagcaaatgggccggccgttgatcatattctccgacagcagggtgccgcactgctccagaccgcggcgccagcgttccgcagtggtattctgatgacagcgtagggagatatggtcggcgtcgagcccggcgatctccagtcccagtcgcgcagtgaagcgctcaagcgcatcggaaaatcgcgggagatccgccgtaatatcggccagttgttcattttgctgccagtttgccatgggtttgctcgtcaataatgctcgtcagtaatgaaaaggtaatttaccgtgtttcggcctgcggaccaaccgccgccccgctgatgggcaactgaccggcgatggattgcgcacgccggcgcgccgcgcgcaatgctgacggacggggacaaatgcagtatactcccgccctaatttgtccacattatggcgccgcctccctcgggggcaggcgcattacacgtaaggtattccggtgaatattcaggctcttctctcagaaaaagtcagccaggccctgatcgcggcaggcgcccctgccgattgcgaaccccaggtccgccagtcagcaaaagttcagttcggcgactatcaggccaacggcgtgatggctgtcgccaaaaagctgggtatggcgccgcgacaacttgcagagcaggtactgtctcatcttgacctcaacggcattgccaacaaggttgaaatcgccgggccgggctttatcaatattttcctcgaccccgcgtttctggcggacaacgtcaaccgcgcgctgcaatctgagcgcctgggcgtcacgaaaccgcaggcgcagactatcgtcgtcgactactcggcacccaacgtagcgaaagagatgcacgtcggccatctgcgttcgaccatcattggcgatgcttcagtccgtaccctggagttcctgggtcataaggtgatccgcgccaaccacgtcggcgactggggcacccagttcgggatgctgatcgcgtatctggaaaaacagcagcaggaaaacgccggcgagatggccctggccgacctcgaaggtttctatcgcgaagcgaaaaagcactatgacgaagacgaagccttcgccgagcgcgcgcgcagctacgtggttaagctgcagggcggtgatgagtacttcctgcagatgtggcgtaagctggtcgacatcaccatgtcgcagaaccagatcacctacgatcgcctgaacgtcaccctgacccgcgatgacgtgatgggtgagagcctgtacaacccgatgctgccggggatcgtcgccgatctgaaagccaaagggctggcggttgagagcgaaggcgctaccgtggtcttccttgatgagtacaaaaacaaggagggcgaaccgatgggcgtcatcatccagaaaaaggatggcggctacctctataccaccaccgatatcgcctgtgcgaagtatcgctatgaaacgctgcacgccgaccgcgtgctctactacatcgactctcgtcagcaccagcacctgatgcaggcgtggaccatcgtgcgcaaggcaggctacgtgccggactccgtgccgctggagcaccatatgttcggtatgatgctggggaaagacggcaagccgtttaaaacccgcgccggcggtaccgtgaagctggcggatctgctggacgaagcgctggagcgcgcccgtcgcctggtggccgagaagaacccggatatgtcggctgacgagctggaaaatctggcgaaagtggtgggtatcggcgcggttaaatatgccgacctgtcgaaaaaccgcaccaccgactacgtcttcgactgggataatatgctggcgttcgaaggcaacaccgcgccgtatatgcagtatgcctatacccgcgtgctctccgtgttccgcaaagccggcatcgacgaaaacgcgatgatcgacgcgccggtggtcatcgccgaagatcgcgaagctcagctggccgcgcgcctgctgcagtttgaagagaccctctccgtggtcgctcgcgaagggacgccgcacgtgatgtgcgcctacctctacgatctggcgggcctgttctccggcttctacgagcactgcccgatcctcagcgcggaaagcgaagagacccgcaacagccgtctgaagctggcgctgctcacggcgaaaaccctcaagctgggtctcgataccctcggtatcgaaaccgtcgagcgtatgtaacaagcaacccggcgaaagccgggttagttttattcggcgcctcgccagcggggcgccctgctcagaagtacttgcgtagatactccgtcagacaaaggatcgccatcgcctgaccgtagggcatcgaggtaagcgggatctggcgataaaagtcgagatctgaccccatcccggtgccaaatgaggtctgcagcagctccccctgcggcgaaatattctgcacaatcccgcgaatcgctttttcagccaccccggcgtagtgctgcccgacgtaacgcttgcgcaccgctttgagaatcccgtaggcaaagccggcggtcgccgaggcctcaagataagagtgcgggtcgtccagcaaggtatgccacaggccgctgtcgtcctggcattctgctaaggcggcaatctgtgcgtcgaggactgtaatcagatagcgccgtaccgcattcccctcggggagatccaccagttccagaaaatccggcatcaccatggtgagccagctgttgccccgcgcccaacgcgcccgggcaaagttatgccgcccctcatagttccagccgtgaaaccacagcccggtctcccggtccatcaggttctgcacatggagcaggaactggtaggttgcctcctccacatactgggggcggttaagcagcttgccaattttggctaacggcaacacggtcatcatcagcgtgtcatcccacatttgctgatggttctcctccgccagagtcatgtgctgcataccgccctgctcggtgcgcggcatctcgtgcatcgcccactccgcccagctctccagccacggcagatacgccatacggccggtctcttcaaagcggtaagccagggtcagaaacggggccatagtattgacgtttttggtcgttgctccctcggcgaagcggtcggcaaaccagcgatcgatgatatcacgcatctcgatatcgccggtttgctggtaatactgatagatgccgtacagcccaacgccgtgggtccactcccagccggcccagcctttggtatcaatcacgcgcccgtcatccaggcgtagtaaaaattgcccgctctcatccttaatattcaccaggttttgcgtcacgttgcggatcagcgcctgcagttcgctacgggcgataaaacgctcaggctgacgcaataatgggctatgtttgaccggccaaactttcatgttgttaacctcgggtatatgtcgaattcaaagcgccgcccttaatgagcgccggggcagcaggtttatgacgattcagatagccaatattgttattgccccacagacagtcgtaaggcatccccgccagcagctcgaccaccgcgcggtgttccgcactggtctgttccgactgagcgtagccgagctcgcgcattctgagggtctcgctgcgcaggacgctgtgggtgtgcaggttgagcttgaagcgcagcgagacgaggaagccgcaggctaacaccaccagagtgccgacgctgaggatcagcagaatggtatggctgaccccttcaggctgtattttttgcccggaaacaaaccccgacaactgcataatgatccccaccagcatcaccgcccccgcctgcgaggctttgcgggtcagagtcatgatgccggcaaaaatcccctcccggcgctggccggtgatcgcttcgtcgacgtcggcaatataggtgtaggtattccacggtacgtaatttatcccgccgcgtcccagtccggcgacagcagagatgagcagcaataaggaatagacgtcgctcagtccggcgtaatagagcagcgcgtaggagagtgagctcaggccaaacaggaccaccaccatgcggtacgacggcgcggggccaaaacgaatgcacagcgggatcatggcgattactgcaataaactggaagatggccatcgtccccagcaggttcgaggcgacggcggcttcctgcatcagaacaaagaccacgtaataggtaaacacggcattgaagacgtcctgggcgatatagccccccagatacatgccgaggtgctggcggaaaatttttatccgcagcgtagaactcagctcaatcaccaggcgattgaggctctgagcaagggttaagttttgtttttccgcttccgcccgcagggccgcttccgaccacgcctcccgcggtcgttcccaggtgaaacaccagaccagagtcagcatcaccgcgcacagcaccgagaacaccagactggcatagaagaacgagctggcattatctttgccgagccaggagagaaggatccccggcaggaaggaggctaaaatcgccgacatctgcgccatcgaaatgcgcgcgccggagaatttggttttctgtttaaagtcatcggtcatctccggcaccagcgtctcatagggcaccagaatcatggtatagaccatatcaaacagcagataggtcgccaggtagtaccagaagcccatctcgccgacccacatcgctgaatagctgaatacgcaggggatgccgagcagaataaaggattttctgcggccgaagcgcttaccaagccaggtggtgccaaagttatcggtgagaaagcccatcagcgggcttaccaccgcgtccagcacgcgggcggcagcaaaaataagcgtggcctcaatcggggtcagtccgcaaaaggtcgtgtaaaagtagagcagccatgcggcggttagcgccgtcgtgccggcgccgagaaaatcgcccgcgccgtaggccagatagttagccagtccaatttttcgtgttttcatcgccgtgatcctgtgtcttttttttaaaagaacgccgacaatcgttccggatttgccaccggaagggagtgggtacctggctacactaaaagctgtgaaaggaggttacctttgtacttttgccacggaacagtcgccggtggcaaaatgacaaagagatgacgtcgccacttcactcatttataaaacagcatttctttttaatcaaaagacaggttcattgatgtgatctggttggaaggtcgccgactaacgaacaggctcgcaaatcccgggatcggcccttgcgcagtcggggaaacaggagtaaagaatggaagaaagggttattccgcgtatctcaaggaggccagatgccttatacccatctgctggttgccgtcgcgccaacgccggagagtcaggtgttaattaaaaaagcggtgtcgatagcccgccccgttaacgcgaaagtgagcttaatcactctcgctacggatccggagctgtataaccagttcgccgcaccgatgatggaaaatctgcgcgaagtgatgcaggaagagacgcgggagtttctcaatgaacttgctcgccacgcggactacccaatagaaagaatgaccatcgcctgcggcgagctaggccatcatattaaggacttctgccgctcgcaccgtgttgatctggtgatctgcggcaatcacaaccattccctcttttcacgcgccacctgctcggcgaaaagtatcgtcggcagctgcggcgttgatgtcctgttggtttcccttgaaaagggctaacgccggttagcccttttcctgaactaggccagtttagggaaggtggctatcttcccccgcagacggctctcctcgctgcgcggtgaaatatgctgcagatcctcgacaaagcgcgcctgccagttatgaatatcattttctctgatcacgtccagcatcgctgaatgacgggcgatacgttccgccagcggcatgctgagcgcgcgatccagcgcggcggcaacctcgtcgcgatcgtaaggattgacgatcagggcgctggtcagctcctgcgccgccccggcaaactgcgacaggaccagtacgccagggttatccggatcctgcgccgcgacgtactccttcgccacaaggttcataccatcgcgtagcggcgtcaccagcccgacgtcagagtagcggaagaccttcatcagcagcttacgatcaaaatgctggttcagatagtagagcggtgtccagccaagctgaccaaactgtccgttgatgcgtccggctgcggtttccaactggcggcggatatcctgataggcctgcacatcgccgcgggaggtcggcgcgatctgggtataacggattttgccgtggtgctgagggtacttctcgagcagcgtctcgtaggcgaggaatcgctccggcaaccctttcgaatagtcaagacgctccacggagaagatattcttcacatttttcagctcgttcttcagctgggctagcttcggcggcagcggacctttagcgttgcgcgtaatttcgtccggatcgatccctatcggataaacctcggtactgaacgccttaccccatgcctgatagcgtttatcgccgaggtcggataggcgagtctgcatagcaatgctgtcgagaaaagcggttctgtcgctttcggtctggaagcccagcagatcgtaatcgcacagttgctccagcagctcagcgtgcggcggcagagcgttaaaaatctccggcgtcgggaacggaatatgtaagaaaaacccgatgcgattgttcaccccgcgcttgcgcagctcgctggcgaagggcagaagatggtaatcatggatccacagcgtatcgtctggctcaatcagcggcagaagcttgtccgccagcatggcgttaacccgcagatatccctcccaggcttcgcgctgaaagctgaccagatcaaggcgatagtggaaagccggccacagcacggcgttagagaactggttgtagtattcatcatggtcccgttcattaaggttgaacgacgcccatgaaatattcccgcgggagacctgcttgagcggctgctggtcatcgccaatctcgccgctccagccaaaccacagaccccccgccgctctcagtgcccccaggatgccgacggccagaccgccagcgctcgattttttatcgtccggtaaggcgatacggttagagactacgactaaacgactcatggtcatccctcctttcggtttgcgcgtcatacgccagatgttgcaaccacgtccttacagcggcggcatccgccaaccgccaatgcgcctgagtttccccggcgccaacttttaccgacattccctgcagttgattaacgacgctgaatcccgcctcgtcggtcaaatcatcgccgacaaataccggttcgcggccggcgaatggcgcctcctgcatgaacgcggtaatcgcctcccctttgttgacgccgcggggtttaatctccaccacgcacttgccaagctgtaacgccagcagcggatagcgctgaacaatccgctgcgccagctccagcacggcgctctgctgctgcggggcctggcgatagtggagcgcgaaagccatctctttactctccagctcacatcccgggagcgcttccagcgccgacgtcagctcagccgcgatctcatcgcgcagcgctgtcggcagagagacgatgtaggttttaccattgatatcacggcgctcggccccgtgaacgccggccagcggtagccgccagggatgggttagcgcgtcaagttcagccattgagcgccctgaaatcaatgccaccgcgcccccctgctgctgggccagcgcattgagcgcctgcagcgtgctgtcgggtatcaccacctgatcggggtgcggctggatatcggcaagagtaccgtcgaggtcaaagaaaaaagcgtagtttccggttagcgcaggcggtacagatatctggttatccaccctgtttcctccttatcatggccagccgaagctggttgttaattatatgtgagccatgtaagtatagacagtgtgaccaacctcgccatttttgatagttaccgccagcgaaacgggcgctggcggcaattactctgtaaactaaaaagttgggttaaaattcaggccgcacgtttggctttttgtttgtagcggtcgaagatcaccgccgccagcaggatcaccccgcgcacgacgtattgtgagaatggcgagatattcagcaggttcatcgcattttccacggttccgaggatcaggatcccggccaccacgtaggagatcttgccgatcccgcccttcagcgacaccccgcccagcacgcaggccgaaataacaatcagctcatagccaatcgaggtcatcggctggccgctggtcatgcgcgacgccagaatgatccccgctgcggccgataccagaccggagagcacaaagataataatcttggtgcgcaccaccgggacgccggccaggcgcgccgcctcttcattgccgccaatagccagcgtattacggccaaaggtggttttgtttagtaataatccgaaaaccaccaggcaggcgacggtcagccagatcggcgccggcaaaccaaaccagttggcgtagccgagggtgaagaaacgttcatcttcgatccccaccgctttgccgtcggagataatataggccaggccgcggacaatctgcatggtggccagcgtggtgatcagcgcgttgatcttaaggcgcgcaatgacaaagccgttaaccaggccactaagcgcccccagcaacaggcctgcggcgatccccagccacaggctttcgctgagattaatcaccaccgcggtggtgaccccggcgcaggcgataaccgacgccaccgacaggtcaaaatcgccggaggccaggcaaaacagcatgccgcaggccaccatcccggacatcgagatcgccagccccagccctttcatattgacgaatgaagcaaagttgggcacaaaaatcacacagccgataaacagcaccgcaaacaccaccagcatgccaaactgatcccagatgcgggcaaagctaaaggttgagcgggtagccccggacgtagtcactgatgacatcatttactccttactcaggcgacagcctggctcactgttggcatcgcaaggcttaacgcctgctgttcattggcttcttcatgcagcagttcgccggcgatttgtccttcgcgcatcaccacgatgcggtcagcgacgcccagcacttccggcaggtcgctggaggcaaacaccacggcgacaccggaggcggcgaggccatagatcacattgtaaatttcatgtttggcgccgacgtcgatgccgcgggttggctcatcaagcaggatcaccttcatctcttccgacagccagcggccaaggatcgcgttctgctggttgccgcccgacaggttcataatcagctgttccgggcccggcgttttaatattcagcgactggatatgttgatcggcgttgtccgcctcccaggcgttgttgatcaggcagccagcgtgaatatgcttgcgccgggcgctgatattgatgttatcgcgcacggaatgcaccggaataatcccctccgctttacgatcctccgggcacagcatcatcccggcctggatggcctgggccggtttgcgaatggagacgggctggccatcgatatacacctgaccgccggttatctgcgtgccgccaaacaggcctttcattagttcgctgcgcccggcacccaccagtccgaacaaaccgacaatttcaccgctgcgcaccgagagactaaccggcgtgcgcacgcccggcgctttgacctcttccaggcgcagccgctcctcgccataggggcgaggcttccagccataaatatcgcccagattgcggcctaccattgcctggaccagggcgtcgtggctgacgctcggcatatcgtcaaaggtgcaaacgtagcggccatctttaaagacggtgatggcatcgctgagggcaaaaatctcttccatccggtgtgaaacatagatgatgacccttccctcctcccgcaactcgcggatgacgcgaaacaggttgtcgatctctctggcggagagcgagctggtcggctcatcgaacgcgataatcttggcgttacgcgccagcgctttggcaatctccaccatctgccattgaccaatggagagatatttcagcggcgtctccgggtcgatatccagacccagatgctccagctgcaggcgggcctcatagttgagcagcgagcgattgacgatgccgcctctgtgcggcagctgaccgagatagatattttcggcgacggtcatctccgggatcagatgcagctcctggtagatgattgccacgccggcattcagcgcctccatggtattggcgaatgccatctgctggccgccgatctgcagatggcccgcggtcgggatatagttgccgctgagaattttcaacagcgtcgatttgcctgcgccattttcgcccatcagcgcgtggatctgtcccgggtagcagtcaaaactgatatcggacaaggcctttacgccagggaacgtcatggtgatgccgcgaaatgagagataaggggtagactgttgcataacgactccgctcttctgcactcagcccccgcgccgcggcgggggccagtttaatcaggctgttacagcccttttttcgccagctcttctttgaagttatcgcgggtaatcagcaccacatcggtcaccgccgtgaacttcggcggctcgacgcccttggtgacccagttgtagagcatttcgctggttttgtagccgtggatatccgggcttggcagcagagaaccatagaagccggtcggctgcgccttcgacagttcgttgacggcatccacgccgttgatgccgatgccaatcacatcgggagctttaaagccctgaccttcggtcgcgcgcacgccgccgaggacggtgttgtcgttcatcccgacgatcagccagtgtttaacctgcggatgctggaccagcatcgagttaccggcgtcgaacgctcccgggatatcgttggattttgtcggcacgcggtagatttgcgcgtccgggaaaccggccgccttcagggcatcgatggagccggtggtgcgacggcgcgcggtatccagctcatcggcggtgatcgccattacggcggtgtctttgacatcccagccgcgcttttgcatctctttatagagttcctgcccctgacgggcgccaatttcgctcgccgccatcatcaccagcggtacgctctccatcggtttgcccttcgcattgacgaactggtcatcgacggtaatcaccttcatgtcatagccacgcgctttggcgacaatcgccgacccgagcttgggatcgggggtacagatgacaaagcccttcgcgccgctggccgccaggctatcaatggcattcagggttttctccccatccggaaccgcaattttaataacgtcaaagcctaaatcttttcctgctttatcagcaaatttccactcagtctgaaaccatggctcttccggctgtttcaccagaaaacccagtttaagattttccgccatagctgattgtgacataaccgcagcgagaccaatggccgccagcgctttagtaaatttgtgcatggtaaactccagctttaattcgctttcatgtagggaaaaatcggaattaacaatttaatcggcatcaaaacaaggcattagaaaaatcgcattccccactgccgttgttagagtagtaatacccggaaattatttctccatacgagagcattatcacatcgcggaattacagtaattgcgtacatacatttagcaaaaaatgacataaaaaatgacacaattgtcatacaattttaccggggcatagcaggatcatctataccatcagcaggcttatccttgtgttgtcagaggatgtttaacggtgggttacagcactgttatcatcagcgattgacggcgctgctacgggcgatcgcctgtgcgccactcaaatggcaacccacctcgcaccgctgagccacatggcccgcttaatatcgcgaaaaaacggatctttggcgtaatttattccgaatagaaaaaatatattcctctttataaaagcgcctgcaacaaaaaataaaaataatgatcatcaacctgaaacattactaatgaaataacttattccgttctcttctacgacgaatctcgtagtcaaatacttatatcttataaccaatctgaaaccagcgagcccctgccaacggcgcacaatctcagccctggtagtttgcaaaaataatggtgtaacaaaacgtaaattaccgcgcttgagagttttcttaatttcgttaagcgagtattcttaaatcgtcggcaaatggaaaaaatacccgacttatacggaatgtgtagagttttattattctgcaacagtgccgcgtgtcactattttatcttgtagttatccgcaggatccgctgacgcgcaccagtaaccccttcccggttaataaggatattttttatggcagttccaggaatggcacaaaagctaaacacccaaatgaatcttgagtttcacgcctctaacgtttacctgaacttaagtgagtggtgcgcccgacatcgcttcgacggcgccgcgacgtttctgcgcacccgcgcgcaaagcagcatcaccctcaccatgcgcgtatttgactacctgaaaaaagccggcagctggccgatcgtcaatcccgaccacgcctgtaaccctgagtgcacctcgctggaagatctgtttacccaaaccctgagcgattaccaacagcgcagtcgtctgctgagcggtctcgctcaggaagccaaagcgcaaagcgatgacagcacctggcggtttctcacgctgttggcggaagagcagcagcaggatggcctgctattgcaaagcgtgcttgaggaaattcgtaatgccgataaagccggtctcgggatggagcagaccgatcggcgtctgatggctatcgttggagaagcgcagaaagcgcattaatcaagcctttatcgctctgccagggggagcgcgtctgcgctgccccgcccggtttattaatccattacgtctattttttctcccctattattcctttcaagaataaaaaagttttaactcgatcccattccctcatcaccgttaccccataagggggattagtgagcgcggtcactttttgacgaaccataaagaaatataaaaacagtgtttcaaaaatataaaacacgaggtttattttttatggctagatacacggcttcagcctctgaagggctgcagggaagaccgatcttgttacgccatcagttagcctacggcggcggaaatctgttagggagcggcgcactggcgataagcggcgcatggctactctatttttatacgaccttttgcggcctgacgctgatcgaggcctcatttatcttctccgtcgccagcatcattgacgctatcagcaacccgctgatgggctatctgacggataattttggcaaaacgcgcctgggcaagcgcttcggccgccggcgtttctttctgctaatcggtattccgctgatgatgttctacccgctgctgtgggtggaaggcctgagtttctggtactaccttagcacctatgtggtgtttgagatcatctacacctctatcatggtgccttatgaaacgctggcgacagagatgaccgatgatttctcactgcgttcaaaactgaccggctataaagctatctttggtaagctggccaacttcctcgcggcgtttattcccggccagttcattctgctgtatggcaaagattctgccacccctttcttcctcaccggtctgacctatggcgcgatcctgatcgtcgctatttcctgcctgtggttgtgcagctgggagcgtgagcgcggggaagaggtggaaaccagcgcgaaaaaaggactgctgagcaccctgctgtcgctggcgaaagatatgcgttcgactttttatctacgcgtattccgcaaacatcttggtatgtacctgtgcggctttggcgcggaatggctgtttgcctccatcttcacctatttcgtgatcttcgttctacaacacgatccagcgatggtggccgggctgaacagcctgaactcgattctgcagctgatctctacggcgctgtttatcggcctgtgcgtgaaaaagggcttcagcaaaccctatatcctggcgctggggatcgtcattttcgcggttctgctgtatacctcgctgtggtttttccatctaccgtccggcctggcgacagtgctgatgttcggcattaccgtgctgttcggcctgggtaccggcggggtttactatataccctggaccgtttacaccttcctggccgatgtcgatgagatctacaccggacgccggcgggaagggatctatgccggcgccatgaccttctcaggaaaaattctgcgctcgattgtggtgttctcgatgggggcgatcccgagcttctacggtttccagtcaaaagcgcacagccaaccggaaagcgcggtgaccgctatcgcagtggtattctgcgtcggggtgatcgcattagccctggccgccatcgtcttcagcaagcagatgaagctggaccggaaggcccatctggtggtgctgcaggaagtcgcgcggataaaagcgggcggcaaaattagcgatattgcgccggacgtgcgggttatcgtggaggatctggtcggccatcgctacgaagagtgctggggcaacagcaaattgttcaaagatgctgcccctgcgcctgcgcagaccgtcgtttcccattaaagaagaaggccccgccggtatccggcgaggcctggtattaatgcgtttcttcctgtggagtaaacttcagctcaatcaacgcgatcgctttttgcaccgcgcgaagggtcaccggatcggcagaggccggatggctggcgaagtcgatagctttgagctgagtggtcattttttcacgcacttccaccggcgcaatgacgtcaatgacatcgaggatctgtttgataaccagctggcaggcaaccacatcggaaaccagctcgtcgtgttcggtaagatgttgagacattaattactccttttttcaggagcgtaatagtaccctaaatcgttaacgataataaaacctgccgtcgcaggtttttttatctactctactggctggcgggtcgtctcctgccgctttgcacaggatcacactcttgatggcagtgacaacatgaataccgcgatctcttcccgcgatgaacgtgctttttcagcgccggcgctgctggtggcaggtgccttttttatggagtttctcgacgggacggtgatcgccaccgccctgcccgatatggcgagggattttggcgtcaccgcggtcgaactgaatatcggcatcagcgcctatctgattacccttgcggtcctgatcccggccagcggctggatcgccgatcgcttcggcgcccgggctatttttactctcgccctggcgatctttacccttgcctcggtcttctgcggcctctccaccgaggtgcatatctttgtcgccatgcgtatccttcagggagtcggcggcgcgctgatggtccccgttggtcgccttgcggtgctacgcaccacgccgaaacaccagctgatcaaggccatcgccaccctgacctggccggcgctggtggcccccattatcggcccgcctttgggcggctttataacccgctacgccagctggcactggatcttctttatcaatgtcccgctgggccttgccgccatcatcctttcgctgcgcattatccctgatattcgcgaaacggaacggcgctccttcgatctcagcggatttatcactacctcggtcgcgatggtcagtctggtgaccgcgatggagcggctcggcgatcgccagccgcagatctggccgacgctggctctcgccgcgcttggcttcggctgtctgttatattccattcgtcatttccgccgggcggcggcgcctatggttcgtctcgacgccctgcaggtgccgacgttccgggtgacaatgtacggcggctcgttgttccgggcctccatcagcgcggtgccttttctgctccccctactgttccaggtgggattcggtatggatccttttcattccggcctgctggtgctggcggtgtttgtcggtaatttaaccattaaacccgccaccacaccgctcattcgctggctgggctttcgtcggctactgctgatcaatggtgcgttgaacgtctgttcgctgctggcttgcgcgctgcttacgccgcagacgccggtctgggccatcatgctgatcctttatctcggcggggtgtttcgctcaatccagtttaccggtgtaagcacgctggcctttgccgatgtccccgccgcgcagatgagtgatgccaatacgctgttcagtaccgcgtcgcagctggcggtagggctggggatcacgctcggggcgattggcattcgcctgggcgagcaggtcggcgactggctgcatcttactgaactaccggggatcagcttccgcctgtcgtttgtgtttatcgccttgatctgtctggtagggatgatcgacagcctgcatctggccaaaacggccggcagcagcgtgtcggagaagaagaaatagaagaaaaaataaacgacggaagggccagcggcgctggccctgatgacggttaagcgacgatctggcgaacaaagtcttcgattgctttatcctggcagttttcgaagaagcactgctggaagcgtgggccggagactgcggttttcaccagctgcggatcgatggcgcgcagggtatcgaggtagttctcttttactactgctgctttgacctggttgaggatcccggcattgcgcacctgcggttctttgcgctccggcggatagccttcgccgttgcggccggtaaaggctttttcaaagataaaccgcacattcagttcggcgccccagccgaagcctttggcaaacggcagcgacagcgcattaccgttgttgatctgggcaaacaggaacgcatccgccggatcgatacagtagccgcagaccacgcccggatggatgttcagcgacatcagcgccccctgaccggtaccgcagccggtgaccacgaagtcaactgctttcgaattcagcagaatactggccatgatcccaagatggatgtaggtcagatgatgatcgttctcatcgctcatgccgacgttatagaccgggaatcctttttcgtcggcaaccgcgttaagctccttgaggatgatggcgtttttgttcgcctggctgttctccatcatcagtgcaatcttcatggtttactctcctgaatgctgtgcgggcctgcccgcagaatgtcattggcgttgactgcactctactaccttgaaaacaaactttcaaattttatgaaaagttgttttaaaatttacgcagtgcttcacactttcgcaggctccctttgtctgttgacctcagccctctgcatgctggcgtatccgcttcgtcctcccttaccacccgccggcgacaaaaccctgaccgcccaggcaataatgaataataaattaaaagcattctcatttattattaaactgccaatgcgtgttattcccattagcattttaaataaaacatttttaaatttactttttgcaaataattaaataacaaattatagtggcagccaataacatctattatttaattccaggagtgcaacgatgctgaaaacggacatgattgacaaactcaatgaacagatgaatcttgaactctattcttctcttctttatcagcagatgagcgcctggtgcagttaccacagttttgaaggcgccgcggccttcctgcgtcgccatgctcaggaagagatgacccatatgcagcgcctgttcgactatctaaccgacaccggcagcctgccgcggatcaacgctatcgcctccccgtttgccgaatatgcctcactcgacgagctgttccgccagacctacgagcatgagcagctgaacacgcaaaaaataaatgaactggcgcacgcggccatgaccagccaggattacccgacctttaatttcctgcagtggtatgttgctgaacagcatgaagaagagaaattatttaaatcggtgatcgataaactgaccctcgctggaaaaagcggcgaaggtctgtactttatcgataaagagctggctaccctcgacgcgcagaattaatcccccgcgccgcgacagtccgtgtcgcggccctcttaatgtcggcagatcttattttctgcggtagtaaaaccttcctctctggcaataaatttgccttttttctctaaaaacgccaccagctgtgcggcgcttagattctctgctgaacaggtgtgaaaccgcgcctcttcgccaaagcggcggcgaatggcggcctccagcgaggcgaccgtccaggattcacccgaggcgagcatcatctgtaaaacttcatgaccatgaatagaagacataacccctcctgcaaaaaccgccagcttaggccagaccgtcaacccgcgccttgcgccagcgcaggctttcgccctcttattatgtaaacatttcattacacaacttgtaatcccgatttgacgaaagccgtaatatcccctactctgcgcggcataatttattgttatttgctgtagggatagcgaaaagcgtgaaaaaccgcactctgggcagtattttaatcgtagctggcaccaccatcggtgcaggaatgttggcaatgccattggccgccgcaggcgtcggctttaccgtcacgttgggtttacttttcaccttgtgggcattgatgtgctataccgcccttttgctgctggaagtctaccagcatgtccctgccgatatggggctcggttctctggcggcgcgctatctgggccgttatgggcagtgggttaccggattctgcatgctgtttctgctgtacgccctcacggcagcctatatcagtggcgccggtgaattactcgcttccagcctcaaccagtggctggactggcagctaccgccggccgcaggcgtactgatcttcaccctcctcggcggggcggtagtgtgcattggcaccgcgctggtggatttgttcaatcgcttcctgtttagcgccaaaatcgtcttcctggtgattatgctggccctgctgatgccgcacattcatcaggtgaacctgctgacgctgccggttgagcaaggcctggccctgtcggccattccggtgattttcacctcctttggttttcacggcagcgtcccgagcatcgtcagctatctggggggggatattcgcaaattgcgccgggtatttatcatcggcagctttattccgctggtggcctatattttctggcagctggcgacgctgggcagtatcgacgccccggcctttaccgccctgctggcaaataacgctggtctgaacggcctgctggaggcgatccgcgaagtggtggcgtcaccgcatgtggagctggccgttcacctgtttgccgaccttgcgctggcgacgtcattcctcggcgtctcgctcggcctgtttgattatctggcggatatgtttcagcgtaaaaacagcgtcggcgggcgtctgcagagcgggataatcaccttcctgccgccgctggcgttcgccctgttctatccccgcggtttcgtcatggccctcggctacgccggggtggcattagccgtgctggcgctgataatgccggccctgctggtcatgaagagtcgccgagagcatccgcaggctacctggcgggtcgccggcggcgcaccgacgctatggctggttctgctgtgcgggatcggcatcgtggctattcagttcagcatcgctgccgggttgttgcccgcggtgggataaaaaaggggcctgctggccccttgttcatttcgctaagcaacactgcttatactttttaccgctgccgcatgggcagggatcgttgcgtccgactttcgcttcatttcttattggctgcggggcctccaccggctgcggattcgctatccagtactggtaaagcgccagcgccgccggcgtgatacgctcgatgctggcgataaattcatccgccgtcagattatccagcgcgctaaactgttcttcgctgccgtggagcgcgatagcgtccagctccggctggagttcagcgggcaacgtcgaccagtcgctcagcgccacgccgcgcagatagccaaagcaccactcctcaactatggtcagctcctgaccttccgcttcgcgggtgccgaacagcggttcgaactgatcgggataagactccagccgttcggcgatatcgctcatatgctgcagcgtcagattgacaaagcgatcgcgctcgcgatcgttggcccagcgcgggacattatccgccccgccccaaatcgccagcagccactgagcgggttcgatgtcggtcggcgcagagaggatcgccgtcagcaggccatccagttcagagacatccagaatggcgccttcggcggcgtatttcgccagagtgtcatccagccattccagttcgttttcgttcaaaggtccggtattcattcacaggctcgcatggcaaaaatcgggcctacagtagccgaattgccgacagaaagccacccggcgatacctattgcgccggtgtcaacgatacgcgatcaggccaggccgcgcagcgccgacgccacctcacgacaggcctcctcccctaacgaaagcaaaggacggggaagcgagtctggatcgcagagtccgagcatcgctgcggcgctggctatcactcgcaggctaccaccatagcgatcaaagcatcgccataggggggccagctgctcattcagtgccgcagtctgcgccacatcgccgctacgtatcgctcttaccagcgccagtgagaagcggggaaagagtccgccgcagaccgaataccaggcttcgcagccggcctgcaacccggcagtggcccacgcatcgccgctaacgccaagcgtaacgcgagagggaagatgctgacgcagggccgctacacgttcgctcgcctgtggcgcgggcaggccgggaattttaatcgaggcaatggccggcaaggcggcgatgcgcccctgcagctcatccgccagcattacgtgggtagtgcggggattgtcatacaggcaaaccggcaccgagacatgccgacagacctcttcgtaaaaggcaaagatctcctccgcggaaagcggctgataggacatcatcggcagtaataacgcatccgcccctgcctcctgagcatcctccaccaggcgtagcacctcgttagtcgcaatggcgccgacgccgaccatcatcgggatcgaccccgcatgcgccttcgccacctgcaccactcgtctgcgctgctcacggctgagataagcgtagctaccggttgaacctaagatgcccagagagtcgactccggcatcggtaagacgggcgagaatacgaataaacgctttttcatcaaaattttgctgatgcaaaggtgtcaaaggaaatgcgcaaagtccagtgaacatgatgcctccggcaggctgggctgagagtccgtttgatagtagcaaggcgcgatcgttttgtcctgggacaaatgagaaattgactgtaaggcaagagttaaccgaaaaacgccgtggcgtcaggctggcgggaaaggtatcagaaagcgaaagtacagaaacaaaaaaaccacccgtaggtggtttcacgacactgcttattgctttgattattctgtatttcccaatggtacccggagcgggacttgaacccgcacagcgcgaacgccgagggattttaaatcccttgtgtctaccgattccaccatccgggctcgggatataaagtggaggcgcgttccggagtcgaaccggactagacggatttgcaatccgctacataaccgctttgctaacgcgcctttaatactgaagcacccgcaactgccgatgctgttaatctggagcgggaaacgagactcgaactcgcgaccccgaccttggcaaggtcgtgctctaccaactgagctattcccgcatcatcaagttatttgctaatcacttgattttgttatcgtctggaagactgtgccgccgttcgatgcgttgcattctacttatctctcgcggtgagtcaacggtatttttcgcaactttgtatcgtttgctgaaaataacggcgaaacgatcactgatcaagcaaatcgccgcgcgccgcgttcaaatactgcagcatcgaccacagcgtcagcaccgccgccacgaggaaaagcgcgatcccggcccactccacccacggataaggacgccacagcatccataccagggcggtcatctgggcggtcgttttcactttgccaatccatgagaccgccacgctgctgcgtttccccagctccgccatccactcacgcagcgcggagataatgatctcacgggcaatcatggtcgccgccggtagcgtgacccaccaggtgtgatagtgttcggcaaccagcaccatggcgatagccaccatgactttatcggcaaccgggtcgaggaaggcgccaaaacgggtgctctgattccagcgacgagcgaggaaaccatcaaaccagtcggttaccgcggcaacaaagaagatcagcgcgcaggcaaacggcgcccagctaaagggcagataaaacgccagcacaaaaaacgggatcaggatgacgcgaaacagagtaagcaacgtagggatattaaattgcatagtgacgggtaactatctgttgtaagtaaaaattagccctatgttgctacagagcccctaatgtttcaacgagtagaagatcttttctgccagagcgtgagagatgcccggtactttagcaatttcttcgacgctggcctgctgtagcccctgcagcccacccatatacttcagcagcatctgacgacgcttcggccccaccccctcgatagtctcaagcgagctggtgctcttcactttcgcccgttttttgcgatgcccggagatcgcatgatcgtgcgattcatcgcgaatatgctggatcacatgcagggccggcgaatccggcggcaggctaaacccttccccttccggctcaaagaataacgtttccagacccgcttttcgatcgctacctttcgccacgcccagcagcagcggatgatgtttatcccaggggacgtccagttcagcaaacacggctttcgcctgggccagctgtcccttgccgccgtctatcaggatcacatccgggatcttgttgtcatcaatcgctttaccatagcgacggcgcaggacctgattcatcgccgcatagtcatcgccaggggtaatgccggtgatgttgtagcgccgatactccgcgcgcagtgggccattgctatcaaacaccacacaggatgctacggtctgttcgcccatggtgtggctgatgtcaaaacactccattcgcttgacggccggcagctccagtacgctggccagcgcctgcaaacgctgatgaatggtcgattgctgagacaatttggtcgttaacgctgtcgcggcgttggtccgcgccagcttaagataacgcgctctgtcgccgcgcggcttagtctgcacattgattcgacgacccgccagctccgacagcgagtcggccagcagcgtcttatccccaaggttaaagtcgagcaaaatctcccccggcagcgtgcgcatttggctgccctgcaggtagaactggccgacaaaggtctccacgacctctcccagctcggtgccgcccggcactttcgggaagtagcttcggctgcccagcactttgccctgacggataaacagcacatgcacgcaggccatgccggcatcgaaggcgacgccgatcacgtcgaggtcgtcaccggtgttggagacaaactgtttctccgtcacgcggcggacggcctgaatctggtcgcggatgcgcgcggcctcttcgaactccaggttctggctcgccttctccatccgcgcgatgagctgggtcagcacctggtcatccttgccggcgagaaacagccgcacatactctacctgctgagcatactcttcttcgctgaccagcccggccacgcacggccccaggcagcgaccaatctgatactgcagacaggggcgggagcgattgcggtagacgctgttttcacactgacggatgggaaagattttctgcagcagcgccagggtctcgcgcacggcatagccgttgggaaaaggaccaaaatattcgcccttcgcatgtttggcgccgcgatgcatcgccagacgcggatgagtatcgccgctgagaaaaataaaaggatacgatttatcgtcgcgtaacagcacgttgtaacgtggctggtacagcttaatatagttgtgctcaagcagcagcgcttccgtctcggtgtgggtgacggtcacgtcgatttgcgcgatcagcgctaccagcgcttccgttttacgcgacgcaaggttgctgcggaagtagctactgagccgctttttcagatctttggctttgccaacatagatgacggttccgccagcatcatacatccgatacacaccgggctggctggtcaccgttttcaggaaagcttttgcgtcaaaaacatcactcactggcttgctaacgactccgcattacacaggccatggcgaattgccaggtgggtcagctcgacatcgccatgaatgtttaatttactgaacatccgatagcggtagctgttaaccgttttaggactcagatttagctgctctgagatctcattcaccttctgacctttggtgatcatcagcataatctgcaattcgcgttcagacaaactggcaaacggcgattctgtcttttcgggttcaatctgacttaacgccatttgctgggcaatatcggaggcaatatagcgctgcccggacgcgacgcagcggatggcattcaccacttcctgcggcgcggcgcctttactgagatagcctgccgcgcccgcctgcatgaccttggcaggtaaaggattctcggtatgcacggtcaacatgatcactttggtgcccgccacggagcgcgcgattttgcgcgtcgcttcaagaccaccgatcccaggcatgttcatgtccatcaggacgacatctgcggaattagcccggcaccacttgacggcgtcctcgccgcagcaggcttcgccagcgactttaatcccttttatatcttccagaatgcgtcgtatccctgcgcgcaccagttcgtggtcatcaacaagaagaacgttgatcaaaggaataatctccagaatgagggataacgctactgatactttatctcccacatattaccgggttttattgctattttaaaaggcaaaaaaatgccctcgcctcgatttggctctcatttatggcaatgtctgtgcacactaagtggaaagtcattgagaacagtcagttgcccggctcttattttttaacaatactcatacagaaggcacaaaaaacacaacagattacgtagcgcataaatacgaagcaaaatatgtaacaattattaacgagctaaatagatgggggaaattattggcttgccgacggctattacgtattatccgaagcatcaaaacattcacagctcagatgagagaacagaaattaagcacaccttttttttctgtcgcttgtggtatactgcgcggccttcacattgactagagcgcaatagcgcagcgagtaaacgaggatatcgatgagcacaccagatttttccactgcagaaaataagcaggaactggcgcaggaagtctcctgcctgaaagcgatgattacgctgatgctgcaggcgatgggccaggcggatgcggggcgcgtgattattaaaatggaaaagcagatttcacagatggaagatgaggctcaggccgccgtattctccagcaccgttaagcagattaaacaagcctatcggcagtaatcctgtgccggctgaaagtatcactgacagccggtatcacgtctgacacgcagaacggcaggcgcattcagattagcccagtcgccacggcgtagcaggcaatttgcgttttattcggcgcattaaatttccgctgcatattcttctgatggaaattcaccgtattttccgaaatcgagagaatcatcgccacctccgccgaagtctttccttccgccgtccatttgaggatttccagttcgcggcggctgaacttcatctccggcggcatcaccatctcatcttccagacgcagcagcgtcagcaagcttagttcagtcagcgttcgcagacgcagctcaagctcatcttcagggtaaccgcccggcagacgattgttcgcggagacagagagaaatccctgagcatggtttggcaacgtcaggcactgcgtcacgcccttttgcagaccatggtcacgcgccccgtcccacagtgccggcgcatcacgaaacaggctgtcgttccatggcagatggccacgcataaaattctccggccgtaacacaggatctatcgcgaaataattttctgcctgatagtgcgacatccatgcgcgggggtaagtcgactggaacgtaacgcgggggcgggtgaaaggcaccgggtggcgcacacaaagcgtgtagtaatcatattccagcgcttcggtttcacgttgcaggagattataaacctcctcgccggtggccatggactgaaattggtgcagcatatcccgccgccagctgaaaaaatcattgtccctcatagctgtgcaaataactcctgattgataatcattattataaatacagaaaactaacacataaatcttatttatatgtataaaatatcgtagctgtcgcatttattagtctgaaggcttgccattttcccgctcgccgcacagaaacatagcgtttttctcccatcatgttctacaccctgccaagggcgatgggaagcggtgtatacggccgtgggagtcaatagcgcaaagacgtgtcgcgggggcgttaccccgccgcgagagtgggctaaacgcggcggctcccgcgaagctgagccgccgcgccagcccatgctttactgcatcaggaatttttcaaggaactgacgggtacgcggctgctggggcgaagcgaacaacgcttttgcctcgccttgttcgacaatgcgtccctgatccataaatatcgcccgatcggcaacgtcgcgggcgaaactcatttcatgggtcacgatcaccatggtgcgtttttcctgcgccagctgacggatggtgttgagcacctcccccaccagctcaggatcgagagccgaggtgggttcatcaaacaggatcacgtccggacgcatagccagcgcgcgggcaatagccactcgctgctgctgcccgccggagagacggcgcggatagctattctcttttccgctgagccccaccttcgccagcagttcgcgcgcccgcgccatggactcctgcttatcttcaccttttacgatgaccggcccttcaataatgttctccagcaccgtacggtggggaaacagattaaagttctggaagacaaagccgacgtgctggcgcagctggcgaatgagccctttctgcggcccgaggctgcgaccggcgtcgatcgtcacatcgccgacgcggatagtgccgctctccggttgctccagcaggttgatgctacgcagcagggtggttttgcccgagccgctggggccgatgatcgccaccacttcccctttctgtacctccaggtcgataccatggagcaccgtctggccatggaatttttttaccaggcttttcacttctatcgcactcatttcggatcacgctcctggcggttcagctggttttcaaaataattctgcagcgaggagagcactgtcgccattacccagtagatcagggaggccgccagatacatggtgaagacctccagggttcgcgaggtgattagctgcgcctgacgaaacagctccggcacctggatcgttgccgccagcgaggtatcttttaccaggctgataaaactgttcgacagcggcggcaaagcgacccgcgccgcctggggtaaaatggcccgacgcatcgtctgccagggcgtcataccgatactggccgccgcttcccattgccctttatcaatcgaggcgatggccgcgcgcagcgtttccgccgcataggccgcagtattcaacgacaggccgatcatcgccgccgggatcgggtcaagctcaatgccgaactgcggcaagccgtagtagatcataaacagctgggcgataagcggcgtgccgcggaaaatggagatatacatgcgcgccagccattttaccggccagactggcgacatgcgcatcagcgccaggataaagcccagcaccaggccgaaaaacatcccgccaatgctcagctgcagcgtaaagacggcccctttcagcagaaaaggggcggaatcaatgaccagttggatactttcttgcatgctgtcgtttctgtattagaggtgaggatgataggcaaacagcgccggcgctccgccggtgtggacgaacagtatcggcccttcatccttaaagcgcttctgcgtgatgccgtcgataagcccggccatcgctttgccggtatagaccgggtcgagcaaaataccttccagctgcgccagcagcttcacggcggccatcccatcttcgtttggcgtaccgtatcctggggcaaagtagtcatcccacagtataatttcagccttcgactgtagctcgagactgttggccacggcctgctgcagcgcctccactttcggcaactggtcagcgaccgagcgcgacacggtcaccccaatcagttccgcctgcggcatcagctgttcaaggccgaccgccaatccggcatgggtgccggcgctgccggaggcgaccacgactgacgagatcgccaccgcgtcttcgcactgctggctgatttccagtgcgctttccacatagcctaacgcgccgagggcattggagccgccgaccggaataacatacggacgatacccctgcgcctcaatgcgggtcgccagctcatcgagctgggcggagggatcggtcagggcatcacacatctcaacctgggtgttaaagagatccagcagcagacggttgccattgctcagatagttctccgcccgggtgccgatgggattttccagtagcgccacgcaatgcagtcccagtttcgcagcgactgccgccgtctgacgcacatggttagactggatcgcgccggcggtgattaaggtatccgcgccctcgcgcagcgcatcggcggcgagaaactccagcttacgcagtttgttgccccccatcgccagcggcgtcgtatcatcacgtttaataaaaatttcgcgcccaaggtgatcggacagacgcgggagatactccagcggcgtcggcgcgccgatcaattccaggcgcggaaagcgggttaagttttgcagtgacatggcccctcctgactcagttatgcttcattatgcacacagttacgcgctaaataaaaaaaggcgcttccaggagcgccttttttcaccgctgtccgttatttcgtcacgtcagcgccaaaccatttctcggacagcgccttcaggctgccatctttctgcatgtctgcaatcgcgccatctaccgttttcagcaggtcgtcgttgcctttacgcagcgcaacgccagcttcctgacgagagaaggcttcgccggttaccgccagcgtattgttggttttcttcaccagatccaacgccgccagacggtctaccagaatggcgtcaatacggcctacacgcagatcctggtatttggtgggatcgtcatcataggtacggacgtccacgccctggacattctgacgcagccactcttcatagttagtgcccagtccgacgcccactttcttgcctttcagatccgccgcggttttaatcacgccttcgttacccttcttcaccagcgcctgcacgccggagacggtatatggggtggagaaatcgtatttcttcttacgttcgtcagagatagtgacctggttaatcaccacgtcgatacgcttggagtccagcgaggccagcataccgtcccacttggtcggtttgagatcggccttcacgccaagatgtttcgccagttcgttagcgaattccacttcaaacccggtcagcttgccgtcatccccctggaaactaaagggagggtaggtgccttcgaggcccacgcgtagggtgccgcgctctttaatctgattgagcaggttttccgccgcaaaagttctcacgctgacgccagccatcaaaacaacggccatcgcgcccatcatcgcctgacgacccagaagtgctaatttcatagataccccgaaggttaggattttcctgtagtgtaaggcgcttaacgccctgacaccaacatcgttacgctacatcttatgcaaatttattatatatgatccgctttagggtatagcgaaaatcagggctttcctcaccctttttgctggatatctcccatactgcaaaggtcagcctgttgacgtctggagcatggaagatgaaaaaccccaccttattgcaatgttttcactggtactaccccaccggcggcgagctgtggcctgaggtcgaagcgctggcgcccagcctgaatgaaatcggcatcaatatggtctggttgccacccgcctacaaaggcgcctcgggcggttactccgtcggctatgatacctacgatctctttgacctcggcgagtttgatcaaaaagggtctgtcgccacaaaatatggcgacaaagcgcagttgctggcggcgatcaacgccctgaaggagcacaatatcgccgtgctgctggatgtagtggtaaaccataaaatgggcgctgatgaaaaagaggctctgcgcgttcagcgcgtcgatgagcaggatcgtacgcaaattgacgaggagatcattgagtgcgaggcatggacgcgctacaccttcccggtgcgcgccggacagtattcgcagtttgtctgggactacaaatgttttagcggcattgaccacatcgagaacccgacggaagacggtgtgtttaaaatcgtcaacgattacaccggcgaaggctggaatgaacaggtcgatgatgagctcggcaactttgactatctgatgggcgccaatatcgatttccgcaatcatgcagtgaccgaggagatcaaatactgggcgcgctgggtaatggagcagaccggctgcgacggttttcgtcttgacgcggtcaagcatatccccgcctggttttataaagcgtggatcgagcatgttcaggaggtggccccgcagccgctgtttattgtagcggaatactggtcccatgaagtggagaagctccagcagtatatcgacctggtcgagggcaaaacgatgctgtttgatgccccactgcagatgaaatttcatgaagcgtcgcgccagggccgcgattatgacatgagccagattttcagcgggacgctggtcgaagccgaccctttccatgccgtcactctggtcaccaatcatgatacgcagccgctgcaggcccttgaggcgccggttgaaccctggttcaagcccctcgcctatgcgctgatcctgctgcgggagaatggcgtgccctcggtcttttatgccgatctcttcggcgcttcctatgaggataccggcggcgacggagagacctatgccattgagatgcccgttatcgaacaactccacgagctgatcgacgcccgtcagcgttttgcccatggcgtgcaaaccctttggttcgatcatcctaactgcatcgcctttagtcgtagcggtactgacgacgatccaggctgcgtggtgatcatgtccaatggcgatgagggcgaaaaggcgctgacgctgggcgaaaactatggcaacaaacgctggcgggattttctcggtaaccgggaagagattgtcgaaaccgatggcgaaggctgcgcgacctttacatgtaacggggggagcgtgagcgtgtgggtgttagaggaggtattgtagtcctctgacgtcgggcgggccagctatggcccgccaaaatctcagcgcgtggaggccggcgcgctgacgggccccgtcgctcgcgctttggcccacgccttctcgcactccggagtgagacgttcaacacgggacaacgtcatccgatcgtaggagatcgtgttgccctcgcgctcgacaggatagatgtccagggaagcggtcacgttgtagatctcactgtcacgattcatcagtttccccggctgcgcaatcacgcgctgccactggcggcagtcgaaggtgtccccttctttggtgacaatcaggctggcaatggcgtcaggactcatcatcgcgctctgcggccctttcgtttgccagaaacctgcaaggccagccggcgccggcgctttaacgacgtcctcataacgatcaacctgtacgcaaccggccagcgccaccaccatgccagcaaaaaataactttttcatcattcatcccacaagccgataaaaaagtattgtggcattaaagcgttaagccttccacccccaccgcaaagggataagcgagcaagccagcaaccgctaacgtgggtttcatttgaagtaaggaaattctgaaagtaaaagaatactgggcgcgtaaccatagcatctatgggcactttttgtttttaattcggtcacactaccggttcttgactttactttaagagttttcctggcaaattatatgcatagatgcggaatagtttaatggagctaatgggttctttctaaacctactattattatcgcccgcaaggactgcttcgcacagccagtgcgaagtgtatatcgttacgtgttgattgaggatgggtcatgtcaacgatgattatggatttgtgcagctatacccggttgggattgacgggatatctgaccagtcggggaattaaaaaacaggaaatcgttgaggtcaacagtgctgcggatctgcagaaacactgtacgtcgtgttgcccggcggtggtgtttctgaatgaagactgtttcgtgcatgatgatgaaagtaatggcattattcgccagatcattacgcaaaacccggcgacgctgtttgttatctttatgtcgctggcgaacatccattttgaccgctatttgcgggtacggaagaatctgctaatcagttcaaaatcgataaccccaaaagaccttgatgttattctggttaattatcttaaatacaaaaacaccagtgtagggcagttaactttaccgacattgtcactgagtaaaacagaatcaaatatgctgcaaatgtggatggccgggcatggtacttcgcaaatctcaacgcaaatgaacatcaaagcgaagacggtatcgtcgcataaaggcaatattaaaaagaaaatacaaacgcataataagcaggtgatttatcatatcgttcggctgaccgaaaacatcacctccggtattcaggtaaatatgcgctgaaacaaactggcggcgctcccgccagttcagttttacgagacctctttttccacgaaaatcccatccgggtggcctatttcattaaaaaaccagatccccagaggatagtcttccagtgaaaccagatacatcgttccttcactaaacgactcaatcgccagcactacccccgatcgacgtgggccaccgtcggtcttcaccgtgacacgatcgttcacctgcataatcatctcctctatattttcagccagtgtagaacaaaaccacgcaactcgcagcgtcgcggcacgtgactggcgcttttttagaccgactatacttagagaggcttgagcaacgctcagcgaggggggtaatgatgaagcaccaattaacaggccagaccggggacgaccttgacgtcaacgtagatgccctgctggcggcaattaatgagatcagcgaaagcgaagtccatcgcatgctggacgacccgcagcgcgccagcatcgatggccgcgggtcacatacctggcgtgagctggcggaggcattcgaactcgatattcacgatttcagcgccagtgaagccaaccgttagcggcaggcgaaaaaaatcccgactcgcaggagtcgggatcaaacttgctaatgcaagaagcacttgaaaattcgttacaccgggaaatccgatgcgttgaaacattatcctcaattattttgcatgacaagagatattcatgacgcaaaatattgagaatgttggcgcttgatgacttatcgggctgcaaggctgatgtgagaaggcttagccgcaaaccggtttcattcgatagcgcgatcgcctgcgatcactttaagataattctcattttgccaatcggcatcgaaacgttttactcacgctgcgctgcgaaaacagacctggttacgcccattttgcttggccagatagagtcgcccatcggccaccgactgcagcgcttcaaactgatactccccccactcttcgctggcgctcacccctaacgaggcgctaacccgcagcgtcacgttgttatgcaaaaagacttcccgtccctggatacgctggcgcaatcgctccgccaccgccgccgcttcctgcagggtggtattcggcatcacgatacaaaactcttctccgccccctctgcccagcagatcgccctgccgaaccgcgctggacagcgtactggccaccatcgacagcaccctgtcccccgcctgatgaccatagcgatcgttgatgtgcttaaaatgatccagatcgagctggatcaccgccagcggccgtccgctgcgctggcagtcgctggctaccgccatcgcctgttcaaacagagccccgcgattgagcaggcgagtcaaggcatcgtgccatgcctgccactccagagaggtttgcagaacgctcatgttgcggaccatgcggcggatcactagccaggagagcaacagcatcaaggtgaagaggacccacatcagggtcagggcgatggtgatggtgccaaagttcccgcggacgccttcccgcagagtgtggatccgcagcagcacgccgtcaaaattgcgcagtttggcccagctgatatagcgcgtcagcagacgcagccctccctggttatcatggacaaacgcgcggctcagcagctcctgctcgcgcggcgacagcagggtcaggacattccccggcgcggaagaagccagcaggttcaaatggctatcataaagttggtactctccctcttgtcccccctgcatggcgctaaccaaaaacgctttgatttcactgactgagaaatccatcgccagcacgccgcgccagtaaccggcaaaatccaacggtatcgaagcggtgaccacctgctcttccagctgcgggtcatcgtcaggaaaggtttgccagataacgcctcgccccggattatttcgttgggtctggcgggtaaaccacggagcgctgagggcttgggaatagtgcgttatcacctgcgactcatcccgcagcggcagggtcgaggtaaaaaagccgctacgagagatatactgcatccgctcggcgaaatcgcgatcgtgctgcgtcagatttagcagatagcccagctcgagcgtcgccattagttcatcagccgccagcggatcgtccaccagcaggatagggttgtcgccagcgacgctgcccgagatgccaaacaccggcagcgtacgccgattcggtagcgccacccgccaggcctgctgatggcgctggctcagatagcgttggctggccttacgcaatacatcgatatcgagcggctgttcgagcgccgcctgcatcccatggcgaaaaaacatcattctgtcgatgttgaactgcaacagcccatccatttcttgagcgacgttagccagattgttacgctggttggccacgtaggcctcttccaggacattgatttcacgccagatcagcagcgtggagaaaaacagcactgcgataaaacaagcgttaaccacatgcgccgggcgagccaggtggtagcacttttttaacttcaaccgcagtggcttatccatctttctctcgcagtacgttgcgcaaacctcgcggcgtcagcgccccggtctctgtcgatacccggggcgttttcagggtagaacacgcggcgccgttacgctgcgtttcgccatgctactttccagcgccacgcaggctgctcaccgccttaacgcccgccagcaccaccgcgccgatgataaaacccagcaccaggttggcgacgaccggcagcgtggaggccatcaccccacccaaccccgcgctccagtgctcgatggcatgatgcagcggcgcaataccgtgaacgactatccccccgccgacgaggaacatggccagcgtcccgacgatggacaacaccttcatcaggcggggagcgacggccaggagccctttacccagccactgcgccagcgcactacgtttttccgccagccagtaacccatgtcgtccagcttgacgatcacccccaccaggccatacaccccgatagtgaccagaatcgcaatccccgaaagaataaggatttggttaagcagcggagcttccgccacgatgccgagggtaatggcgacaatttccgcggacaaaataaaatcggtgcgaatcgcgccttttactttgtcacgctcaaaggccagcggatcgcgctccgccagcgcggcgagacgctgctgccgccgttcaggatcctctttgtgtttccgcgcttccagactgtgcagtaccttctccaccccttcgaaacagagaaacgcgccgcccagcatcaacaatggcgtaatcgcccaggggatgaaggcgctgatcaacaaagccagtggcacgaggatcactttgttaacgaacgaccctttcgccactccccagaccacgggcaactcgcgattcgcccgcacgccggtaacctgttgggcattgagagacaaatcgtcgcccagcacccccgccgtttttttcgccgctaccttgcccatcacggaaatatcgtccagcagcgtggcgatatcatcaagtaatgttaaaagactacttcctgccaaaatgattttccttctcttttcatcaatgtctccctcgagtatgcgttaaaaaacggccggtgcccaaggtacaattagtcaatataaatttaacaacctgacgcaaattaaccactcgccagcacgatagttttcacgtttactatatgtcccctttctatctctgcaccgtcgtgaggaagtatgtctacccgtcagcttttaccgctcatcggggcgctgtttgcgctgtatatcatctggggctctacctatttcgctatcgccgtcggggtcgccagctggccgccgctaatgatggccggcattcgttttctcgctgccggcgtgctgttgctggggtggctactggccaccggccataagctaccggcgcgtcgtccgctgcttaacgctgcgctgatcggcgtgttgctgcttgcggttggcaacggcttcgtgacgctggctgaacatcagcacgtcccctccggcatcgcggcggtgatggtcgccaccgtaccgctgttcaccttatgcttcagccgctttttcggcatcgccacccgtaaactggagtggctgggcattgccattggccttgcgggtatcgtgatgctcaacagcggaggcaacctgaacggcaacccctggggcgcactgctgatcctgattggttccctaagctgggccttcggctcggtttacggttcgcgaatcgtattgccgaccggcatgatggcgggggcaatcgagatgctcgccgccgggatcgtcctgctggcggcctcatggctgagcggtgaaaccttaacccgcgtcccttcctggtccgggatcgccgccctggcctatctggccatctttggctcgctgatcgccattaacgcctacatgtttttaatccgcaatgtcaccccggcggtcgccaccagctacgcctatgttaatccggtggtcgcggtgctcctcggtactgggttcggcggcgagagcctgtcgctcattgagtggctggcgctggcggtgattattttcgccgtagtgctggtgacgctggggaaatatctcttccccgtccgcagcgaggctactccttgtaaggcgtcgaagtagtcgtcagttcgcggatcccctgcgtatcgatctgcgcgtcgtgtccggcgccgcagatccactcttccagacgttgggtgagcgccgcatcactcagcctgaggcgcccgcgcagggcgcattcccagatgattaatacccgccagccctcttcggccagcttttgccggtcgcgggcgtcgcgcgccacgttaccggcgattttgtccagccagaatgccgtgcgggtggccggcaccttaaacagataacagtcatggtgatgccagaaacagccgtgagtaaagataacgcagcggtagtcgggtaaggcgaaatcggggcgtcccggcagcgcgcgatcctgggcgacaaaggtgaatcccgccccggtcagcagcgccgctatccgcttttcgatcgccgtatcgcgcgtggcgatcgcccgcatatttttactgcgcgtcgctttatcgtgaacatccgccatcattatcatccgcttcgcggcgcgccaccgcctgagcgatgcgcggcgccaggagtttcgccaccgcggcgaagaccggaaccaccaccgagttgccaaactgacgataggcctgcgtatccgataccgggatgcgaaaacgcgccccctgcggggattcaaagcccatcagccgggcgcattcgcgcggcgtcaaccggcgaggccgccgctgttgattcagcggatcgtcaaaatgcttctcaccgagcggccggtcccagccgcgatcgacgagaatttcggcaccatctttatagtagcgggcagaaagcgtccgggccacgctgtggggattggcggggtcaaccaggccataaccaaagccattgccccgcgcctgatgcttgcgggcataacgataaagatatttccacagcaccggcgtaagaataaatttcgcatcgaccgtcggctccagcagctcgccaaatgttggccgcactgccgggtactgcgccgcgatgtcgcgcagcgtaaatccagcatgcagctgcagatcgcgacggaaacccaccagcacgatgcgctcccggtgctgaggcaagaaatggcgcccgtcaatcaccttcgggtcatccggcccggtatgccccgcgtcagctacttcatatcccagctcatccagcgtctgcatgatgatacggaaggtgcgcccctgatcgtggcttttgaggtttttgacattctccagcacaaaaatcgctggctgacgagccgcgataattctcaccacgtcaaaaaacagcgttccctgggtttcgcaggcaaagccatgcgcacggcccatcgcatttttcttagagacgccggcaagcgagaaaggctggcaggggaagccagccagcagcacatcatgctgagggatagattcacgaatatgccgcgccgcctcctcgtcgctaacgtcagagcgttggctgagggtaatatcgcggatatcttcattaaaacggtgctgctgcggatcacagtaccagttggccttataggtgcgtaccgcgtgcttgttccactcgctggtgaaaacgcactgcccgccgatggcttcaaaaccactgcggatcccgccaataccggcaaacagatcgataaaacggaacccatagtgcggatgatgggccggcggcgaaggcaggagcgtcgccagatgagcaacttcctgcgggcgcaaacgctccgccacgcggccaagcgccaccacgcgcttgaggatcgccgcgctccagtgctgttcgccgacgctcaccagttcggcaaccagcgtttttacatcgtagatcgtcatcagctgacgcagcagcgcctcagcgtcttccccggcctgttcagccaacgacaacgacctgtgttccttgcttaacttttgcggcatatcctcaaccaacgcggacgattttggcagagagtaccataaatcaccggtcggttgacgcctgcggtgcaaagcggcgcaaaaccgcttcatccagcgccagcggctccccctgcagctccgcgctgagcttagccataaattcgacgagaaaacgggcattatgctgcgccatcgctttccccttgtcagtttgcatggtttccggcaggcgcagaagtttgcactggaaatggtcgagggcatatttgcggtcatccagcgcccgccgatcagcaaaaggatcttcggcatcaaacaagatggtattcagagcgccggcgacagcgaagaccctcgccagaccaatggctcccagcgactcgagtcgatcggcatcctgaactattttcgcctccagcgtgcgcggtgggatcgccgcgctgaagctgtgcgcctcgatggcatggctgaccgccgggtaacgatccgcaggaaaatcagcaaaggccgactgcagaatggcgagggttttctcggcggccatcatcgaggatcgacttcgctccggatgattttttggcaagctgacgatgtcatgaaaatagcaggccgtgaggagtaccagccggtcgacttcctcccccgcggccagctgagtggcggtcgcccagacgcgacgaaaatgggacagatcgtgtgcggcgtcatcctgcgcatggtgcgtcagtatccagcgctcaaatcgttgctgccagtcaaccaggtccataggctttcctttatctgagggtcagcctcgagcatagcaattttagcgctgatgatcctgctcgccgcgggatggacgcgtataccagacgaccgcgccgagaatagagccaatgccgccgaggaccagcatacccaacagggcgccaagccatttcccggccgttgttccaaaatcaccctccacgctggcgccgggaacgctgtgaatttttcccactacccaccagtaacgcacaatgacccagacacaatatccgcaaaaagcatacaacgcccagagcgcaagtttccctcccgggctgcgttttgcctgctcttccatctcattcctctccgtgacacaacagactattgtcactcaaaacgtgacacgcatcacattataccgctaacctgcgtcacaggcagcagttacatcttcgtcttctgcgccttctcgcgacttatgctgccaatgcgcacaggctgaagagatgtccttattatctcccgtacgcttaaagctattcattccttaattatcgcaagctgggttgataattccctggatatttacattcacacaaaataaatttccataatgaataatgtgcttgattgttatttgttcattttatttcataaaattaacaacaaccaaccaaagatacaataacccattgctatataagaaaataatgaattttgcacaaacatcaaaatttaatataaagaaccacttagaaatattttgaaatgtttaacattatttatttacatattttattttaaataaagatgaacttagtcgttagtatcggatcgtcattccggagggattgtcataattcatagaaattattattaaaagggaatatataatgaaaagaaaagtactggcactcatggttccggcattattaatggctagcgccgctaatgccgccgaaatctataacaaaaacggtaataaactggacctctacgggaaagttgacggcctgcattacttctctgacgacgcttcagaggacggcgaccagacctatgttcgctttggtctgaaaggcgaaacgcagattacttccgagttaaccggctacggtcagtgggaatacaacattcaggcgaacaccagcgaaaaagaaggcacgaactcctggacccgtctcggctttgccggcctgaagtttgccgactgcgggtcgctggactatggccggaactacggcgtggtctacgacattgaatcctggaccgatatgctgccggaattcggcggcgatacctacacccagaccgacgtttacatgaccggccgtactaacggcgtggccacctaccgtaacagcgatttcttcggcctcgtcgacggcctgcatttcgccctgcagtatcagggtaataatgaaaacgccggttctggcgaaggcactaataacggtgggaaacgtaagctggcgcgggaaaatggcgacggttttggtatctccagctactatgatctcgatatgggcatcagcttcggggcagcgtattcgtcttctgaccgtacccataaccagctggcggccgcgcgtagcagccagcgttatgccaacggcgataaagccgatgcctggaccgtcggcgcgaaatatgacgccaataacatctatctggccgccatgtatgctgagacccgcaacatgaccttctatggcaacgatagttttggcggaattgccaacaaaacgcagaacttcgaagtggtcgcgcagtatcagttcgacgactttaatttaccgctgcgtccgtccgtggcctatctgcagtcgaagggtaaagatctctacgcctattctcgctacggcgacaaggatctggtcaagtatgtcgacgtgggcatgacctactacttcaacaaaaatatgtccacctatgtggattataaaatcaacctgctggatgacgacgaccgcttctacaaaaacagcggtatcgcgaccgatgatatcgtcgccctcggcctggtctatcagttctgatccccgtcaaagcccgcgttcagcgggcttttttatgttcccgctccgttgagatcactcttttcgacattgccgctttccaggcgtaccttccctctttatgatgcgtttaagctcgttcgggctaaaagcggcgataagggtccaaaaggataaagcgcgctaccgcgactctacgctgaaaccaggacgatgatgatggtgataccccagcgcaggcgttatacctgaagctaacggggttattgaagggaaggttagagcaagaaaagtggcggagagagggggatttgaacccccggtagagttgcccctactccggttttcgagaccggtccgttcagccgctccggcatctctccgctgtgatggttgctataatgccaggatctttggcattttaatagctcccgtttcggtaattgtgttcaagtgacgactttgcgagcaatatgatgtttaaatggccctggaaagcagatgatgagtccggcaacgcagagatgccctgggagcaagcgcttgccattccggttttagcccatctttcgtccactgagcagcacaagctcacgcagatggctgcccgttttttacagcaaaagcggctggtggcattgcaggggctggagctgaccccgctgcatcaggcgcgcattgctatgctcttttgtctgccggtgcttgagctgggcattgagtggctggatggctttcatgaagtgctgatctaccctgcccctttcatcgtcgatgatgaatgggaggatgatattggtctggtccacaaccagcgggtggtacagtcgggacaaagctggcaacagggtcctgtagtgctgaactggctggatattcaagactcttttgatgcgtcaggctttaaccttgtggtgcatgaagtggcgcataagcttgatacgcggaacggcgaccgggccagcggcgtgccgcttatcccgttgcgtgaagttgccggctgggagcacgatctccacgccgcgatgaacaacattcaggatgagatagatctggtcggcgaaagcgccgccagtattgacgcctatgccgccaccgatcccgcagagtgctttgctgtcctctcggaatattttttcagtgcgcctgaactgttcgcgcctcgcttcccggccctgtggcagcgtttttgccacttttaccgccaggatccgctggcgcgtagacgtgagaatggcctgcaggacgaaggcgatcggcgcattgttcactaaaacaacgtgttgagctaaatttagccatttgaatcagcaggttaattttagtgttgacacaaaaatgcgaggccagtagtatgcgcctcgttcacacgattcctctgtagttcagtcggtagaacggcggactgttaatccgtatgtcactggttcgagtccagtcagaggagccaaatttaaaaatcccgctcagggaaacctgagcgggatttttgctttccgtgatcctctccgctccccaagcatgcaatcttatcctggtgtaggtgctattttcttgctatgaggcaagctgaacggccgtgagccccacgctcccgcaaaggcttaaataaaggcggtttaaccgtgccggaccatacctgggtgtaaggcaatcatgcgcggttccaaaaaagatcggcaacaccgccgcttctgacatctctccgccagcgggtataagcagcatcgtaccgtaggtaccgtccaaggttccgtatgtgatccccgcaggtgaaaagcagcgatgctgctcccaaccttatggctacagactttcgatccggcggtaaccgctgggtctgccgctgcgtagcagacgatcccgatccggcagttacctttacagacagcgcgggctgcccaaatgcattttccactggcggaaagacccgtaacgcttagggtagcctggcaataaccttaatctcgaacttaaatccataaagccacgtcacgccgatcccggtcagcgtagggtaaggcgcttctccccaatattctggcaggatactccagatagcgtcgagatttgactcaggatcgacgacaaagagggtaacatcaaccacgtcctcaaacgtgcagcccgccgctgcgagcacagcattaagatttttgaacgccagcctgacctgtgctttcagatcgtgctcaggcgaaccatcctcgtggctacccacctgcccagaaacaaacaagaaaccattggatttgatggccggtgaataacgattgcgctcatagagcgcctgacgaccgaagggaaaaacggcttcgcgtgctgtcatgtttgtacctttatgctggggcgaaatcagcccggtgaatgtaaagacactgtacaacgacgagatcgggcggataaacaagcgactttgtccctcattgtttgtaatatccaaacaatcgatgaaagacaggataagaaatggatcgtttcgatgcaatgcgcgcctttgctcgggtggtagaggcagggagcttcacgaaggctgcccaaacgcttcatatgagcaaaactacggtgacgcaactcattcagcagctggaatcgcgcctgcgcgtcagattgctccatcgcaccacccgcaagctcggtgtgactcccgatggcgcggtctactacgaacgcgtcattcgtctgctggcggacatggaggatgctgaaaacagcctgtccagtgcggcgatgacgcccaggggacggctacgggtggatgtaccgagtccgctggcccgtcttattctggtgccggcgctaccggctttccacgcccgctaccctgatatccagatcgacatgggtgtgagcgaccgggaagtggatctgatcggcgacaacgtggattgcgttctgcgcggtggtcaaatcaccgaccagtccctaatcgcacgccatgtcggcgatttgcaaatcggcgtctacgtcgccccccgctatgtggaacgccttggcgctcccgcacacccgcgcgagctgcaaaatactgaccattgcatagtgggattcttgtcctcgcgcaccagtaagattgatcctttggtactgtgcagtgagaatgaacgtattgaaatcacgggcaactacgtacttgccgtggatgatggcaatgcttacctcgaagctgggttagttggcttaggcgtgattgcgctgcccaactatatggcggcagcgcatcaggccgttggcgctttgattccattatttacacaatggcggattagcccaatgcctctgtacctggcgtttccaccgaaccgccatgtcaacgccaagctgcgcgtttttattgactggatcgttgaattgatgcagcagcatgtccccattaccaacaataagtaacgacatcccagctccctgattcgcttatcaacgacgatggggttcagcggtagtgactgtggtcaggcgtgttttgacaatagggattcagcagaactcatccgtcttatattctggataatggctatcataaaggggatcttcgctttcatggacaatggcagccaaaaaaaagatcctcagtaacaatattaagtccatagatatatttgcagactttatcatcccctcctgagcatctcctggcgccctcattaaaacgccatcaccgccactgctgataagttaaggatcggtttcccgatccttattcccaacaacgttgaatgcatcgacagcaaaagagccttcttacaatagccgttaatcagactaaacgacccgctacaaacttccctgcgccgctgtggcgctgatattcaccggcatgccggagcggcgctgcagggtctgctcgacctgggcagggctcactcccggcccctgggtaaagtcgcgcagcgccgaggtcatcggcaaggggacttttctgtcggattcaaactccgcgcggttgcgcgacagcggctcgtgcacctccagccagtgactgccgtccggctccacgctgtacttcaccggctgatcgatcagctgaacccgcgtcccaaccggcacgttatcaaacaggaatttaatatcgtcattgcgcaggcggatgcatccctggctgacgcgcagcccgataccaaagttggcattggtgccgtggatggcgtagagcctgccgatgtagatcgcatacagccccatcggattatcgggcccggggggcaccagcgccggcagggttttgccctctttcgcatactcgcggcgggtattggcggttggcacccaggtggggccttcctgcttacgctctactgccgtcacccagttacgcggggtttcgcgtccggcctggccaatgccgattggcaggacttcgacgctgttgcccagcggcgggtaataatagagacgcatctcggcgacgttgatgacgatcccctcccgcacggtgtcaggcaggatcagctgttgcggaatggtcagcgtcgaaccggagcgtggtaaatagacatcgaccccggggttggcttccagcatattgcttaacccctggccgtactgggcggcaaaactttccagcggctgggtgttattgtccggaacggcaatggtaaatgcgctgcccaccaaacggctcccctccggcggcagcggatagctgacggccagcgcgccgtggctggcaagcagcatcagcgccgtacagagtaatttcacacgccgcatcgtcattttcccttcctcagtcgcgactcacgtgtgtgaattatagcgttatttccactccccgacccgctggccagcatttccttaaatctgatagtcgattgcggcctcttccggctccatcgcctgacgcttaatctcatccagcgacagtccggcattgcacaattcgataaagcgccaaacgtaattccgctgcagctggccccgcttcagtcccaaccacacggtattggcatcgaacagatggcgggtatcaagacgcgtaaaggtgtccgcttcccgggcatcaccggactgctcggcgaccagcccgacgcccagccccagctccacgtaggtcttgatcacatcggaatcctgcgcgctcagcacgatatccggcatcaaccccttgcggttgaacgcctcatcaatgcgcgaacggccagtgatcccctggcggtaggtgattaacggccagcgggcgatcgcctccagcgtcaggggagaaacctgcgtcaaaggatgatccttcggcaccagcaggctgtgatgccagcggaaccaggggaaagccgccagcgtcggatcgttgctcaggcgctcgctggcgatgccgatatccgctccgccgttatgcagcagcgcttcgatttcctgcggggtaccctgcaccagctcgacgcgaacatctgagaacagctcgcggaaagctttaatgaccggcggcaggctgtagcgcgcctgagtatgggtggtggcgatagttaagacgcctgacgcatcgttagtgaagagatccgccagccgccgaacgttactggcttcattgaggatccgctcggcaatcgataacagcgctttacccggctcggtcatgcctaacaggcgtttgccgcggcggataaagatctcaatccccagctcctcttccagttcccggatatggcgactgacgcctgactgcgaggtatagagcatattcgcgacttccgtcaggttgtaatcctgacgggccgcctcacggataattttcagctgctggaagttcaccctttcctccgggccaatggacttaacgtatctgctattgttaaagtctgttgtcccaggtaacaaataataaaaaccagcaacttattccttaagagaatataccctaactgaccagctgcagttcacggttttccagcgatgggcggctcaccagagacagcaggatctctttcaccgcctgcgcctgcggcgacagactgccgcgagccgacatgttcagcgacagcgacaggctcattgaaggcgtgctgatccgcgccatccagccgttcgccgccccgcacagggaacgggcagcggattccggtaacaccgtcgcccccatgccgctggcgatggccgcggtcagggtggtaatggattcgatctcgccgataattttcgccgacagacgacgcagggtgaatgcctcggtgacccgcgcccgcactgcgctgtaatcgcgcggcaggaacaggttcatctccgccaccgccgtgagatccacactctgccccgggcagtcgcgggtgccgaccaggtaaaggtcttctttcagcagcggctggctgacgatgcctgccaccggcgaacgctcatagagcaccgccatatccagctggcccgccagcagcttgtcattcagcgctgtgccgctgctctcctgcagatagaccatcacctcgggcaactcattgcgcaccgtttgcagcaacggcatggtaatggcggaggccgcggtgcccggcgccaggccgatcgacacctgaccacgcagcgtctggccgacgttattgaccgccagctgcgcctgctcgcactggcgcaggatagtgcgcgcatgggtgtagagaattttaccggcttccgttggcgtgacccctcgcttggtgcgtatcagcaactgctggtccatttcaccttccagggtcgcgacctgttggctgagggccggttgggcgatatgcaagacttcagcggcctgggtcagactgccgatatcgacgattttcacaaaatatttcagtcgtcttaagttcattttgcctcctgtaaggaacgccagcgtcaacgctgggagtatgatgcactggcttttgcaatttgcttgccagctttgcatttcctcggctgtcgcccgccgcaggcagtgttataagggatagtgatagcaattcggtttttatttgcccggtaagcagattgtggtatgccccattaggggtaccttcgcactacaacggtgcaatatggtgaaaaaaacagcgcatgggtggcgattgctgaaattgtcagcagtcgaacgcaattctttgaatcaggctttgacaaggccggatggcatcgttaatatgcgccccgttcacacgattcctctgtagttcagtcggtagaacggcggactgttaatccgtatgtcactggttcgagtccagtcagaggagccaaatttaaaaaagcctgctttcgagcaggctttttgcttttcagcgccggtatttctgccggaaggcgaatggccaccctccggcggttgcggctttagcgtaaactctcttccttcagatctatctcccgcagcacctcataaaaagtgatatcgctgatgttatgggcgcggcgcagccggaacagctcctgacgctgggcgataatgacctctcgttgcatatatttctccagcctggcgcgcttagccagctccagcccgacatcctgcccctcgtcattgtcgttatagtgaagccgccgctgataggtctcgagcagcatattgccggcatcggcccgcagggcctgctcactgggatcctccaccggctcgtccagtagcgcgttaagacggttaatggccacctcggtcatcacggcgccaatgtcatccttaccggtgtcatgcggaagatcatcggcaagataacgagtcataaacggcagaccgatagccgccaccaccagcgacatcaggatcaccgccatcgaaagaaagatcagtagttcacggcccgggaacggcgaaccatctgccagcaccaccggcagcgtcagaataccggcgagggtcacagagcccttcactcccgccagcgccatgacggcgaggatactgaagcgtggacggacggtgatggccttgccccgacgtttgcggcgaaaaattgtcagcttcatcgacagccatacccaggcgaagcgcatcagaccaagcgccagggtgatggccacggcgtacctggctcttatacacatcggacgctgccgacgagcgatccagtttaaatcatcggggtcccggcgacataggaaaaaaaccacaagaagggaaagccagaacatatcggatggctgcagaatgacagcagaga

SEQ ID NO: 146 - DNA, 78524 bp, Unknown
  source: /note="Description of Unknown: MKP2_2161_1 Mutant Bacteria sequence"
gggcggggggggggtgggggggggggttgtttggtggggggcgtcggcggcgtccgagggatgcatgaggtcggtcgtcggcagcgtcagatgtggataaggggcagggcagtacagattctggttgcgggtaagaaagtgctgacggccatcgatctcgcagccatcgtcaatcgccagcgcggtgccgatggcgttggtcccgcgcccgctttcactccacagattgccgggagccagcgccacgcgctgggccttttgcagcgcctgggtatcgccgagagtatgcagcaccaggccgtcggggtcggaaaggatcaccaccgactgcaggtctgcgacctggcgcgacagggcttccaccaccggctgcgccagatgctgcaggccgcggtggctggcgagccggtccgccagctcgccggcgccgaggcggggaaaatcctcggtggcgggatccagcccgtagcgctggcagcgagaccacgaatcgctcagcaggggattcgcattaacctctggtgcgagaagaaagggattgcctgccacagggcacctctgggtcgatgttgctgtgttgcaatattgtagccatttggtttatttggtgttgcgatttgcaacacataagtggaaacccgtgcgacagtggctgaccatctgctcggttagtgaaggcaacgtattaataaataaaaaatatttaaagaaaataaaaaactggcataacccctgcaaagtgagaagcgttcggcggcaaatttaaaaaatcaatatgccgctgcgtctcaaccctacagaaggagatttgcgatgcgttatgcacatcctggccagcccggcgccgtggtttcatttaaatcggcttacggcaactttattgacggtagatttgtcgagccgctgagcggtgaattctttatgaatacttcgccggtcgacggcagcaacattgcgcagtttccccgctcggatgccagagacattgacttcgccctcgacgccgcccatcgcgcggcgccggcgtggggtaaaacctcagtgcaacagcgctccaggctgctgctgcaggtcgccgatcgtattgaacagcatctggaatatctggcggtggcggagagctgggacaatgggaaaccgatccgcgaaaccctgaatgccgacctgccgctggcggtggatcattttcgctacttcgccggctgcctgcgcgctcaggagggaagcaccgccgagattgacgaaaccacggtggcctatcatttccatgaaccgctgggggtggtcgggcagattatcccgtggaacttcccgctgctgatggccgcgtggaagctggccccggccctggcggcggggaactgcgtggtgctcaaaccggcggaacagacgccgctaagcattaccctgctgctggagctgatcggcgatctgttcccggccggggtgcttaacgtggtgcagggtttcggcaaagaggcgggcgaggcgctggccaccagcaagcgtatcgccaagctggcgtttaccggctccacgccggtcgggcggcatattctcgcctgcgcggcggaaaatattatcccctgcaccgtcgagctgggggggaaatcgcccaacatctacttcgccgacgtgatggacggagaagaggaatttattgagaaggcggtggaggggctggtgctcggcttcttcaaccagggtgaggtctgtacctgcccgtcgcgggcgctgatccatgaatccatctatgagccctttatggcacgggtcatggagaaggtggcgcagatccgccgcggcgatccgttagataccgacaccatgatcggcgctcaggcttcccgccagcagttcgacaagatcctctcctatattcagattgcccgggaagagggtgggcaaattctgaccggaggcgagcgggcggctatcgcgccggcgctggataatggtttttatattcagcccacgctgattaaaggtcgcaacgatatgcgttccttccaggaggagatctttgggccggtgatcggggtgaccacctttaaggacgaagcggaagcgctggctatcgccaatgagacccagtttggtctcggcgccggggtgtggacgcgggataccaacctcgcctatcgcatgggtcgcggcattaaagccggtcgcgtgtggaccaactgctatcatgtctacccggcgcatgcggcgttcggcggctataaacagtccggcgtcgggcgggaaacgcacaagatggcgctggatgcctatcagcaaaccaaaaacctgctggtgagctacggcaccgcgccgctgggcctgttctgaagtccatctcatttctgaccgatcctcagtccgcaatccattcgggttgcggattttttttacttcaaaataaccatgtgaagatggtggctattttgccggcggcagcgcccatgtatttatgtcacttatgtattggctttcacttgaaaataaaaacacttccataataagggattagccggtggaggtggcgcaccctggcgtcgtttgtgtagaaattatgaatattaataccaggaaaattcctaatttttgtgtacgctctgacgagcgcacaataaaacaagacgaatttttgaacaattgtctttaaatttgttaattgaattgatctgttgttgtttaaaggtatttgaatttcttttgtatagatatgtaaattaacattgaaaagccatttcaaaaattaaatatatggcgaacatagctattaacttatagttaacatctccccgggttgccttttgatacttcgggtaatatatttatttcgcacatcaaaataactcttttttcttctgtttgttattcatggccatctattggcgaaataaggcagagtagagggggatgtgcctaatatcctgcggaaggaacgcaacgtacatttacagggaggagctgacgagccgtttcgcgatagctttggggctattgtcgatgatggaaaatatgttcgttaacgatgagataaataatgaaaaaacaacctcgctttataaccatcctcataggagcgctgctttctggcgtagccttgcaggctaccgcggccaacactatcaatcctgactcgggcaccagttcggaaggcgccggcgggcaggtcatcttcaatgggtcaatcaccgacagctcttgcaacgtcgatagtagttctaatggccagaaggttgatctgggcaaatgggccagcaactattttaccggcactggttttgaaaccaccaaaacccccttccatatcaaagtgaaagattgcccggccagcgtgactacggtcgccgtgctgtttgacggcgcgcgcgatcagtctgataactccctgctggccatcaacggcggcgccagcggcgtagcgattaagctgtatgagcacgatcggtcgacggctgtcagcctcggtaaaacgtcagccaaacagacggtcactccgggtaccagcggcggcaccggctctgccgacctcgagttttacgccgactatatctccaccgcggcgaccgtgacggcaggtaaagccgacggtacagctaatttcaatatgatttataactgatctaattgcgcgttattcagagtcagcccactgcgtcttgattaattacagatagctaatgtgttaattgtcacgaagtcacgaaatatattcgtgacggtatagttgtttttgctaattatcccgtcgagtactggctctgttattcactgctttattttgttgtctgttcaacttttacctgatggtaagtcatgatgaagaaaataattgccgttgcggcttttctgctgtgcaccacggcagcgcaggccggtattgtcatgggtggaacccgtgtgatttatcaggaagggaagcgtgaagccgctatttcagtcaccaatgccgatacccatacgccctatctggtgcagtcgtgggtggaaaattacgcggaaaacgataaggccagggtgcccttcattgtaacgccgcccttgttccgtctcgatccggagcaaaataacgttctgcggattaactttattggcgcctcgctgccccgcgaccgtgaatcggtcttctggctgaacgtcaaaagtatcgccccgacgcgtcagggcgaggtgaataagctgcaggtgaatattaaatcgaaattcaaaatcttctatcgccccaacgacctggcgggcgacccggcaaaggcctggcagcagctgaagtttagccagtccggcggtcggctgacggtgataaatcccactccctacttcgtctctttttacgccgtcgaagtgggcgggcaaagcatcgacgatcccggcatggtggctcccttcggcgagaaaacgtggccggtgagcgggcacggcaccgtcaaatggcgggcgattaacgactacggcggcgtcagcgatttcgcccagcagtaattcccctttttgatgagcttaccggacggcgccagcatgaaaagaataacaacagccagggtgcgggagtatgccttgttgcccgttaccgccgggcgggcggtggcgctggcgacggtgccgacgatgatgttttgtctcagtccgttgagccgggcgctggccgacgactattttgacccggcggcgctggagtttgctgacccgcagcagcaaacctccgatctgcactacttcgccaaacccggcggccagcagccggggacttatcctgtcaccgtggtggttaatgaccaggagctgggtcaggctgatatcacgtttgttgacgatggcgggcagctgcgcccggtgctgacgcccggtcagctggcggagtatggcgtcaacgtcagcgcgtttcccgcctttcaagcgctgcatgaaggcgaaaccttcacccggatcgagaagtttattcccgacgccagcagtcggttcagcttcgctaaccagcgcctgacgctgagtattccccaggcggcgatgaacgtgcaaagccgcggctatgtcgatccgtcgcgctgggacgatggcgtgccggccgcgtttgtcgattactatttttccggcgcgcaaataaagaacgccgacgaaggggagagcagccgctcaaactatctcaatttacgcagcggcctcaacctgggcgcctggcgactgcgcaacatctcctcaatgcagtatgaccagcagcgccggcactgggatacccagagcacctggctgcagcgcgatgtccgctcgctgaagagcttgctgcggatcggcgatacctataccaccggcgatgtgtttgacagcatacagtttcgcggcgtccagctgatgtctgacgatgaaatgctcccggacagccagcgcggctttgcccccaccattcgtggcgtggcgcacagcaatgccaaagtgaccgtctctcagcacgggtatgtgatctacgagacctttgtgtcgccgggggcgttcgccatcagcgatctctaccccacctcgcagagcggcgatctggaggtgaaggtgaccgagagcaatggcgcggtgcgtacctttacccagccctattccgcggtgccatatatgctgcgcgaagggcgcggcaaattcagtctcagcgccggccgctaccactccgggggggagtcggtgcgctcgccggaatttctgcagggcactttgttctacggtttgacggcgggattcaccctctacggtggtacgcagctggcccgggactatcaggcgtgggcgctgggcctgggccgcggttttggcgagttcggatcgctgggaggggatgtcacccaggccgtcacccgtacgccgtcgggcaagcgctatacgggccattcgctgcgcgctcagtatcagaaaaattttgtcagctcgggcactgcgttcagcctcgccagctatcgctactcgtcaagcggctattacgattttgccgaagccagcgcccttgaaagcgcccaggggcaagtagacaaccggcgtcgccgggaagagctgtcggtgtcgcaaagccttggtggcctgggcagtctggcggtttccgcctggtcgcaggagtactggcatcggcagagtcgggatgagacggtgcaccttgggttctacagcgcctggaaagggatctcctggggcgtgggctattactacacccgcgccagcggccagcaaaaaaatgaccgctcctggtcattcaatatcaatattccgctgggtggtccgctgtccgacagcgcggtgagctacaacaccacctcggacagcaatggctatacctcgcagcagatgtcgctgtatggcgcggtgccgacgcggccaaatctgttctactcggttcagcaaggttatggcaaccagggacgaggcagcaacagcagcgcctccctggactaccacggcggcttcggcaacgcccagatcggctatcgccatgacgccgccagcaaccagttgacctggggaggcgccggctcggtggtcgcgcatccgcacggcgtcaccttcggccagacggtgggtgagagcttcgccatcgtccgggcgccgggggccgccggcgtggcggtgcaaaacggcaacaatgtgcacaccgactggcgcggctatgccgtggtgccctctctgaccgcctaccggaaaaatgtcattaccctcgatacggagtcgatggccgacgacaccgacgtcgaccagcaggggcagaccgtgatccccggcggcggcgcggtggtgatggccaactaccagacccacattggcaaccgggtgctgtttaccctgcgtaatgcccaggggccgctaccgtttggcgccagtgcgcggctggtcgaggaggaggagagcggcaatccgccgggcggcatggtggccgacggcggccaggtgtatctcagcggtgtgccgcaggagggaaccctggcggtgagttggatcgtcaacaaccagtcgcagagctgcacgctgcattttcatcttccggataacccacagcagagtctgaatacggtgaaaaccgtctccggactgtgccaggcacgctgaggcggctatgaaatctgtttttcgtctacttcctttcctctttctgctggggctgagcgcctatcttcccggcgtgcgggctgaaacctgccgcgcaaatatcggccagaccacggtcaatattcctaatatcaagtatttacccacgctgccggtcaatacacagatgaccagcgcgatggcggataacggcagcgggatccctttttcctgcgacctgcagctgccgacggcgagcgccaaacgcatcgtctataagcagctgaaaaccggcggctcgccgatggtgattaacggacagcatgtctaccccagcgctatcgacggcattggttacgccctcagcttccagtgcgccggcggcccgatgcgtgccatcgatggcagccactccgccggcggcgagtcggtggtggtatgcgacagtgcgacgctcccggcgctgatgacgcagcagcaaaccacggtgaggattgcggtaaccttctataaaaccggaacggtgcaactggcggacgggacgcataccaactcgccgccgctgccgcaggtgggggagatgaccattgaacagcaggccagcgcaagcgccagctttgtcgccagcgcgccggtcagcatcgatatcgccgccctgaatgtggacattggcagcagcggcagctgccaggtagcgacatcgacgatccaggtcagtctgggtacggttaaccggggggagtttcatggcaaagggactaccggcggccaggcgaagcgcttttcgattccggtcttctgtccgacgccgaccgacgtgcgcatcggctttttcggcgtcagcgtggagagcgataccctggccctgagccaggccagcaacagcgccagcggcgtcggcgtgaagctgacctacggcaataaccccggtgcggcagtgcccgacggcaccagcgttaagatcaatgaggccagcaacttgccgatcctgaaaagggtgaccggcgccagcgccggtaccgccgaggcgatcaatttcaacgcccagtatgtgcagactgacgccacggtgggagccggtacggccaacagcatggtgactttcgccctggagtataactagcctggggcggcgttattcaaaggtcacggtgattttggcggtcgcggaaaaaggccccagcttcggcgttctcgacaaccagagcagccccgccgtataggtgctcgcgagggtcgcgcccgttgccagcgtaaagtgaatcggagcattcatctcaataaggggatgcatgctggcgtttggcgagatggcaatgccgaagccgctgtccggctgcggcaaaataatggcgctctcctgtatcgtattagtggtgctaaacgtagcaagcataggttcggtcccgcaatcactgccgttaccctgcttgaccagaccataggtgacggtaaaggggcgtgttttttcatagtagcccggtcgggcgttaccggcaggaatatcgccaaagttaatttcgcttggcgaaatagataccgtggggacgcaggccattgttcggatacggttcaggccggtaatgaaaagattatagttggcgccagcggtgccgttgcgtagaccgccttggccatctacctgaaaaagagacaattttaggttatcgtctattttaccttccccggtcactctgcggcccgtcgagatgatatagacctggtaaaccaggctgaatgtctgcccaatggccggggacttacaggtattcccgcttttatcacacagcgtcgccgggccaatctccaccgattttttattttgtagcagatagtcgatgccgttgtaagtaatgcctacctggataaagtcgggcaagctgctggctttattttccggatccagccagaaataggcgctttcaccgttcggaaaattatcggtatcttcgcaactgaaggtggcggtaatagggctggagacccatatctttttattggcaataagctcgctgctggagactttaatgatgctctcgatattcacgacttcgctgatcgtggacgaggtggtcttgcaggtcagcgcctgcgccgggaaggcgctcagcatgaacagaacggaaagccatgtcagaaataacgtatcgctaagtcggcgcataattacctcgagggggttactgtgcagattaaggataattcacgccaggccgtcgcctgctgaggctcctggcgcagttcgggcagggtgatttcgcagctttgctggtgcgtttcgccccatttcatctgcagcttttcgcctgaatcgactccgctgacgtaaacttctcctcccgggccgaccagaccattgctgatcccactggcgcgatagagctgtgcgcccaatggtggatagctgccgtcggcgagggtggtatggatcagcacgctatatccccggaatgtatcaaagcgcacccgggtgattgccccgcgggtaggcacggtatccgctaccgcgttagggacatcaagaaaggtatcgaagtcctgagggttgagcacgacagaattgacccgatagggaacgctttgtggtacgacagcgtagccgaagggatcgatgcgcacgccggtctgattctctatccctaccccctgagcgtctttggcctccactagcgcaaaggttgagcccagcggttgcgagagggtaacgccgccgcggtgcgccaccacgccgccgctcagattcagactcgcctgacgatggcttttgctgtaggcgtagccagtatacagattaccgtactggccgagataacccaggctggcgctgttggtgctaaggctggtgtcatcataggcgctggtgacggcccagctcaggcgaccatcatcgagcagcgtgccgtttaccccagcctgcccggacgtgccagacgatttactgtgggcgagggtaaatgcggtattgatccggcgatcttcttgcagagtaaaagggatggaaacgcgcagtgttatgctattgtcgtcatgggtgaagtggctgcgcgtattctgatagtacagaccatagttcacgttatggatagtgctgttaaagcccgcctgcagcgagatatcgcttcctgagctattccagtaattttgctggctgaagttaaggaagaaagcgctgttcttaccgagagtttgccgggcagaaatatcaaagcgatgctttttattataaaaccaggacgtgtaatagtgttggggagcgcttgcctgccagctttcgtcttcgtcagagggccagtaatcattttcgtacaggccattgtgccagcgtcgacgctcgttaaccgcatcgctgaggctataataacctgcggttgagtaacggtagcccgcgatttgaaagtcggtcttgctcgacaaaaaggatttagcatacagaaaacgcacgctccctccctgcttgcgctggccattcgccagcgtcgttcccgccagcgtatagtcggctgagagggcgccaatctcccccagattgctaccgacgccaaaggcgccggcgcgatagttctccgctgcaagggcgccaccgtacagtgtgaaggtattattcaggccataagagagcgagctttgcatcagggcgggggcatagccgtcagcgccgtcatgatacttacccgccgacagctgataattccattggcctgcccgcaccagctgtggcagggtggtgtaggcgacagtaaaggtcgtctggctaccgtcggcttcaatgacggttacgtagaaatcaccgctgcggttaacggcgctgatatcatttagctcaaagggaccggctgggacgttctcgctgtaaatcagatagttgttctgccgaacttccacccgggcattgctgttggccacaccgcgaatgaccggcgcgaagccggtctggctgctggggcgcatttcggcatcggtgccaagctgtacgccgcgaaactggacgctatcgaagacgctgttgtcggtactggtctggccgacgacaagccggctgcgccagggaatgatgttcgtttccgcccaactggcgatgctttgccacttatccgcctggccgctgaacttattccagtaggcattattgcgcaatcgccacgatgcaatattgatcccgctgtttagcgaaagatattgatactggtggctgcccccgtcgccattattggcatcggtagaatagctgtagttgacgaaagcagcgttaataccttcatcaaagcgcatgggggaaacatagtcacggggatagtgctcgatatattgctgagggatatgaatgatcagctgatgattagcgatatccagctgttgctctgcctggcggatcgtctgcgacagcgcgaaacagggctggtggtcatcgtcaatcttgacgccatagcggatatattccgccgcgctcaggcagggggccaacccgccatgtgcgctatcctctgagaagcgaacggggcggctatccaccagcagatcgttaatgtaaatattaacgtcataggtgcccggcatgacgtcgccatcgctggcgacaaactgattaaaagccagcgggtcgatgccgttcacaaactgggcattatagcgttccgtgctgtctgccggtaacgtgatggagattaaccatgcgctggcaaaatagcgtaatttactatcgtccatcactctatctccctaaagaggtgcgacgtttatttttttattggaatatcaacaacggcgccgtaatcattaatatatttcattttatgcaagcgctgcatgctggcgatattgacagcgtgatgactgtacggcagcaacataaagtttttcagaggatagattttgcctttgttgtcgatcgcctcggcattaataaccgtaatatgcagtggactgttgttagtaaaagataacgtgttagcgctttgctgccactgcagattttcaacggctttgggcagcgatgtggcaatcccttgcgggcgataaaatagttttaatcgggtgcgaatcgcgaactgcaggatattattttcctcaggcgcaggagggacctcctgaatattcacccaaaacagactttccctgtcggcaggaagaccggttcctgagtaaataaagcgcagttgtgccgattgctcggggcgtaatttgaccaggggcggcgttgccacaatgggtaagccgctgctgggggtctccggacccgtatcaagctaggtctggacgatatagtttttgctgcttcggttgttaattttcagactggccgatttatctttgcccgaataaataacccgtgaggcatcgatggtaatggccgcctgggtctgaaaagccaaagcgcctatgatcactgccagcagcgttttcatatcttaccccttatccgcgtcgtgccgtccctggccaggcattattgctgtataatggtaaaccgggcggtcgcattgccgtcgccagcttcggcgttgtctttatcccaggtgtagtaataggctttcaggttgaaggtaccggtgccatcggcattgatcgtaatactcgggtcgacgtcgggatcgaaaggtttatcgagcgtgaccggggtgttattgcggtcggttagcttaatgccgactttttctgccgtaggattacccgcatcgagagccagtatgttagtgctaggcgcatcgagggctggagcaccgtcgagcacaataaagtacgtgcccgcgtcacaatttttgacgctaatattgaccccaacttctggcccggtgccattggtatcattttttaatttagacagcggaacagagcccatcttaactacaatgacaccgttctcattgtcgcttactagcgtgcaagatgagttgacaattttaccgataaaattcagcgtaccgtccgccgcggcggcatagtgtgaggtcaagccgacgagtgccattgccaggcaaagtgatttcattttcatagccaattccttctgttgtgacccagggaagctaatagccaggcatactcattgacgctgcataagccgttagctctgttgttgtgatagccataaagcgaacttatccctcctccagggagtgcaggaaatgatacaggcctgcaatattgcggacattaagtttctggtagatgtttctccgatagtgactgatcatcatattgctaaggtcggtggcctgagcaattttcttattatttaaacctgagatgatataggggagaagagagtcctcctgtttcgtaagtttaatattgacacaactgtccagcgagctaattgattttctgaacactttaatacagcgatgatcagacgcattctgtaagtatttctgcagccgttgggtaacatctatataatcaagcacgatcgtcgaaatagagtttatgataatgttttcgactggatcggcaagaatctcacttttaacgacaaaaacgatatcgccatgaatgatcttttttttacgatagagcagtgcggctaattgttgaatgtccgggtggctatagtccacgataatggttctggctatggttagacttttatcattcacgtcagaaatattatccagaaacaatgtttgactataccgacgttgagcactcatggtcatgttaaccagagaccggatgccgttaataaaaaatttattggcggaaatgataataatcataatgtatttccttatacactgcttctgtaaccaagtattactgctggagaggaggggagtaaataagatgataagcaggatcattagaaaaatcctaatgaaagatgttgcatgaagtgtttttacttattaatcaggaggttataatttaagattcaactattaacgcataagaggaaagtaaaataaacgataataaataatatattaaacgtatggccaggaataaaatatgaatgcgctgcggggcattttactgaaagtcaaaacaaccagcaagcttacagcgagaaagaggattaattaacgttttgccccacgtcgggttgtatgtcccggtgtttaaaaataggatgaatgccctggctcgcgcggcggatactgtgactgatgcggccggtcactctggcatgaaaaacgataactttaaggatggcgaaatgagactgacgggggggctggcgctgacgctggcgataatgacctgcggcgcccaggcgcgcgagatgcaatccatcgagcacagcggtgaactgaaggtgggcgtgccgggcgattacgcgccgctggcgtttcgcaatgccgccggcgaactgcagggctatgacgtggacatggcccgcgatctcgggcgcacgctcggactcaaggtgagcttcgtctacaccagctggcccgcgctcgccgccgatctgcaggcggacaagtttgatattgcgatgggtggggttaccgagaccccggcgcgggcgcaagccttcgccctcagccatccgggggtggcgaacggaaaaatcgccttagccaactgccaggccgccccgcggctcggttcgctggaaaaaattgaccgtccggacgtgaaagtgatcgtcaaccctggcggcacaaaccagagttttgtcgatgaacacatcaagcaggcgcaaattattcgcgtgcagaacaatgtcgataacctgcaggcgctgcggcagaaaacggccgatatgatggtgaccgatctgattgaaggcgactattaccagagcaaagagcccggcgtgttctgcgttgctaacgaaacaccgttcgccggtaccgccagcaacaaggtgtatatgatgagtaaagataacccggcgctgctgaagaaagtgaatcagtggctggatagccaggacaaagaggttctcaaacggaagtggaaaattcgcggttaaccgcggcggcgcgccaccgccggcagacacgcccggcggtggctatcgtctacgattagcgctgcggcgacagcgcctgtcgcgccagaccgcgaaagtagcaggcgtagcccagggtggcggtcaggcacagcatatagccaaacgactcgctgccttcctcgaccgtattttttaccacccgggcgtagttctcttccagcacggcgtaccacaggccgtgcatgccaaacagccgcgagaagaccagaatcgccagcaggccgctaatcatcatcccgtaatacggggtgcgggtatactccgccagctgcgacagggtctgacgcagatggcgcaacggcaacagcagcgaccccgcggtggccagcagggcaaaccacacccagctgccgtgggagagtaaatcaaacaggccatccagctcacggatcagcatggcgagaaagaagccgccgatgaggatattgctatagcgcaagtgggcatatttccgcgccagcagcagatgaaccagcacgataacggccagcacgctctcctggaccacttcggtgagcgacacctccgggatgtcgttgccaaacacccgaatatccacccacaggcagagtaccgcgagggcggccgcgaccgccgcgccgaaaaagaaaagcaagcttcgtaacagagacattaacaccacaacttatgcttaaaacaaatatcataagttctgggaatacatgttcctgttcactttgtgcgactttgccgcgtttttttaacattttgcgctttttagcgcccgggaaggcggcaggggagggggctcccctgcataaaggggattcagagaatatcatccaccacgccgccatcgacgcgcagcgcggcgccggaggtggctgacgcctgcggcgagcagacgtagaccaccatattggcgacctctgccaccgaggccgcccgctggatcaccgagctcggacgatgggtcatgacaaacgctttcgccagttcctccagcgactgaccggttttcgccacttcgtctttcagcatttcggcaaagccgtcggaaatcgttggccctggcagaacgctgttaacggtcactccgctgccggcgacatatttcgccaggccgcgggccagcgagagctgcgcggtcttggtgacgccatagtggatcatgtccgccgggatattgcgcgccgattccgaggagataaacaccacccgcccccagcctttgctgaccatcgccgggagcagcccccgcgacaggcgcacgccggacatgacgttggtctgccagtagttgtcccaggtcgcgtcgtcggtggcgtagaaatcctgcgggccatagatcccggcgttattgaccagaatatcgacgccggtcacggcccgcagcagctgcgctgcgccgtcggcgtcgctgaggtcggcgatggcgggacgcgccttcgcgcccggcacctcattttgcagccgggcgatcgcggcgttcacgctctgctcgctgcgcccgttaaggatgacctctgcgccgctctccgccaggcctttggcgatggcgaagccaatacccgccgtggaggcggtgaccagcgcgacttttcccgctaaatcaatcttcatgttcatgccttctggttgtggatctcctattaagcgtagcagcggcgatatagccggggatcagtaaccggcgtgcttattgaccaggtttttcagcggcagcccgcggcgctggcgctgaatgttctccagcagctggcgggcgatcacctcggcagaggccgcagaggccatatgtggggtgatgaccacctgcggatggcgccacagcggatcgtccgccggcaatggctcctgcgggaagacgtcgagcaccgccccggcgagctggccgctctccagcgccgccagcacatcctcattgaccatatgctctccgcggccgcagttgattaacaccgccccggcggggagccggctgaacagcggcgcggcgaggataccccgggtctgcgcggtgagcggcaggaggttaatcagcccgtcaagcgacccaagaaagtggtcgagcgcctcctcgccgcgatagcaggtgacgccagccagctgcttttcactgcgcgaccagccggagacccgatagccgaggcgggccagctggtcggcgatatagccgccaatttcgccgagccccataatgccgatatggaagtcggcggcggcgcgctggggatagagcttccaggtttgggtccgctggtgggccagcgcccggtcgaaatggcgctgaaaccacaggacgctccacagggcatattcgaacatgccgtggcgaaaatcttcatcgatcacccggcacagcgggatctcgctggcgaacagcgcgggcggcagatgatcgaccccggcggacgcggcctggatcagcttcagccccggcgaacgggtcaacagctgcgggtccgggaaccagcagctggcgtactgggcgtcgcgcgccgtctggtgatggggcagaagcgccgtgacgtcgggaaactgctgcagggcggcgcagatatcgcgggcgaaatccgcgtcgttacaatccaccacgatagtgatatcagacataggcgttagtctttgtaagaggtatcgagacggtcaagacggcgcagccacgcctgccagacctgttgacgttcatgctccacgcccatcagctgctcgcaggcgtgctggctaaggtgcggggcgatggtgtggatcgggctgagggccgccagctgggcggcggccatctggatctcgcaggcgcggttcaggtagtacatgatgtaaaacgcgtcagccacggtgcggcccaccgacagcaggccgtggctctgcaggatcatagcgatattattccccagcgagcgctggatgcgcgcccgttcgtcgaggtcaaaggccaccccttcatagggatggtagccgacgcgctggtaaaactcggtgctgatctggttgagctgcagcaggccatcctcgcaggcggccaccgccatccccggcagcgtatgggtgtggatcacgcagtgggcgtcttcccgggccatatgcaccgcgctatggatggtaaagcccgccgagttagccggcgcgtcgcccgctacgaccttgccctgcatatccactacgatcaggttgctggcggtgacttcgtcaaacatcatgccgaagggattaattaaaaaacgcggctcgccgtcgccgggcaggcgcacggagaagtgagtgtagagggtatcctcccagccgaacagcgccgccagccggtaggcggcggccagctgctggcgcaggtgttgctcagttgccatttagcgtactcccataaattcacggattcgttgcagagaaggcgcctccagcgggctgcggatcacctgcggggcgatatcggcctgcaccacgccgttctccatcagcaccacgcggtcggaaatcgacagggcgaagtccatctcgtgagtgacaatcaacatggtcatgccttcgcgggccagcgactgaatgaccttcagcacttcgcctaccagctcgggatccagcgccgaggtcggttcgtcaaacagcataatgtccggcttcagcgccagcgcccgggcgatcgccacgcgctgctgctggccgccggagagctgtccggggtacttgtgggcatgggccagcaggccgacgcggtcgagcagcgccagggcctgctcgcgggcgaccggctggtccagcagctggtgatagcgcggggccagcatcacgttgtcgagcaccgtgcggtgggggaacaggttgaagctctggaagaccatgccgatgcgccgtaccccggcgcgcatctggcgtttgtcgacgatggctccgcccttaagatagtcctcgccgtagagaatgatctccccgccatcaaggctttcgagggcgttgatggtgcggatcagggtggttttgccggagccggacgggccgatgatgctgatcacctccccgttctccacctgcagatcgatgcctttcagcacctcatgctgcccccaggatttgcgaatgccccgcagatcgagcgctggcggcgcgccgttgacggccggcgttttgatctcttccgtcagcgccggcaggctctggcgcagcgcctggcattccgcctcgctgagggtttgcggacgcttacgctgaatatcgagacgattttccagcgcccggaacagccaggtgaagacggtaaccaccatcacgtagtacaccgctaccgccagcagggtctccatcacaaggaaattctgcgcatacaagcgctggccggtgagcagcagctcgggtaaggagaccaccgacagaatcgagctcagcttaatgatggtgatgtattcattgatcagcgtcggcagcgagatgcgaaacgcctgagggatcacaatcagccgctggatgccgataaagctgaagctcagcgcatggcctgcctcgctctgccccttggccaccgacagcagcccgccgcggtggatctccgccatataggccgcctcggtgacggtcatcgacaccagcccggcgataaacggcaccccgagcagcggctgggtcaccggaaacagccgcggcaggttgtagacaaacaccagcagcaccatcagcggcacgctgcgaaaaaaccagatatagagttcgacggggatcttgacccagcgcggcgccgagagcttcgcgcaggctaacagaaaaccgactaccaggccgataccccaggacaaggtgctgattacgatgacggtcacgcacgcctgccagaatgccccaatgctaaacaatgaaaaaaagtatccccaatcgaacgccatactgactcctgttgcgcagtgcttattgtcttaatcgatgctttctaagttgtattttttgatcaacgcggcatattggccgttggccttcagcgtggccagggtggccttgatcgcctccgccagctcggtgttgcctttggcgacgtagatccccagcggcagcgggtagaccaggcgcgtagagcttatcgccaggcggccgcggctcttgtcgacaatgatctgcgccgccggggcaatctcaagctgggcgccgatgttcttcgacagcagcgcctgggaggcttccggcgccgtcgggaactcctgaatggtgatggccggtttgccgtttttcaggcaccactcatcggagtgttttttcaggctggtcacccaggtggtgcccgcctgcagaccgaccttcacgccgcacagctcatcttcggttttcggcggcaccgcgccgcccttcagggcgatgatcgacgcgccggagagggcgtaagggatggcgtcggcctgcttctggcgctccggcgtcacgtacatcccggagatcaccgcgtcatatttcttgccgatgccgaggatcaggctggtgaacttggtgtcgatcagctgcggtttggcctgcagatgttgggcgatcagcgcggcaaactccgggtcgagaccgacgatgttgttattgctgtcataggactcaaacggcgggtaggtgacctccatccccaccttaaagacgccctcggtcagcagttccgccgcctgggtgacaggggagaaacaggcgctgacggcgagggtaagcgcgacacggcgcgagatttttttcagggtgctagtcatcatggatcctcacgggtggttagggttttttttgctgagcctgttttttcaaatggccaaacgtattggtgccgcgcgcgcgctccggtagctgaagttcaccgcgattgaccttctcgcgcaggtagcgataggtttgcagggcctggctccacatatgctccccgatgctgagctcctgatattcaccggcttcgccggcggcgagaaaggtcggcagcgggcggatcagcgtgtggtaatcgcaggcgaaaaacagcgggaaggagtaccgctcctgcggcactttgcgcacccggtgggctgtagcaacaaatgtgccagcgctgagcacttccagcatgtcgccgatattgatcacgaacgcctcttctccggcggcgtttttgacgggaggtgcatcgatccacacgctttcttcattgagaacttcaaggccgggctggtcggcgagcagcagggtgaagcactcatagtcggtgtgtgcaccaattccgggaacatcttcgacgctggcgtcgaacgggtaatggatcagccgcagcttagccggcgggcaggtcaccatcggtttgaaatacccttccggcaggccgagcgcgagggcgaaagcgtcgaacagacggtggccgagggcgaaaaccgcgtcgtagtaggccagcacccgcgcgcggaaatccggcagatcgggccactcgttggcgccgatcagcggcgtaccggcgagcaccagcggatggtcatccgctgcctggaagccgatatcgaaagcctctttatggtccggcttgccggagccgtagatctcttctccttccggaacgtagcccttatggcttttggagtggccgatgtaatagttcatcttctcctccatcggcagggcgaagatctgcttcgccgcctcgcggacgccggcgatcagcgccgggtcgatgccgtggccggtgatgtagaaaaagcccacctcgcgcgccgcgcggccgatggcgtcggccaccgcctgacgcctggcgaggtcatcgccggccagatcgcggatatcgatggtcgggagttcagtaaaagcgtgcttcacggcgatcatggctgcggttcctgttcagtgagcgataaaaactgctgaaagtgggcctgctggcgcgtggccatccaggcgttgagcgaccagagatcggccaccggaacgttggtgaacggcagatggtgcagatagccgtcggcgccaaactccggggtcagcgtggtctgcgggtagccgcgctggcgctgcgaacgccagatttgctgccagaagcgctcggcaaaagccagcgccggctgatactcaggcgccgccgggtgcggcacctgcggcccctggtcgtagcccacccgagcctgcacgtgatgcacgcggtcgataaaggcgctgaagtcatcgctggggtcatccagcaggcgctcgctgaccaccacccagtggctgatgtcggcggtaaagcgcagctgggggagctgctgaatgatctccagggtgagccacgggctgtacagcgaggtggcgcgatgggtttcaaagctgcaggtcaaaccaaacccggcggccagctcgtgcgccttgccgagaaaatcgacttgctgcgccagcggccagcgatcgttgcccgcgagcagattgacaaagcgcgggttgaggccgctggcctcggcgaaacgggtctgcaggcgcgccagatgctgctcgggcgtttcatgctgggcggggagcaccccgccgccgctgaaaagaatggcgatatactccagccccgacgcctgcaggcggtcggcgagctgccgccgctcggctaccgttaacggcacgcgggcttcgataccgcagcagccgacgcgctgcagttcatccagcgtttgcggccagggggtcgtcactccccagagggtgcgaaagcatttcagctccatggcggcttcctcaggcgtacttcacgccgggcaggacgcagagcatctcgtacagcaggttggccgccagctgggaggtattaccgctcacgtcgtaggggggcgagacctcgaccagatcggcgccaatcagattcaggccgcggcagccgcggacgatctccagcgcctgaatggaggtcagaccgccaacttccggcgtcccggttcccggagcccagatgggatcgaggctgtcgatatcaaagctgagatacaccggcccgtcgcccatctgctggcggacttcggccatcagcggcgccagcgaggtatgccagcactgctccgcctgcaccaggcgaaagccctggtcaacgccccactggaagtcgccggcggcatagccctgggcgcgctggccaatctgcaccacccgtttgaggtcgagcagtccctcctcaacggcgcggcggaaggtggtgccgtgggcgattttctctccgaacatctcatcattggtgtcggtatgggcgtcgacgtggatgaggcccaccggaccatgttttttggtcagcgcccgcaggatcggcagggtaatggtgtggtccccgccgagggtcagcgggatcagcggataactattcaaaccggtgtagtaatcttcgataatttgcaccgatttgagcaggctgtaggtattgatcggcacatcgccgatatcagccaccgacagcgagtcgaacggcgcggcgccggtcgccatattgtacggacggatcatcaccgattcggcgcgaatatagcgtggtccgtagcgcgtgcccgagcgctgcgaggtgccgatatccagcggaatgccgacaaatgccgcgtcaagtccctgtaaatcttcgataaacggcaggcgcatcattgtggcgcgtccggcgaagcgtggcatctcattgccaccctgcggttggtgaaagaggttatccatgtctgctcctgaatctgacggatgaaacgtaacaggagagatagtgcgcaacccgcgctggactttacatcgtctggcgtaaatactcagttcatttattggtgaactaaatacgatgcatcacgacgccagcctcaatattcgccagctgcaggttttcgaggcggtggcccgcctggagagctacagccgggcccagcaggagctgggtatttcggtctccgccatcagcaatgccatgtcgcagctggagggacagctcggcttcaccctctgccagcgcgggcgcggcggcttttctctgaccgagaaaggtcagcagtttttacagcaggcgatccgcgtactgagcgaactcaatgagctggagcggcagtcggcgctgctcaaaggggagcacagcggcaccctgtgcatctcgacgctcgactccatcgagaccgaaacggcgctctcgctgccggtggttctgcgcagcttcagcgacaaatttccccatgtgcatatcaaactgattatccgcaccccggcggagcaactgaacggcgtgctgaacaaccatatcgacctggctatcggcagctacaactcgcaggtgcataacatcatcagcgagccgctgtaccgtgaacagcactggctctactgcagcgatctgcacccgatgttcttcagccgccagctcgataaagagcagatcagccagtgcccgctggtgacccgcagctactggaacaccagcgatctccgccgtcggggcttcagcaaagggagcgccaccgtcgagaccgtcgacgcccagctgctgctgatcctctcggggaaatatattggctatctgccggagcattacgcctggccgtggatcaaagagaaccgcctgcgggtgctgctgcccaacgagtttggctttcagtcgccgttctcggccatctgtaagcgcgggcgcagcaatgagccctacctgaaagcgttccgcgacctgctgaagaaaaacacggtggcgcggccgaagtggaattattaagcggggcgggcgcttccctgtgccggggtggtgattttcgcgcttagcgcgctgcccggcgggggagttttccctgttcaaaaaacgaacggctgccggtagcccgcccgggctgcggctgccaggcaactgcctccaggttatccacagggttaggcgccgctggtgtggacaggtcgcggggcgacagggcgcggctagcggaacaaaggatggcgtttgcgttaaataaaacggtacgaaggggaatctgtgtttgccccgcctttgcccgtgaaatcagaaaatttacttcgcaggctaaccgcagattgcttcaaaaaaattcccgtatttgttatattgttgttcattgattattcacctctgcggtgccaaaaagaacaagattcaccgcaacccaggacactgccatgttagattaccgcttcccgacagctttgcagatggttctcagcgtagcaatggcggagcagatgggtgaacgttcgacgagtgcgattctggcctacggcctggaagcgaacccgagctttatccgtaaactaatggttccgctaactcgtgacggcattatcgtctccacgcttggccgcaacggctcaattcatcttggccgtccggcggacaagatcaccctgcgtgatatctatctttcggttatcgaagataaaaaactgtgggcgtcgcgtcctgacgtcccggcccgctgcgtggtcagcgccaacgcctgctggtacttcaaatcggttgccgacgaagcagagcaggcttcgttaaacgtcctcgctcgccataccgtggccagcgcgctggaggcggtcaaaaacgccgataccagcggctgcgacccggtgccggaaatgatcgcccgctttaaaaaagcgcattaatcgttttctggtgacgaaaaaaaaccgccttcaacttgtgaaggcggtttttttgttatctgctgcaggctaggcgggcagatcctcctggaccggcttcctgcgggtcaccagttttcgcagcgtcacgtaaaacaccggcgtcaggaacagaccgaagagcgtcacgcccagcatcccggagaacaccgtgatcccggtgacgccgcggacttccgcccccgcgccgtggccgaggatcagcggaatggtcccggcgataaaggcgatggaggtcatcacgatcgggcgcagacgcaggcggcatgcctccagcgcggcttccatgatgcctttcccctggatctccagctcgcgggcaaactcgacgatcagaatggcgtttttacaggccagacccatcaggaccaccagccccacctgcacgaagacgttgttatcgcccccggtcagccagacaccaaacagcgcggagagcatcgtcatcggcacgataaggatcactgccagcggcagggtccagctttcatacagcgcggccagcacgaggaacgccagcagcaccgccaccgggaagacgatcagcgccgtgttgccctgggtggcctgctggaagctgagatccgtccactcaatattcatcccattcggcaggatctgcttcgacagctcctccagatgcgtcatcgcctgcgaagaagagaggacccgcggatcggcatcgccaatcaggtccgccgccggataaccgttgtagcggatcaccggatccggcccgtaggtggtactgatattcaccatactgccgatcggcaccatttcgccctgattattacgggtgcgcagattggcgatatcttccacgctctcgcggtatggtccgtcagcctgggccatcacgcgccaggtacgcccgaactggttaaagtcattgacataagacgagccgagataggtctgcagcgtaccgaatagctcggttagcgataccccctgcgctttcgccttatcgcgatcgacctgcacgtccagctgcggcacgttagcctggtaagtcgagatcgggaagtgcatccccggcgtctgcataatcgccccagacatcgcattcaccgcgctttgcagcgcgccatagcccagcccaccgcgatcctggatgtacagggagtagccggaaccctgacccagtcctaaaatcggcggcggcaggatggagaagccaaagccctgctggatttgcgcgattttggcgttgatctccgcgttaatttccgccgccgtgtgtttgcgctggtcgaacggtttcaggccaaaaaagaccgtcccggtattcggcgtgttggtgaactgcagcgcgttaagccccgggaaagcgaccgcatagtcgaccccttcggtattcatcccgatctcgctcattttgcggatcaccgcgtcggtgcgcgccagcgacgacccttccggcatcttcacgccgccaatgagatacagcttatcctgggtgggaataaacccgcccgggacgactttaaacatcaccccagcggcgcagagcagcagcagatacaccgcaaacaccgcgccacggcgtccgagggttttgctcaccagcccctgatagccgttcgagctgcgcaggaaaaagcggttaaacggacggaaaatccagccaaacagacgatcgatcagccgggtagggaggtctttcttcgcgccgtgcggctttaacagcagggccgccagcgccggggagagcgtcagcgagttgatggccgagatcaccgtcgagagggcgatggtcaccgcgaactgtttgtagaactggccggtgaccccggagagaaacgccatcggcacgaacaccgcacacagcaccagcgcaatggcgataatcggcccggagacctcacgcatcgcctgatgcgccgcggcaagcggcgcaagcccctcttcgatattacgctcgacgttctccaccaccacgatggcgtcgtccaccacgataccgatagccagtaccagcccgaacaggctcagggtattcagcgagaagcccagcagatagagaatgctgaaggtacccaccaccgataccggcaccgcgatcagcgggataatcgacgcgcgccaggtctgcaggaacaggatcactaccagcaccaccagcactaccgcctccagcagcgtctgcaccaccgcgcggatggagtcgcggacgaaaaccgtcgggtcgtacggcgccgcccattgcatatcttccgggaagcgggtggccagctcggccattttggcgcgtaccgcgttcgacagatcgatggcgttagcgccgggtgactggaagataccgatcccgaccgcatccttattgttgagctgggagcgcagcgcatagctaccggaacccagctcgatgcgcgccacgtcgcgcaggcggaccagcgagccatcctgcgccgttttcagaatgatattgccaaactcttcttcggtatgcagacggccctgggcgttaatggagatcaggaaatcgctctcctgcggcagcggctcggcgccaagctgtccggcagacacctggacgttttgctcctgcatcgccgtcaccacatccgaggccgtcagaccgcgggccgcgaccttattgggatccagccagacgcgcatcgcatattcaccggagccaaaaatctggatctggccgacgccgggcaggcgcgccagctcatccttcactttcagcgtggcgtagttgcgcatatacagcgagtcgtacttaccgtttggcgaaaacagatgcaccaccagggtcagcgtcggagactgcttctgggtggtgatccccagacggcgtacatcctccggcagacgcgcttccgcctgcgcgacgcggttctgcacctgaacctgcgcctgatccgggtcggtacccgggcggaaggtgacggtggtgaccagcacgccgtcggagccggcgaccgatttcatgtacatcatgttttcaacgccgttgatcgcttcctccagcggcgtcgccacggtctcggcaatcactttcgggttggcgccgggatactccgcgcgcacctggacgctcggcgggacgacatccggatattcgctcaccggcagcagcgggatagcgattaacccggggataaaaattaaaatcgacagcaccgcggcgaaaatcggcctgtcgataaaaaagcgggaaaagtccatgtcttggattctctgattagggatcagttaagggtggcgctggaggtcatggcaacggttttggcgttaaccggcatacccggcataaacactttttgtaagccgtcgacgatgacgctatccccaggattcaaccccttctgaacgatgcgtaaaccgtctgccagccgccctggggtaatgtcgcggcgctgtgctttaccatctttatcaacgatatagacgtatttacgatcctgatcggtcagtaccgctttgtcgtcgatcagcgtggctttgaactctgcgctgcccggcagacgcacgcgggcaaacagccccggtgtgaacagacgctgcgagttatccagcagcgcacgcatgcggatggtgccggtactcggcgttaactgattatcgagaaaatccactttgccctggtgggggtaaccctcctcgccaaccaggccaatctccaccgggagcgcctgattatcgctggacgcgccttgcccgcggcgggcgaggttttgatagtggaggtaggttgactcgtcgacgtcaaagtagacgtacaccgtcttctgcgagaccagggtggtgagcacgctggcggtgtcgcccgcggtgaccaggttaccgctggtgatcagcgcccggctggcgcggccgtcaataggggcggtcactttggtgaagtcgaggttaagctgcgcggcatccaccgccgcctgcgcggcgcgaatgtcggcctgcgcctgaaccgcggctgaccggcgctgctcccactcttcacgggagacggggttggtatggactaatttatcggtgcggttcgcctcgctttgcgccaggctggcctgcgttttggctcttgccaacgccgcctgcgcctgctccagcgcggcgcgataggttctgtcatctatcgtgaacagcacctggccctttttcacctcctggccgtcggtgtaattcactttatcaatgtatcccgagacgcgagggcgaagctgaacgctctccaccgcttcaatgcgaccgttaaaactatcccactgactgatcgacttcaccagcaccttagcggcgctgaccgtcggggcgggaggcgcagcattctgcgcgacgctgtcgtcgcagccgacgagcagaaaggagagcatcatcgcgccgagcgcggtcaggtgaatgtttccccaggttttttgcaggctcattatttttattccggtaaatgtagccgccgggcaagacgcagcgtgagaagccgcgccacttcctttgtccgggctggcttaaggccatttgtgtcgatcatcgccacaaaactgtaacaatttcgaatacactatcgcggcgattgtaggaaggcacttaactaagtgcaagaataattgttgcactttatgtgcggtccagggggagataaaaaaccgcgatcccggcgtggatttaaatgtaacaataaaacttgcattttgtgtaaaaacaggccacctttaaatgcaactgacaaagatgcttttaaccggccgcgagggggtaacatgatgaacactggcgccatcattcaggatctgatcgactggatcgacaaccatcttgatagccgtctggatattgacaccgttgcccgacgagccggctattcgaagtggcacctgcagcggatcttcaaagaacataccgggcatcccctcggagaatatattcgggcgaaaaagctgcaaaagtcgatcgaacgcttggcccacagcaacgagccgatcctgaacgtggcgattgccctcggctttgactcccagcagtccttcaaccgcagcttcaagcgccagtacggccaggcgcccggcgtctggcgccggagtatcagccgctctgttgcgcagacatctcgtcagcgatccgcatgaccggggagggtcagtcctggcccggcccatgatcgaatttgctgcctttgccgatggcatagaactgcccgcctgcgacatagtgaacggtccgtagctcgtccggcgcatcatcaaaaatccagtgtccgttgcggaatacccggtcatcgctccaggcggcgacgatatcgcccataaacagattgtgttgctgctgaatgtccgggtagggcatcactttgcacaccagccagcccgcacagcctgccacaagaggaagatcaaattccggctgataaaagaaggggatggtgtcatttttatccggcgcgtcggcatagctgcgcccgccagcgtagaggacggttgccatctggctgactacggggatctgcaccacgaaatagccgctcttttccaccagctgacgagtgaaagcctgggtgccaatataggccaccacttttcgctcgcctgccagcccaacccaggcggctgacatgacattttcgacgccatcatattttgcggaaatcatggtggtggacccgacctgcaataaacgataggccttacttatttcgacaggctgaacggacatggtttttcctttgtgcatgctatttaacgtaatgattatctggatatttattgaggccatgttcattttcgggccctctttcgtaatccaccgtgcaacgatacgccaggcgattaagcgtaaaaaggtgcgtaaattgttttcattattcataatccacgaataatcatgccgtctgtcggtaagctgctcgctacaggagagaaagaaggtggatcgtattcaggctatgcagatgtttatgcgcgtcgcggaggcaggaagcttcgtgcgtgccgcggaaaccctttccctgccggcctccactgtcaccagtaccattaaaaaccttgagaaatacctgaaggtgcggctgctgaaccggaccacaaggcgggtgagccttaccccggaagggatgcagtatctggcgcagtgccgggaaattctcgccctcatcgaacatagtgaatccaccctgagcgagtctgtcgcgcggcctcaggggcgcctgcgggttgatatgcccgcgggcatcgcgcatttcatcgtcatgccgcatctgccggacttttaccggcgctatcccgatatctacctgatgatcggcgtcagcgatcgccaggtcgatctcattcaggaaggcgtcgactgcgtgatacgaacgggagagctgaacaactccagcctggtggcccgccctctgggccgctttcgctgggtcacctgcgcgtcaccggactatcttcgggaatatggcgtgccgccgtcaccggaggcgctctctcagcaccgggctgtgcattatttctccggtcaggcgaggcgggccgatgagttccgcttcgttcgccatggcgagaccttttctgtacccgtcagcggcaacgccgcggtgaatgaaacggggctctatataaaaatgtgcctggcaggatttgggctggcgcagctggcggagaatatcgttgctgaccacctgcaggaggggagactggtggaagtgctgacggactggcagccgcccccgctacccgtcacattgctctatccgcaccagcgctttctctctcccgccgtgcgggcgtttgctgagtggatgagcgaggtggtttgaggggagtattgcttgcatttagcgcttcgcgatggagggtagggttccagcagaaatatctggtctgctgatgaatcgctcgatattctgtaatgctttgtcttttttgtgaacaggaaaaagtatgcttaatacgctacccgatttacacagaagttttgcagagcaactgaagcttaaattacagtctgattcgcggatccactcccttctcgccggcggctcgtttatccatggcgggtttgatcaatactccgatctggatttcgtggtggtgatcgaccctctccccatccatataaaccagttcttggtttatttgctcgagacgggaatagacagcaaaggtaagggcgtacataggacacaaccgttttttaatgtgcctgttgcattgctgcacaggtaatttatcgtggtgatatcttgtactgtaattgcatcttcatttataccgtaaccgatttaaaggaactgtaatgaaaaagacggtggctcaaccccagttgcccaattccgttcaacctgaaaaaaatgatgaacaaaacagtaaaaagtcagcagtcggaggaagcgcggctgaaaggggattagattaccaggctcgtgttgcagctattgctatgacgtctctccttctggaacagaaagtcagctggattgaggatgttttcaatggtgtaccggttttgattgatgctgagacgggggggcccggtgatgatatttcattaaaaacgaacacgggaaaatcggtggaggttcaggtcaagcgaggcctgaagcgtggcagtgatttatgggatgcactttgcgcgctggcaacaggcattaacgacaagagcattgcttgtggaattttggttgtttgccccaacagcagtacgaccatccgctcgaatctggctgataatattgttcgtattgggaccgggagaattgatggcctccacgaaataggtgatgatttcatcaagaacgttggccttgaattcccggagttatcccgggtgtgtcgttcccttcgaattgtcacggtagatgctgtagacggaaatgatagtgctgaggtcaatgccattagcctgctggggcgtttattcaatgaaccacgtcgagcgtggtcagttctggttgaacgcgcgcgaaaactcatcagaataagaggtcgcgcaacagtaacctcgttgcttcatgacttcagaaacgttggtatcggcatcaaaatggataccacagaaagcggtattcaactaagagcagccgtttgtgattggcttgagaaaagttattctcagtttacaatcccggggcaggcaaaaccggtttcactacagaaatgttggatcccactcaaagcctctgtcattaaagatctagagcagtttcctgatgacttatccaaagcgcttaacagctatcaccaatattcagcaaagcgcaggagtgacatcaacaagtttgatgctcatacccttggcagatatgttaccaggggcattatcattggtgggccagggattggaaaatcattactgcttcgccgcatagcattaacatatgcagctgaaggccatttggtattgctggcacgactgcgtcaggttgtctcgcttatcaatcataaaggcatccgttttgaagaggcccttatcgatgtagcgcttagcagctctggattgaaatacaaatcacctgacctgcaggatgcagtcattttatgtgatggcctcgatgaatgtggggtcagccaaaacctcgttactgatgccattcacaaatttgcagttgcccatcctgacgcgagggtattactcaccagtcggcctgtaggctaccgaccaggtcagctgggaaactggaaacattatgagcttcttcctctggaggagtctcaggctgacgacgcactaatacaagtgatggaagccttacctttcgaaagcccggaggttcgacggcacactttcgatgtcgcaaaagagcaactgaaatccttgcatctcaagggtgttgcatcgagaagtccattgattttaaccatgctcgcatccttatcttccagaggtattgagccagaaagctctcgaatttctctttatcgacagttattcagattgctggaaacggcatacccctctgtacgttctgaagtgattggaccaagtgaaccagagcgaaagtggttcatctctttgttaggctggatactgtttgagcacggtactgaaccctttgaagaaacattccgacactgtgtatctgaatggcaaaaagaaatgccaggcagctatcttgcttgcagtaataaggttaaggcatgttttgatttctgggaaagcgtaggcgtcatcgagcgcatacacacgcttaatcaagaagcagtaaccttcattcataaaacctttgcagagtatagcgccgctgtctttatcgaacagcaaccgcaaaacctaaaacgaaacttgctcattaacgtgattcaaagagatgccagtagcgaactgctctcttttgcaagccaccttgggctgatagaagacattctggatgcttggcgcgaattaatgctccagggaaaaacgacatcaacgaaagagctggtaaaggttctggacttgattattgaagcaggaaggcctgttacggatgactcattatgcatctttgccgactgctgctggaatgccttatcgtcatcctcaagcatgtattcggcaggagacgccctttgccaggtgtcaacgtatagctgggatgttgtaagggaaaaggtgagagcgaaccttcattctcatgatggctggctttggctggtttcctgggcatgtattctctctggtagcccctcagaggttagctaccaggatgcaataattgcattgaatagtattaagtcaaagtggccaaagcagctaagggaaaaacattctctgtttgatttcataggcgggaggaaagtgcaggattgtatcattcttggcgctgcaaaaattatcctccaaaaccctgaggaggtcgggcttagtacacttgacgccatcgtagataaaggacgaggggtgtccgccagctgttttgttgggttaatggaatgctatgcaaaagcaggtattgagttaccggatgaagtcactcgctatccgggaagagagaaagatttttatagcgtttacgctgaaattgatgtgaattgcatcggtctcctctctgtgctggctggaaacgataaccatcaggttttggatgagattttacctgaacacatgcttgagctcggcgcgtttttgaatataagtcgctttcatcacctcagcctggaagacctgctacatcttgaaacaacggataaagatattgatagaagcaagtttttgtaccagatagctaaagcttcaggccttgaaccagataaactcagacagcaggctgccagtttaaaaaggcagtgcgagggaaaaacgcttgtactggtttcagcctttggcaggcttcctgctgtcgatgcagacatgtctccagaaagggtcgatatcgatccagacgatttcgatgatttaatttcaacaattctgcacgccagtcagttctacagtgttttagccgccactgttctttatcagcacaaaacacatccaaaagtcatagacggaattaaacgcatccttatgcaaggagagggaacagctttgtttataggtacccggtttattacggatatgccggaccaggattggcagcaattactcctgcaacgactggaaacctctatgcctgagcagggtgcttcacacttgtttgaggcccttaccgaacctttcaattcacgacatgaaagtattgcaaaactggggttacggagtgaaatgctggatgtagcacttccggcggcctcatttgcagccaggcttccccagtctgatgaattatctcaggatattcgtctcatatatgaagactggaagctgcgggagaaaccctatccagagaatggtggtgttatcccggacagccctcgtgatgccttgtctggtattttggtcaaggataagggcgacgctaatctggcacttattcttgagatggtgcaggaaaaacgaacaaaaattcgtgggaatggtgagaaggcactcaagaatatgctcgatggatctgccgaattacagagaaacatttccaaatggatcagggatggcgtttgcaaacccacgctgttacgacagattattactgaagttaccttgcacccagaagctgttatgacgcttatacctttcctcaaagatgagtcatccggtattcgatatgctgctacagcacttcttaacacgcggttcatgacactcgagcaaatcgaattgcttgcccgcgatctttcaaatgacactgaaattgagattagagaaatcgcatctgcaacactctcttcacttatgcccggaaagggggtgatgtaagctcttccgggcaccacatcgggccccgttgtattggtgatggcatatcttgccagtccacagtatgcggggctcggaaaccggattagttcgggtcgcctgtcattctctgcacttcctctgcctcaaaggcgtcgttaagcatcttcaactgttcggattggataagaagcaaaacgtaatttggagcggcatcgtccggtttatcaagcatgacgttggttaaaacgcgagagcgatcaagcagctctcttgctgatggggattctgaagaagttaccttgacttctccaggacgtgtacggtatcaccctgacacaatggtcaattaaaacggctatatgagagcgcttcccttagtagcagaggcctcgaggcgcattttaaaagcaaggcttatcgccgcaggggaaagtactaacaggctgctttctgaatgtaagcaatgactgcttctgcaaccgtacttttgtttattgttgagtgcgggtgcagccaacctttcttttggcaatcaacggaagtaacctgtaacgcgttgtaaataattgcgaataacgcaatactgatttctctgaaaattcatgtcggacagaccgccttgttgcggaatggtctgtcaggctccatcagtaacttaatgcaaattaatgccagaaatatcactcattccccggattgctctggtgcctgaactcgatttcataacaggaaacgtaatggataatattgacgatatcataaaggacgctattcaaaaggccaccacggagcggggcaatatttcgatactgattgctggccgttctggggtagggaagagcacattaatcaacgcggtattccagcagaaaatggccgaaacgggccagggaaaaccagtgactcaaaatacgcgtgagattacgaaagagggtgtaccactcactatttttgatacccgtggtctggaaatgtctcagttcaaggagactcatgctgatcttgaaaaactgataacagaacgctcgtctgacagagattcaaatcgccatattcatgtcgcatggctttgcatacaagaagacgggcgtagggtcgagcaggcagagattgatttacacactatgctggctcgtcatatgccggtgatttgtgtggtcaccaaggcgagaagtgacaatggtttcaaaaacgaagttcagcgcttgcttcctgaatccaaaaatgtaattcgagtccgtgcgattcaggaagagatggatgatggttacgtcctaaaatcaatgggattagaaagcctgatagaactgacatcagaggttatccctgagggaaagcgtagagcgttggctgcagcgcaaagggccaatattaactataggaagacacagtcgcataaaattgtagcggcttccgcgacggccgcagccgcagcgggcgcgagtccgatccctttttctgacgctgtcatccttgcacctattcaggttggtatgattgcgggtattacatccgtatttggccttgagctatcaaagggaacccttaccacgctggtggcatcggcgatcggcgtcgggggcgcgacgtttttaggccgcaccgttgttgttaatattctgaagtttttcccgggagtcggaacggttgctggtggggcaatatcagcagccactgccagcgcaatcaccgttggtctgggggaggcttacatcaccgtgctggctgaaatttttactcaagatcctgatgcagagccaactgcaacggaaattggcgaaaagcttaaagaaaaaatgataaagatgggctcatgatcgtctaaagcgttcggtgtcaggcggcgtgctgcgctgcctgtgaacgctgagatgttttttcatcacaattttttttcgtgaaaggcacatgctgtgtcggtttatggattaaaacctagttttaagtcatgatttggaacatctttgtaagttaatctgagacacacaccatcgttgggaactctgttatggctggcgttagcaaaatacatctgacagaaacggacatcatcacaaaattcattctgcctgcaatcaaagaggcgggttgggatgtaatgacgcagatacgccaggaggtaaaactccgcgatggcaaagtggttgtacgcggcaaactggcggcacgcctgacagtgaagtcagccgatattgtgctttaccacaaaccagggttaccgcttgctgttattgaagcaaaagccaataagcatgagattggcaaagggatgcagcaagggctggattacgcgcgtttgcttgatgtgccgtttgtttttgcctccaacggtgatggctttatcttccatgataaaactaatcctgtgcagcttgaatctgagattaagctagaagatttccctggtcctgaacaactttgggataaatactgttcctggaaaggttttactaccgaacaaatgccagtcatcagccaggattactatgatgataactcaggaaagtcccctcgctactatcagttacaggcaatcaataaaacgatagaagccgtatctgccgggtaaaaacgtgtattgctggtcatggctaccggaacagggaaaacctacactgctttccagattatctggcgtttatggaaagccaaaaacaagaaacgcattctgttcctcgctgaccgcaatatcctggttgatcaaacaaaaaccaacgacttccaaccctttggcagcgcgatgacaaaaattaccgggcgcaatatcgacccggcatacgaaatccaactagcgttgtatcaggccatcaccgggccggaagaacatcagaaagcgtttaaacaagttgcgcctgatttctttgacctgattgttatcgacgaatgccaccgtggcagcgcgtcggaggatagcgcctggcgtgaaatcctcgaatacttcagcagtgccacgcagattggcctcaccgccacgccgaaagaaaccgaagaagtttccagtactgactacttcggagaaccggtctatacctattccctgaaagaaggcatcgaagatggtttcctggcaccctacaaagtggtgcgcgtggacattgacgtggatttacaaggctggcgtccgaccaaagggcaggtggataagcacggtgagctgattgaagaccgtatttataatcagaaagactttgaccgcaccatggtcattgatgagcgcaccatgctggtagcgcaaaccatcaccgactacttaaaacgcaccaacccgatggataaaactatcgttttttgtattgaagccagtgaacttctcgccatagaagaaggtattgatactgtgatgcgctggtcgctgcctgaacgtcttggctcctttgccctaactgaacaggatcacattctgctgatgggattcacgacaaggctggctttctatgatctcaacagcggattaattaccccagtggctgcttcactgggagacaccggcacccgtatgggtgatggacggtgcgaccgtgccggtaattttgtcttcgggacgatggatgacgattatcccgttaaagtcatcggtaagtttcatcgactcaatgcggcaacgctgactgctgagacgtttgcatcgcccgatgtcgctataccgaacagcatctgtttcagccccgatggtggcacgttctattactgtgactcgatgcagggtcggattatgtgctgcgattacccctcgctgcaaaaccagcgcgtgttcaccaaaatcgaagacggcggcgcgcctgatggttcctgcattgatgagcagggctatctgtggaacgcagaatggggcggcagttgggttgtccgatacagtccggtgggagaaatacacagcattctttctgctccagccctccagacaacctgcccggtgcttggtggttcgtcactccacacactttcatgtaccagtgcccgggtaggactcgcagagccaaccgcttatgacggtgcgcttttcagcattcggtcacctttttttgccggattaccagaaagccgttttgcagcgcacaaaatataacctctggcatttgatcagattcaggctgagagaaagcgtccgcttctggcactgagcggactaggtaactaagctgaaggtctgctacgagcgaaaaatagacttagggaaactggtttgtttagatcaaatcaatagagaaattttttgttctacccattgaaatgaggctgataagcacggatataaatgaaagcagctgcgctgggcatctgcctctggagaaaatagcaatggaagatttctacatttcagcaatcaaaatggacagcaacaatcagcatattgagttcgtaaaaattcatgagaacctaggtaagaagatcggacctggcactgttaattcgcgtgcattcgttggtgaactgatcagaaaagggaaagcagaattcaaaacaattacttacaacaaagaaaaaaaatcatggtctgtaggggcaaaggttgaagttatgactgatgatttcattactaccgatccaaacaagactaaacatgacaatcttggcaaccttcctacatttatctaacgtttgaagttttattaaaatcctaagccgttgcctagaacggcttttttccagattttatgccctgaatgtacgctgagtagtctcggcattttctgtgttgctatgacttctcagtatatctttactgttcgtaatatccccttgcgctgtcttgtaaagtctagttttggcacaaaccagactgtcagattcgattgcgatctatctacgattactccaggtctggtttgagccaatgcacctttgcggggaaagcaccagtccagttcaaaactcagcccacaagttttaaccccgttttcccgctttcaacaatgctcccgctatcggccttgctaacaaaatcagcccaccattgcatcattggacgtcgttgctcaagataatcgcttcgattataagctcgtcgtacctcatttttgtctatatgagccaatgctgcctcaataacatcaggcggaaacccttgctcattgagagctgtacttgcgatagaacgcaaaccatgggaaacgagaacgccccctaaaccagcacgcttgagtgctgcattcactgtttggctgttcatcggctgggttggtttgatgcgactgggaaagataaattctcggccaccactgagagacttcatcatttccagaatagcgatagctccatcaggtaatggaaccgtatggtcccgattcatcttcattcgagcagcaggaattttccattcgctagcatcaaaatcgatctcatcccatcgagcttcagcggcttcggcagggcgggtaatggtgagaagctgccacatgaacaggcatcgtgtggacaggctgatactcgccatgcgtatagtctgcattagttgtgggagttgatccgggcggatactaggcatgtttttcttctgcggtttctcgaacgctttcccgatgtttacgctgggaactgcatcaatcaagcctgtgttctgcgcataaatcatgacttcgttaatacgctgacaaaggcggcgaacagtctctaatgcacctctggcctgaaccggctgaactgctttaaccagagtatgagccttaatctcagtgacactgatatcaccgattgccgggaaaacatctctctcaagagagcgccagatatcgtcggcatagtcctctgttacgctggttttcttcacattccaccaacgctcggcaactaataagaaggtgttggttttagcttcttgagaattcctcacctgttctttctgatgctcctgaggatcaatgtcttttgctaataaaactcgagattcagctcttagtttacgcgcatcagaaagtgagacggcagggtaggctccaaagctctgcttagttcgctgctttgtcagaggtcgatagtaacggaactgccagagcttactaccgctggacttgattagcagagtaagcccatcaccatcatacagctggtaatcggcatctttaggtttggcggctttgatttccgtatcggttaaaggcttggtttttcttgccatggggagtctccatgcgtttaggcccaacgaaaacaatagagcttttcgttgggcccatcaatgggcctaaaaggtgcggatttaatgagttctcttcggacgtcgtggggcaaattgagggcacaaaaaagcccgcagggcttgcgccgtgcgggctttcaggacttcatcggatgactctggtaatcaccgatggagaattttggtggagctggcgggagttgaactcgcgtccgaaaacgatataacttgctgaaaaatattgttatgtgtattttttttcccagcgcgtgcattttaagtgcattttgttgtccgctccaagtccatgcatcaatgttaagtggccacttgaagctctggacccgtgtcgctatcaattaacggctgaccttgaaccattttttcgacagtttcgtttgaaggatatggaaccccgagttctactgtgtttgggtttgaacgatgggtttcaacaaacgaggttccgttccatttttttgaaagataaataattccttcaaaggccgctggatcctgtttctgagattctaaaatcatgtggaatccacggcgttctattccgcgtaagaagctggaaaaacactccttcagcaactcgtcatccaaatccttgaacttgattccctgcgcaagaaactcgaaataattaagaatgtacagaaggccgttaatggcatctctatactcgtcgggtaccttcatgttcttgtattcttctttatccgggttgcagcgccactcagagagttcttgtggcacataacgcataccccggtaaaattttgtgctgttccgtaactgtttttggtattcgggactggtgcgtgtgttaatgatcatgttaagggtatgtgacctgcgcgtattcgctgctgacgttatacactggatccaccaccccatcccaacgagcatacctgtaaccataatcgaaagagatgtttgataagccggagtgtatctcaggattgcatacccgatcaggactatcacataacaaacagtactgaacattggaagaaattctgcagtgtctgggtagcgctttttgataaagcagaagatagaagaaatggcagcgccagatccagcaatgacgaccagccaatcaatgattgccaggttaaaggggagttttccagggtagatataagtaaatagtgctctgacaatcaacatgagagcaaaaattgtagcgctgacgtttacaagtgttctcgccatcttattgattcctataacaaaagacctccgcaagggaggccttattgtgctaatggaggtttgtgttacaaatttaggtcgtagttaaccttcaccaaaacctacagttagtgtgtttttcatagtggtcactccagttgtaatactgcgccagtacctacgttaagctattgaaaattaaaaaaacataaaatttcttgtattagtggagcacaggataacagtttgtaccgtaactcttcaagtactatcagtatccctgtgctgtcctaatgagattttaatatcataaaaatcaatgtgttatatattgtcaagaaatatatttacattgcgtttattgctatagtctaacttgttgtttttaaatgaatttacgtttatgtaaacgcaatagtgcaactatcaattacatagatgatagctcatttcacaaaaagcaatggtagcgtcattcttaattttcttcagacgtaggcagttttactcaggttgacactacctttatagacgtctttccatcatatactgcaaggtatttaccataattgcggaacaacatttccggccctttgtggcccatctgtccggcaagccagaagaggttaacaccctggctgatatgcttggtggcgaatgtgtgccgcgtctggtaagggttacggtagcgcacgccagcttttgtcagggtcggcacccatgcctttttacggatcgcgtcggcgtttgcccagggttctcccgttttcggatcgctgaatatgaactcacttttcagaaaggtgtattgcttctgcgcctgcagggctgccagcgcctcactgttcagctcaaccttacgggtaccggcttttgtcttggtgcctttgagtacccctacgacactggccgcttgaacgtgagctgtgttccctatggtgtcgagatcaggccagcgcagcgcgcatagttcggagctccgcagaccggtattgaaggcaaagcggaacaggttttcccattccgggtacctgcagctctgataaatagcgagggtttccgctggcgtgaacgggtcaacctcgtaatcgtcggcgctcgggctgctgtcgatcacgtggtaccggctggcgctgacgaggcttaccgggttaatggtcagcaggccgtctgtcaccgcttcatctatggcgctgcgcagaaacgaaaggttattccgggtcgttttcagctttgttttcctgctggctatccagtttttaaggaccgctggcgtcaattctgacacgtgaagtttatgcagagctgacagcgccgacagacatttttcataaccgttgatagtcgacggggacaggttgcggttctggcagattttcaggtactcgtccaggtaagactttatgtttttggttttcttcactaccccgaacagctccagctttttggagttggggaaatatttcgcatattcaaaggtgccattgacgatctggttttgtatctctccgcgtaggcgctcggcgtatttcacaccgcgtgcgtttgcttccagtttggagaggggctcccggcacagaacccctttatatgtgaaagtgataaccagagtgtcaccagttttatgctggcggatggttacacctcttgggagagatagagatccttgttttgtcttgcccaatttgcaatctcctttaagtcgatccaacgttcttttgacccatcgacttttaaaacatgaaccccttcctgccacactccacgttgtaaccgtttgttaacggcatccagcgtctcgcccatctcttcgcagtactttgtaatcggcacaacatccagataaatcatcttcacctcacaccacaatcaggccacgacagtggcgccacgtctcatacatccgcttaaccacttcccggcagtagtagccgtgcccgtctcgcgtcaggtcataccggccgccgtagcgcagccggacccacatttcgaacgatttgtgcattgttatttacgcccattttttttgtcgcccagggatcgtccgtccacccttactacattggcgttaccccagacgttcggggtcctcactcttgacggtgttcgggaatagttttcctggagaagggcggttatcgtccatccgatagcatctttgcttcgggatttacgggcctgaatgcctcgcttttcataatttttcattaaaaaatcagcctcatcggaagtgagattttcatgtctaaattcactgtaaatctcttgcattacttcacctccttgcgatacccgacatcgaaaatgctcgtggccataacgatggctctttcagcggtcagcgtttcttccttcacgcaaagcaccgttgcgatctcttcgatggccttcttgcggtactcagcctgccgatcggtaatgatttcgttgcacaggtcgacgcattccgagcagatgtttacgctgggcccggcgatcagtttgtccgcggcagtaatctgtttgcagaagttgcaaaccgttttcgggtctggctcgcgctgcggcatatggcgccatttatccaggttgttatagatagccatcactttccctcctcaataatttcaacgcccgcagaaatcagcgtggccgcacatgcctcgcgcatacttccggcgccggcggcaaacccctgataccattcggcgtcagaaccgagttttggcagccccggcagcttaatctgcacggctgttttcgccggagcaccaaagcccagcttctgcctgagttcagcgatagcggcatcatgctctgcgcgggcctctggacccatagcatccaactctgcgtaacgttcagcgcggttcttaagtgctcgcagaaccaggtgagtgctaacgccttttccgaaccggaagccgggctcgagaatgaccgggcagggcagagtttcgggataatctatcggctccgcatgctcataaagcggagttacatcacgcaaaggatctgcgtgggcgacgcgctcatcgagcgttacatggcccggggctccgccgccttccagtttccatgcggtcggtttgccgtccattgcggccagcgccagcttgaacgcggccagcgtattactgtcgctaataccggcaacctcaatttcggaaatttgatgttgcagccattctctggttagtttactgctcatcgtgttgcctcccactgaagcgatttatacgcacggagcacgtgcgacgttttgccggaaatcaccgttttcagaatgaagaaaccactgttgtgcgacagaacgcccggagacataaacaaggcggcatcgacagcgcgattgtgccggcggaactcgaataccgaactggtgacggtggcggtcgcaatggcgccctgatcgttaaattcgactttcatcggatctgacctccttaactgctgcaatgtagccatcccacccgccatagctgttaaccatttcgcccaggcgtgaaaggcacgcattcatccagcggatcccacgaggagtcagcgctggcactgttccccagtcgataaattccgaattgctgcgatgcatatatttaatgaggtccagaatgttgatgtaatgcgcccagcgccgttcggtatcccatcccttatctttcaggtaggagtcaataaacccttgtagtgctggctggttaagcgagatatcgccatactggtgacggtataccgggcggcgatgcaggctgaccagatagaacaggtaggcatcgcaaacccacgttaaggcccgctggtgggcctcctcgacagaaccggctggcatccagatgtcgctattgcacacagttaacctccggctcctcgcgttggttccagttccagatcgcgccctctttactgtctggctgttgcgaagcgttacagcaaccacagttcacgaaccaggtactttcaccatcaaattcccgcaaggtttcaacgaggcttacgtgcgggtttccgcagaacgggcacggtttaagcaggccgtcacggtttattgtttcaatggccagcgggcacaggtaaggaacaactgacgcgatggtcagattttctttgccgatgtggagatctgcggctttagccgtggccagctcaatcgcttgctcaactccagaggcgtcgacctcgtatttaagcgggtaacggtcgccgtctggatagttggcaataaaagtgacttcataggttgatcccggcattatttttcctccggtgtataaatggctttgtcgtggatgaattcgccgttccaggtctttttcatcggcagctcacccttcatgtacaactggtacagacgatggcaacccttctccagcagcgtcggggtaaacttcgtgaaagcgtccttgccgtgtggggtgatctgcgtctggtcttctgtcaggtacttatcacgggcataagaggcgacacgccagcgcgggtctttctccggatcgcgttgttcgttaaacacccagtcacgctcgaaggcccaccacatcattttgttgatgttgacgccgttcagggctttgcagaatgctggaatggtcacgcctttggtgaagtgcttctcaagactttcaacggtagcgctgagtgttttgttttccagtgcggcagcttccgctcgttcctctgcctcaatcaccatcaaagccagttctttacggctgatagcgacctgggttgacggagcggggatagcgttacgctgggtaaagtaaaactccacgaggtcttcgtgatatccccacgcctgatcggtatcgacgacttttgacatgcgagccgcgccgcgttcggtccagagaatcagttggcttgtgtgtttattaaccaagtaactcatggttactaggttcttaaattcctttaattctgaaccagttaagaggaagtagtgtttaccatcctcaaaacgttccaggtttcgcgacaggttattacggatgtttacctcatccgtgccatatcccgccgccaattgttcagtggtcacgacgcgctggccgcgatactcgataatctgcagatcgcgagctgccacagttgccagttcagttttcattgccattttcgctacctctcaatgcactatcggttttactggcaatgcctcaccagcgttaagtcgcatggacaggccgacaaaaatgtcgtccagaaagtcgtcaaaccatgaatgcccatcctcctttaatatctgatcgttggcgtaatagaactggaacaccgcgagatagcgctcttcagggttgaactcaataagcgctgcttcaacgtgctcgataagtaaattttcaataaggtcccgcgttaagccgaagacattctttccggccttaaactggtattctccgttccgcagcccccaacgcttttcgcatccgatgaggtagagcagggctactgtgctgcgcatggaatggacgattgattcagcccactcatgctgttcggctaaactcagggagcctttgccgtagcggttttcatcaagcatccaggcagggatcgtgacgtcggattgctcctgtattaccttcaggcgagcaacgagctgtttcacattttctttttctttgtcgatcatttgctttctatctcccggttgtacgtggaatggctcatcactacccagttacggccgtcgtcttttgataacagccgccagcgcgggttaacctttaggctgaggtatccggtgcggcgcatgcgccgtgcataaatacgtttccggcggtaccgcagcaggacctgcaacgcctgcaggtgtactcgctcaggaatgcgtattgctgttagtgccactggctccctcctgattaggggcgatcacctgatacccagctttctttgccatccagaaaaaagtgtccatcgtcgcgataagctcgttatcgcgaactttgcgggtatcaattacctggccgttttcaatcgtcataacgacctgcactttttcgtgtgtaatggggggggtaaattagccattagttaatttctccgcttttagtgactgttcggccagcgtggcaatgagcgcattcatgaaatccacaccatcaggtgttaacttattaatgcccatgcaattcgaataatgctcagcaatcaaatgctccgcctgctcgcgtttatggttgtcataaatcatcgattcgaaaaatttgattaatgattttgttaaaatatcttcatcaagttcaacaggtaacgttgttccatcgtccatttttacgagatgaaaataactcccagtccttcgcatcattgaatcaagcttggcgcgaacgaggtgacggcgacgcgtttcaatcagatttgttttcacggcgccttgcctcttcgctaatccatgtaaagatgtcacacgatatattcattgcaaggccgattaatgcttcggtttggcatgaattcattttgctaaagcaaagatgcattaaatccagcagctcgttcaggttattggcttgagttaatacctcttcaatgcaggtatctttttccgggtcccacataattacctcccgtacgctttacgaagataaaggcccgcaatcacttcctgtccgcatgatgcataaagcagggcggttttatatgcattgtggtcgatgatgaatgtcatatttagcgaccttttctaatgttattcactgtggagtcagtcataacgcaaagttcattgagcagactggtaaagcgaccagcgacatgcttatctgttctggctatcgcagcaaagagcaatgcattgaactcatccctgagttgattggcgtacgcatctgcgtgctgtgctgtccggagtgctccacttgcttcaatgagtacagggaaatcagtactcattgttatttcaagattatcttttttacgggatgcaacattcattacgctttcctcaaaatgagtgaggcctaagcaattaagccgttttatcctttcgggtttttaagttaatttcggacggttattttttattgtttggtcataaaatagatgtggcttgtaatatcaaatctctgacatctggataaatatcgagaatattcttcgcctcatcacatgcttcttcatatgacttgaagaaatcaaccagaacaaaatgattatctacacgttcgtaaactgcgaactccatcccaccaacaaatgtcgtattgaattggtaatcaaaacctttatcgtgaggctgcacagcatggcaataagaccagtgcgaatttgctgctctgagcttggcgtggatatcaaatgcctggctagctgggtttggttgggaggttgtattcatctcattggctccgttgtttgccgatgagttaatagtaccttaagtactagtattatcaatactaatactcactaattctataaccataggtattagttcatgaaatataatggaatttagttgtaaaaaaaaccggctttcgccggcataggttgggggagggggggggaggggatctttcaaacgaagcggtattttgcctcaactacaacccctacaatcctacagttaccatttacttgcattagggggtactgtggattcaatggttttagatacttctgtccgccatcaataactagttttttgaacgtagcttcatttgcatcatctaacttagctataaccaaactgccgttcttgggctctcttcctgtatcgaccaaaatgtccattccttctgggatgcttaaccctgttggcgatgtcattgaatcaccttgaacacggagccaaaaaccgtctccttcaacattgatatccgactcaagccactcatcaatatccttaatattataaggctcacaggcttcagcccaggcaccagcacttacccagctgatcagagggtaagaaggccttttttcgtaagtgcccacaaatttgatgttctgcgccgcagcatgcataagctccagctctttagctaagtgcgggctaaactcctcgatttggacctctaaaatttttgcaaacatcaaagcggaacttacatttagcgcgtttcgcccgttcagatagtgacccactgcgctttgcgtgatgtttagctcatctgctatgtcctgctgagtgatccccagagtttttttctttgagtcatatatagccttcaggcgctctgcgtctttctgctgttcttcggtaaggcgatttttatttttcatgactgtattttattacctttagtttgaaaatgtctcctactgatagtactatagattttagtacccatgatactattaattaggctatcaatatgatgacttttaccttgaaagattatgcatcccaagttggccaggtgcgagctggcgagcgtctgggtgtgactcaaattgctataagcaaagccgtgcgctcaggtcgaaatattgtcgtgcacgtgacggatgatggaaaggttagcgcatatgagagcaaaccatttccagcgaaggccaaaaaaaacaagtctgttaagtccattcattcaaacagcggatcaggagtgtgatatgtcgcactcgatcactaccgaaaaccaagttaagccattggatatcgattatagcgatccgcgcggtgtgattgtgcatgtcaccggctggaatcgggataagcagcaggtttatttcaccagaccgggttatccgcatgaatgcatgcagccagtctggaagtttcaacagtacttcacgaggctaacatcatgagcagcaaaattcagggatatgtatgggatgcctgtgctgtctctggcatcaaaggaacacgccttatggtcatggtgcgtttggcagattattccagcgatgaaggtacgtgctatcccggcgtcaaaacaatatcacgtcagataggcgccggtgaaagcacaatccgaacggcattgtctgagcttgaagcggaggggtggctgcgacgagagaatcgccgaaacggtaaccgtaacacttcaaacatgtatcacctcaatgttgagaagttggaagaaatcgcactccagcaaagaacgctaattcgactggagcgtatcaaaaacaaccgttttgaccctccagaatctgacgcttcggattttgaacagtcagaacctgacgcgtcagaaatgagaggctcaagtgcgcttgacccgtcagaatctggcaaaagcaaccgttttgaccctccagaatctggaggacatgatccacaaggtttaaaacctgatccacaagtaaaagatcatgaaccacaagaagcggtcgcaaagcgccagaaaaaaacatcattcgaccctgcaaggctaaaacctgaaaacgtcagtgacgaagtctggcaggactgggctaagttccgacgggaaacccggaaacctctaaccgaaacaacctgcacgtaccaggctaagcaactcgctggccaccagaacgccgatgaggtgatccgtcgctctattgctggtggatggcagggtctctttcctgaacgcgtgcccaatcaaccgccagcgccagaggtcattacgaccagcgctggcaatggcgcagggaatacctggtacacacaatccaacgacggctccgcagaggtgtttatcaatcaggccgctattgaccgcctcaagcgtggagccaaccgcccatgaaaatcatcctgaaacgcatgctggttgccggttttaaccgcggctttctgcgcgaaggattcgtgacgtggtgttttataaaattcgatttacggagtatctaatgggcccggctgaactatccgaaaaactgtgggacaacgccgaaagggttgctaaatacctcctgcctcgcgggcatctggagggcaaagagtggtgcgcgggtaataccaacggagatacggggaaaagcctaaaaatcaatctgagtgggaaaaaggcctggtcagattttgccagcggtgacagcggcgatctgctcgatttatgggtgctggtgcgcaactgccagttgcatgacgccatgcgggaggctaaagaattcctgggcctgaaagatgacgatcatcacttcgaggccaagaaaaaaacattctcccggccaacgaaaaagggcgtgaaaaaagcgaaccattgctacgactatctggcctcgcgcggaattactcgcgagactgctgaccagttccgcgtttctgatgcggtggtctggtaccacgatgaaaaccgcgaagtaccggcggtggcgttcccgtacatccgcaatggcgagctgctgcaggtgaagcggatcggcatcgaacgtcctggcgggaaaaagctcattatggctgaggctgactgtgagccgagtctgtttggctggcaggctatggacgccaaagcccgcgcagttgtgctgtgcgagggtgaaatcgactgcatgacttactcgcaactgggtatctgtgcgctgtcggtgccgttcggtggcgggaagggagccaaacagcagtggatcgagtacgagtatcacaacctggaccggttcgacgaaatctggcttagcctggataacgacgatgtggggcgcgaagccgcgaaagaaatcgcgcgccgcctgggagagcatcgttgccgcatggttgagctaccgcacaaagatatcaacgaatgcctgatggccgggatgagcgaggatgatatctggaactgtctgggtacggcgaaattctttgatcctgacgaactgtgctccgccggcgatctgcttcaggaaaccattgatgcgttcgagcatcgggacgccggtctgttcaccagcccctgggcatcattgaacagcaatttcaagttccgcgccggtgagctgacgctggttaacggggtgaacggccacggtaaaacggaactggttggacatatcgccgtagaagcgatgagtcaggatgtccggacgtgcgtcgcctctctggaactgaagcctgggaaaatgctggcccgcctgacccgccagaccatctgcaccgcttcgccgaaacgcgaagaaatcgtcacgacgaatgagtggttctccgatcgcctgtgggtgttcaagcttaccggcaccgcgaaggccgaacgcctgctggaaatcttcgcctacgcccgccgccggtatgggattgacctgtttgtgatcgacaacctggcgaaatgcggactcgacgaggaagactacggcggccagaaagaatttatcgacacgctgtgcgacttcaaaaacgagcataactgccatgtccttctggtcacacacgcccgcaaaaccaacgaagcggcacctacggggaaaatggacgttaaaggcaccggcgcattaaccgacatgcccgacaacgttatggccgtatggcggaatatcccgcgtgagctggcgcagcgcaaggctgatcgcatggggtatgagagcctggacaaggacgaacaaaccgctattcagatgccagcctcaatgatacgcctgttgaaacagcgagagggcgaagggtggattggtgacattggcgccacctttgacgcccggtcacaccagtttcttgaaggcgacaaggggccgtttaactacctggtcggtaaacaacaaagtgaactcgatattgagtgggacgctgataacgttacgaggtactgagtatgaaaaacgaagttttaaaagaagcaatcgagaactatcagtgcctgaaagcacaggtcagccagcaggagtctgatgatcccttatcgttcggcggtgttgatgtggacttgttcgaagcgtttatgtttgcaaaaagccagcttcaggaattgattagccccgatgaatatctggagttaaagcggaaagtctctcatctcaacaatgaggttggtgcgttgatacttgaaaatatcattcttaaaaatgaggtagccaagttaggcggcgatcctgattttttgggtaacgtggccgctgaggggaaagcatgaaactggaagcttccctcaaacactttagccctcaaagcaagcacatcagtggcggtacgggagataacaacaatgcgtgatattcaactggttcttgaacgttggggggcatgggcctctaacgaaggttctcgggttgactggtctccggttggcgctggattcaaaggactcattcctcaggcgggaaaatcccgcccgtcctgctgtgataacgacggcatcattgttgataccgcagtgggtatgttgggtaagaccgggcgccatgatgagcttaagcttattatgctccactacatgtatgacgtttcgaaatccacaatttcccgctgggagaaatgctctgagggtaaaatcaggcagaaactgatgattgcagaaacatttattgacgcctgcatcatcatgtcaggagcgacactagaaatggacgactggacgcagcgaaatagagttgtaaaagttgcataaaaagcttttcgttacgaattttacctattattgtgttaagagtggtcacttcgacacacagcttaatcatcgaaaccctgccaactggcggggtttttgcttttctggggggagctatgcagcagccatatttttttaacccgggcatgaccactcaacagcttgaagactggcttgggcagcagaaaacacatcttgcccactttaaccgtctggtggcagaaaaagccgctcttgaagaacggctaaaagagatcgacatgtctattgagttgctttcatcatcaggtttcgtaggaacgttgagttttccctatagttccagtcctcttctggaaagtcctcaaacagaaaagcagctaaaggcagattgaaggagcttaaggcctcctgagcatcttcgcttatgttctcaatccttagctcatcctggataacaaaaagagcatcttccagcttcagttccctgatttctgacggctgccattttgttttcataaagatgaggtgatgcaacgcagcttttccctcaagcggattgaaaatggtggcatatttttgtctgtgttgatggagaatcatttcgaggacataaatcagcgctgctctgtttctgatctgattgtcctgcatgctgcccggataatacgcggagtgagacatgctcctgttttcacacacgcgcgatttgatcacatgcaataggttgtggtagtcagacacgttaatctccttgtttgtatggttattggcaaattaacaatatcaaacagggaaataagccgccactcagcggcaactattcacaggctgcgcactcgcgtggccttttttcatttcaggctcacgggaaccatcttcgatacggctcgttgttaaatcagcccgatgggcctgacccttttcaaacacacagcaccccgttaacccggaggtgaacctatggcaaagcatatgcaagacaaagaaagcatggccggaattacctggctggctctgctgatcattgcttgctggggtggacttgttcgctacctgatagatgtgaagcagagcaaggcaacatggagcttgatcaatgctcttgcccaaatggtggtttcagggtttaccggcgttattgctggcctggtgagcattgaaagcggactgagcatttacatgatactggccacttccggaattagcggggcaatgggttctgttgctttgacctatttctgggagcgcattaccggagtcaaggcgccatgacagcagaccagattatcgaggggatcctcggcaaagagggtggttatgtcgatcacccctctgataaaggcgggccaacccgctggggcatcacgcaaaccaccgcccgtgcacatggctacaccggtgatatgcgaaacctgccaagggaaacagcaaagcaaatcctgctgagcgattactggaccggcccccggttcgaccaggtagcgagtttgtctacgttactggcggatgagctttgcgacactggcgtgaacatggggcccagcgtcgccagtaagtttttccagcgctggctcactgctctgaacatgcgcgggaagctataccccgatctgatcccggatggcgccattggcccccgaaccatcaccgcgcttaagggatacctttcagcccgcgggaaagagggtgaacaggttctgttgcgtgcgctgaactgcagccagggtgccagatacctcgaactggcggagggccgcgaagccaacgaggattttctctacggctgggttaaggagcgtgtcatgtgaagatgattattttcgctttgcttgtgctggtggctgtgctcgttctgttacttcttcgcaaatatacccggctggagttcgtagggcatgccagcttgctgctgaaaacgtggtctgtaaagctgggagctatcggcgcgctggttggtgtatgggcgcagtcgttcccggatgctgcgctgcacgcctgggcgatgctgccgccggatatcaaaaatatcctgccgccaaacatcgttgcactgattagcccggcgctggtggtgctggccgtgctatcgcaatacgtgcgccagccagcattgaaagagaaggccgacgaactgaaggatccgcagcaatgagctttgaaattattgctgggctggtggttgtcatcctgggtgctatcgctggtgcgttcggcattggtcattcacgcgggaccagtaaggcagaagccaaagccgatcagcagcgtaccgaagagaacgccgccgccaccgtcgccgcggcagaacgtaaggcggaagttgtgaaagaggcaagcgatgtacaggaagacgttaagcgtatgggcgatgacgatgttgatcgcgagctgcgcgaaagatttacccgccccggtagtcgttgatacggcctgcagctgggtgagggtcatctacctgaccgaccacgatatcgacgtgctggataagcagaccaagcgtgacatcctggcgcaaaacaaatcagtgcaggctaactgcccgcaactaaccggcagggttacgcgatgaccaaggcaaagaatattgaatttcgactgagcaaacttgagaaagggccagacgagaacgttctggccatcatggagataaggtcgagagctattgcaggtagcttgctgaagcagatttcctgccaggcgttgaaagatcgataatgtcagtgaagattgccttgtaggctttatttaacttctcaactgttttcggggtgatatcactcgtaggcggcgcgtcgataccatccattaattctatttcagcaaattttttcaaaacctgaaggacactctctttttgttcttcaggcatcgtttgcacaataaaagcaacaacgtttctcagcgccaggagttgagcatgagttacatagtaatgatcgatcatattttcattcctgttctgttgagctcggcgatttaacagtatagcggagaaatattgcccgctactctgtggcaactttcaatcgtgatgactggcaatagcgggactttttatgcccggaacggagtatctatgaaagaacgaaaactcgtaattgaaattgatgacaacgccattgattcagtcatcgaaaaggtgcgcctgctcaaggatgaactgagaagccttaacctgccgatcaacatctctgttgcagtgccggcagcattaaagccggaagaggaaaggaacacgcaggatgccagaagcgtattccttagcaaccttgatgccgaaattactcaggcttggtcatcattgacagagcttttgaatatacgtcgcgacgcgacctcctccgactagctgctgccgctgtttttagttcattcacggattttgtgaatttagccctcacgttactggcgctatctgttggcaactcgctgaagaggcaggatacagcgatagataagatctcggtctcacctttgagtgactccagctcctcgacgattttctgtaaaagtttctgattatcaacggacattaaaacgctccttactttttgtgtgaaaactcaaagataagcgagcgttactttttgcaacatcctgatattcgatcagtgccgccaccgtgcggcatttttattaccagaagtaggagaagaagcatgttgacagtaaaagtgatgtcgcctggcggcggcgaagaaatccatagcggcctgagcgttggtttcaaccccaatcagcagagtatctcagtgtctggaatggaccagaacgtgttcctgaagcagggggaggtggcctatgtgatgaacgcaaacggcaagaccatttcccgttacgaacacagggcccagcagtaggcattacagaagctcctgagctaaggggcttcgataatgctaaaccgaagcatctgccttaagtgttataaaaaaccccgtggaggaaatcccaaagctacggggtgctgtacagccagccaatgactgattgtagccacgaagttggtttattttctactggttgagaataaaactgagagccaggaaggcttgagagtggctcatccataagctcacgggtagaacggcagactttgtcatggcagagcaaagtcataagttagtttaggtaacatttcggatataacaagcgtagcggggcattcctaataatggagcaccgcagctaaagcattacaggagccattcgccgagtggcttcgataatgctccccacatcgcacagaggtaagacatgtcagagatcaccgcatccgagcaaatccgcctggatatcatcaagaaagttaactacgacaccgcagcggccaagctggccattgactgggttggtgatagcaatctgaaagctgagctattcgctgactcttttgatcgtgtcttcactgaaagtgagattgtctcgaagacccgcaaggccatccaggaagcgactgaggcgctggcgctgtttgataccatcgcagaacaggcgagctaaggcattacagcaggcattcactgagtgcctgtgataatgcagggctcaattgcggtgttgttgtttcccctgttaatctgtcccaaataaaccgatggggaatagggacgtgaaaaagttactttttgcagcattaattggtgtttcagctttaacaattaccgcatgtgcgccaacagtccagaaagtagattacaaccagagatcaatgcttttatctcttggaatgaacaaaaacgacgtcatgcagatcatggggtcaccacgcaggacggatgtgaaccaggaacgtgagcgctggatatactggaataaggctctctatggctacacaatcattgataacgaacaattggctaacgatcgactggttataactttcgttaatggtaaggtcaccaaatggggccagcaaacgctgactgatgacataatggagtcatcacaaaagagcgctcaggcttatgctgaggcactcaagaaatagccatttcagtcaaacgagaacctcgcttcggcggggtttttttatatgcaaaaagaggtaataaccgatgagctttaaacatgaacttggtcaggtggtaaccgtcagtatcagtgaagaagaagggcatatcaaagctcgtgatgaatatacgcatggccccaatcagtaccttattcattatcgtgcagcagacgggcgagctgtagacgcatggtttgaagaaggggagctgtctccatctgcacagtagacgtacgcattacagaagcccctcacattgcgagggtcttgataatgcgaatgagtatcacttttgatttcaaatggtgaaattggatgtttggacgtctaaatggccatgagtggtggatatgaattattaaagtgcaaatggtaatcattatcatttaatgggtcctcccggaggggtggactaccacggggcggcggactcgcggaaaacggctagttttcatttttcatagtcatcatcatcatgtgcacaggttattgattttccagatgtcggattttcaatgatgtcgaatcgtataaaaagtgttcaccatcatggaccaggaaatcgctactttaaaactcaatatcaaccagcttgccgggattactggcgtacaccgccagaccgtcgctaccaggctaaaaaatgtcagtcccgcccagggaagcaacagcaaacttaagttgtatcttgtcaccgatattctgacagaattaatgatcccgacggtttcctcatcgaatcttgaagagatgacaccccctgatcgcctcgctcactggaaagcagaaaatgagcggttgaaatttgaagtagataccaagcaacttatccccgccgaagacgtcgcacgtgaattttcaatgatggcgaaagccgtcgtcatggtacttgaaacacttccggacattcttgagcgcgactgtgcacttacgccggttgcggtatcacgcgtgcaaagcgtgattgatgacctgcgcgatcaggttgcccaaaaagtaatggacgctgaaccagaggaggatgagccagaggaggactgatgacaaaacgggcatctgccaaggggatacgccgcgatgtctccggtattcttcgtgccccacgtcgtatgcaggtggccgatgcggtcagctcatatatgcgtgtgccgatgggggcgggtaactccgtaccatgggaccccaatctggccccttatattattgagccgatgaattgtctggcatcccgtgaatatgatgcggtggtgtttgtcggaccggcccgaaccgggaaaacgattggcctgattgatggctggattgtctacaacatcgtttgtgatcccgctgacatgctggttattcaggtctccgaagagaaagcgcgtgaacattccaagaaacgcctcgatcgcacattccggtgtagtccggaagtaaaatcgcgactcagtccgcgtcgtaacgacaataacgttcacgaccgcaccttccgggccggtaactatctcaaactgggctggccgtcagtcaacattatgtcgtcgtcagactataaaagcgtggcgttgactgactatgaccgctttcctgaagatatcgacggagaaggtgatgcattttccctgggttcgaaacgtaccactacgtttatgtccagcggcatgactctggttgagagttcacctggccgagatattcgtgacacgaaatggcgaccaaacaccgcacatgaggcaccgccgactaccggcatattatcgttgtttaatcgtggtgaccgccgccgcctttactggccgtgtccgcattgcggagaatattttcagccggaggtagccaatatgacgggctaccgggattcccttgatcccgttgtggcaagtgagtctgcatatctccagtgcccggcttgcaaaggcaggatcaccgcagatatgaaacgtgaactgaatatccgccatgtctggttacgcgatggagaaaaaatagaccgtgatggcaacagatttggggagccgcggcgatcacgcatcgcttcattctggatggaggggcctgcggctgcatatcagacatggtcgcagatgatatacaaattcctgactgctgagcaggaatatgagtccacccagagtgaagagacgctgaaaacggtagttaataccgactttggtcggccttatctaccccgagccagtctcgaacaacgtaagagtgagctgctcgaacgacgcgctgaagacgtgccgaagcgatctgtaccagatggtgtgctctttatgactgcaaccgttgatgtgcagggcggtaaatcccgtcgtttcgtggttcaggtgactggctacggtgagcagggtgagagatggctggtcgatcgctacaacatacgccagtctcttcgggcaaatgagcacggtgaatgttactccatcgatccggcaagttacccggaagactgggatttacttttgtctgacgtgttcgaaaagtcatggcccttagcgagcaacccttcaaaacgcatgcggctcatggcgatggctgtcgattccggcggtgaggatggtgtcaccgataacgcctataagttctggcgtaagtgccgccgggatgggcttggtaaaaagattttcctcttcaagggcgacagtgtccgacgctcaaaactaattacccgaacatttcctgataacactgacagatcaactcgccgggcaaaagccgctggcgatgtgccgctttaccttcttcagactgatgcgctgaaagatcaggtgaataacgccctgtggcgagaatcacccggcccgaactatgtgcatttccctaaatggctcggcagctggttttacgatgagctgacctatgaggaacgttcacccgatggaaaatggagaaaaccgggccgaggtccgaatgaagctttcgatctactcgtttatgccgatgcgctggccatattgcacggatacgaaaagatcaaatggccggatgcgcctgaatgggcgaggcgggcaacgtggattgaagaaagcacgccggaaactggcgaagcgtcacccacgttatcagcaaaaacgacccatagcagaaaaaaacggaaggcaaataagacggatgtcgaaaacaacccgtggactacatcatcaggaggctgggtgtgaaacaaaccgatattgaatccattatccagcgttataccgatgcggaaatagctgtgctggatggaaagtctataacattcaacgggcagcagatgacgctggagaacctgtctgaaatccgcaaggggcgtcaggaatgggagcgtcgtcttgcttccctgctggctcagcgtaacgggcgacccggttataagctcgcgaggtttccatgagcctgttagatgatgcgattggtgtcttttcccctggttggaaagctgcgaggttacgttcgagagcaatgatacaggcatatgaagctgttaagcctactcgtacgcataaggcccgcagggaaaatcgttccgctaaccagcttagtcagatgggagctgtttcacttcgagaacaggctcgctggttggacaataaccacgatctggttattggtgtattcgataagctcgaggaaagggtagttggagctaaaggaattattgttgagccacacccggtactaaaaaacggaaatatcgcaaaaaaactggcagaacaaatcagaacgaagtgggccgaatggtcagtcagccctgaggttacgggacagtttacccgcccgatgcttgagcggttgatgctcaggagttggctcagggacggggaaattttcgctcagatggtgagtggctcagcgcagggacttgatccagtggctggtgtacctttctggcttgaagcgctagaggctgattttgtgccgatgaccaacaatgagtcacagcaactttgtcagggggtttatgtcgataattggggacgcccgaaaaagtacctggtttataaaagtctgcctgttaccggccgtcaattggatacgaaagatattgatgccgggaatatgcttcatctcaaatttacccgtcgccttcatcaaaccagagggacgtctctcctttctggtgttctcatgcgcctcagtgcgctgaaagaatacgaggatgcggagttaacggccgcacgcatagccgccgccctggggatgtacataaaaaaaggggacgggcaaagttttacggatgagaacagcaaagataatcgtgatgtaatgattgagccaggcattatctatgatgatctccttcccggtgaagacatcgggatgatcaaatctgacagaccaaaccctaaccttgaaacattcagaaatgggcaattgcgcgccgttgctgctggtgctcgtctcagcttctccagtacagccagaaactacgatggaacgtacagcgctcagcgccaggaattggttgaatcaacagacggttatctgatcctccaggactggttcatcggagcaattacccggccaatgtaccgaaactggttaaaaatggcggtggcttctggcgaaattcagctaccacgtgggctggatatggcgtcgctttacaccgcagtttattccggtccggtcatgccgtggatcgacccagttaaagaggctaatgcatggaaagcgcaaatccgaggaggtgctgcgacagaatctgactgggtgcgagctagcggacgcaatccggatgatgtgaaacgtcgtcgcaaggctgaagttgatgataaccgcgaactgggactggtgtatgacaccgatcctgcaaatgataaaggaggcaccagtgccgaagtcaaagaaccggacgccccggcgtccgaaagccagcgcaagaagtaattcgtggtttcgtatgcaggccagcgccgacaatcaggtagaaatttatatctacgacgagatcggctactggggcgtgaccgcccggcagtttgttaacgaccttaaagcgcttggtgatgtgacccatattaatcttcatatcaattcgcctggtggcgatgtctttgacggcatcgccatttttaatgctcttaaacatcatggtgcgtcaattaccgttcatatcgacggtctggccgcgtctatggcctcggtcattgctatggtaggtaatccggtcatcatgcctgaaaacaccatgatgatgatccataagccctggggctttgctggtggtgatgccaacgatatgcgtgactacgcagagcttctggacaaggttgagtctgttctgatccctgcttatgcagagaaaacgggtaagagcgccgatgaaatagcggcgatgctggaagatgaaacatggatggacggcaaagaatgcgtcgctatgggttttgccgaccaggtcaccccctctcttcaggctatggcctgtatccagtctaaacgtattgaggacttcgaaaagatgccaaaaaatattcgcaacatgttaacgccgccgcgagctaccacgcaacgcgatccccagcaaccacaaatgcagcagccggtggtgagccaacctcccgtaattgacgaaaacaccattcgtgctcaggtaatcgctgagcaaaaggatcgcgttaatggtattaacaacctctttgcgatgtttggtggtaaacacgccgaactgcaggcgcagtgtgtagcagatatggattgctctgtcgatcaggctaaagacaaactgctggcgctgctgggtaaagatgcttcaccatcggcgaaaaccacgccagcgcatattcatgcaggtaacggtaattttgtcgccgatggtattcgccaggcattgatggcgcgtgccggatttgaagatcaggaacgtgacaatgtctacaacggcatgaccctgcgtgaatatgcccgcatggccctgactgagcggggaattggcgtatccagctataacccgatgcagatggtagggctggcgctgacgcacagcacctctgattttggcaacatccttcttgatgtcgccaacaaatcgattttgcagggctgggacgaagctgcagaaacctttgaactgtggacaaagaaaggccagttgtcggactttaagacagcgcatcgtgtggggatgggcggattcccgtctctgcggcaggttcgcgaaggcgctgaatataagtatgtgactaccggcgataaaggtgaaaccatcgcgctagccacctacggagaaattttttccatcactcgccaggcaatcatcaacgatgatctgaaccagctcacagatgtaccgatgaaaatgggccgtgccgctaaggcgactatcggtgaccttgtttacgccattctgaccaaaaacccaaaactctcagatggtaaggcgttattccacgcagaccacaagaacctgtccaccggtgctatttccgtcagcagcctggacgatgcacgtaaactgatgcgcctgcagaaagagggagaacgatctctgaacatccgcccggcatttatgctggtgccggtcgcgctggagacactggctaaccagacgattaaatcagcgagcgtaaaaggggcggatattaacgccgggattattaacccgatccagaattttgcagatgtgattgcagaggcccgccttgacgaagctgacgcaaaagcctggtatctgatggcggcaaaagggacggacaccatcgaagttgcgtatctgaatggtgttgatactccttacattgatcaacaggaagggtttaccactgacggtatcgctacaaaagttcgtatcgatgctggtgtggcgccgcttgattaccgcggcctggtgaaatccagcggccagtaatcattacagttctgaaaacgacgcccggaagggctttttttatacctgaaatcagccctgcggggctgacaggagacgttatggctaaaaattatgtgcaagacggcaaaaccatccccgtgaaaaattctggtaccgaggaaattctcagtggtacacccgtttctttaggcggaatgattgcggttgcaattaccgatattcaggcaggtgatgtaggcgacggattcgctgaaggtgtctttcttttacctaagctgccagctgatgccgtgaccgccggggaaaaggtatatctcaaagctggaaatgttcaactggatgacaccgatgcggtgttagccgggactgcctgggaggatgctgcggcaggcgttaccgtcctggaagtcaaaatcaatggctaatgcctttgacaatatggctgacagaatggatgaactgacggcgaaaaggctgggcagaacggtgactattaatggcgatgagcatattgctgttgaaagtcacctgctgcctgagctggggccggtcgctggggatgggattaacctggttatcttcagcgcaggctatcagtcggcgcggggagatgaggttatttataaaagtcaggtttacaccgttacccgatggctcctctttaatggtaagccgcaaatctggattgaggaggtcacaggtgacgattaaagggctggaagagctcaggcagaacctgagcaatatcagtaaaaatgccattcctcgggcgacatcccagtccattaaccgggtggctggaagggcaatcagccgcagctctacgcgcgtggcgaaagagactaaggttaagcgaaaactggtcatgcagcgcgccaaacttaaacgggcaagccctaaaaaaccaatggctaccatccgggtaaatcgcggcaacctcccggcgataaagctggggccagtacgagttcaactttcacggcgaaagcgcgacaacggtagttctggaagcgttctgaagattgggaatttcagcttccctggtgcttttgtgcaacagcttaataatggtcgctggcatgttcttcgacgaaccagtaaatctcgttacccggtagaagtggtgaaagtacctctggccacccccctgactgctgcattcaaagaagaacttcccaaactgatggcatctgatatgccaaaagaaatgatggctgcgatcaaaaatcagataaggctggtaacaaaatgattcacccgcaagtacgaaaagctgttctggataaactgaagtcaatcaaccccggaaaaatattctggtatgacggtcggccagctttcctggctccagaagagttacctgcggtcgctgtatatcttactgatgcaaaggcgacgggcggcagtattgatgaggaagagtgggaggctgtccttcacattgaagtattccttaaagcaactgctaccgatagcgagctggataaatggatggaaacccgcatctatccggccatggctgacgttcctgagcttgccagtatcgttgaaaccatcagcgttgccgggtacgactaccaacgtgacgatgaagccactacatggggctccgccgatctccaatattccctgacttatattatgtgaggactatatgccaactccaacacctaccacgccgacgaaaggtgccgggacaactttttggatttataccggaactggtgatccctacgatgatccgttaagtgatgtcggctggacacgaacggcaaaggttaaggaattaacaccaggggaactgaccgcagagtcctatgatgattcctatattgatgatgatgcgcctgactgggatgcaacagctcagggtgttaagtcagccggtcaaaccagcgtaacacttgcctggaaacctggtgaatctggccagaaggatctggttgactggtttatgagtggtgatgaaaaatcttacaaaattaaatatccaaatggggcagttgatgttttcaccggctgggtaaatagtttgggtaagactatttcacgaaacgaagttattacccgtagtgcacaaatcaccaataaaggtaaaccttctctggctgaagataacgcatcgactaacccttaatatattcatcagcggtgctaaggcaccgcgaaaggtaatgaaatgacttatcttaaaaaagacacattaaatcccgatggtgagaatattttactgtttgagttatcggcttacagtagaatgcaatatattgaatttatggttgaagagaggaagtcattaccgtcagaggaaagcacacctgaagaaaactttaaattggccaccttgttgactatgcgtgatcaggccatgctcgttgcattgtccttgagcgaggctgatgaagagcaacgtgaagggaaagatattttccctgaaattatacgaaaatatccaccagggttattgggcagcgctgcattacttgtgcgtatgctttcagggatgatcccaccagttaataatgacactgagaaaactgaagaagaggaagagccagatttggaaaagtcctgacccgctcacgtcgctttgctatgcgattagccagggagtttggacggccagactggcgcgcaatgctttcggaaatgtcttcctctgaatggttcgaatggattgagtattaccaggataattgttttagcgacgacctcctggactctcattttgccaatcttagttatcttgctgtcagtctctttaccgatccggataaacacggaattacctcccttgattttagtttgttatcaaaacgtgagggagaaagtgagttggattcagacgagcaacttatgtcgatagccgaaagcattcctggaggagttcgctatgtcccagccagtgggtgatctggtcgttaaaattgacggcgatagcgcaaaatttgatgaggaagttgctcatctgaataagcagctgagcgggttaggtagagccgcgaacgacagtacagcgcaggtcaccgcagctttcacgcggcaggagcgtgctgcaaaacgtgctggtatttcaatcggccaatacaataatgcaatgcgtatgttgcctgcgcaacttactgatgtcgcaactcagttagctggtgggcagagcccatggctaattttgctccagcaaggcggtcaggttaaagactcatttggtggcctgatcccaacatttcgaggattacttggagctgtaagcccgttggccgttggggttgcagctttgaccgccgcaggtgccggaattggatatatcttctatcagggaacgtcaaccctttccgattttaataagacgttgacgctatcaggcaacacggctggtctgactaccgacagaatgctggcactggcaaaatcgggacagcaagcaggactcacctttgatcaaaccactgattctctgactgcattaattaatgctggcgtgggggcgggtgcgcgttttgatgaactaagccagtcagttgcaaaattttctacggcatctggtatccccattgaaaaggttgcggaagcgttcgggaaactgaccaatgacccgacatccggcctgattgcgatggcgcaacaatttcataatgtgacagccgagcagattgattacgttgctcagttacaacgttcaggagatgaagccgctgcacttcaggcggctaatgatgcggcgacgaagggatttaacacccagactcagagcctgatcgataacatgggaacgattgagcgctctgctgattcgttgaaacgcgcgtttaaatccatgtgggatgctgctctggatttggggcggcctgacaccgcaggggagatggtaagcaaggcgcaatcagcttttaagcaggctgatgacatctggaatctcaggaaaaatgatcgctatgtaaacgatgaagccagagcccgtttctggaatgacagggagtcggcccgactggctcttgatatggcgcagcagcaagcaggtattgccaaagccagcgcagcagcggccgaaaaggaagcggaggcagaatctgaaaaacagaaatatgccgctcaagcacaagccaattatgctaaatcgcagactgcgcttgaaaagtatactgccaggcagaatgaattaaataaagctctgaaagaaggacatatcctacaggctgattacgccatcaatatggccgcagccaagaaagaatatgaggccaccttaaaaaaaacgccgaaaccaaaaggcgttaaagtttctgctggtgatcgttcttctgatcagactgatgccgaaaccctgcagttgatgacgcagttaaagttgctgcaacagcatacggggcttaacgataccatcagtcagcaacgcaaaaatttgtggtctttacagtcaaaattcgcggttatagaagaggcgtcgaaaacacgcgcgctgagtaaagaggaacaatctttactcgccagcaaggataaggttctggcgcaggctgaggttaatgcgaaacttggcgatcagatcgttgctcaggaacgtcttaataagcttcaggataactcgttaaaatatgttactcagatgcaggaaaagactgctgcactgacagatagtgctgggttaagtgacaaggacgcacaacgtaatagagagagggcgcaattaaggcagggatggaaaaatcaggggggaagcctggaagatgaagggtatcagaaagagctttccgcacttgagggttattacgctgcacaggatgaaatgcgtaataactggttggccggcgttcagtcgtcatgggaaaactatgctgacatggccaccaattacaatcagatcgctgcggatacaaccaatactgcgctcggaggagtaacaagcaatctccagcaggggttatatgatcttgcaactcagtctgaagatgctggcgatgccctgagtaacatggttgaaggttttggtaaaacagtcatccagaccctggcccagcttgctgcacaatggctggtatatcagggggtgcagctgcttgtcgggaaaacaacacaagctgcagctgcagcccctatgatcactaatgcacaggctacagcattacaggctcaactggctgcatatgcttccactgcagctattccaatcgtgggcccggctatggctcccgcagctttgactgccgctattggtgtcacagagcctctagttgctgccatctcaggattagcccttgctggcatggcgcacgacggcattgataaaattccggaaacgggcacctggctgctgaaaaaaggggagcgggttacgacggcaggcacatcagcaaaactggatgccactctggaacaggtgcggaaacagcgttcccttgccggaaacccgctgcatgttgagttcaataacacctacaccgggaaaccggacgatgcaatggtccaaatgttggatcagcggcagcgtgcatctgaaaaaaggcttaagcaatattttacttcccaggttattaatccaactgagaattatggtcgatcacttaaatcagtttatccggggaggcgtaagaaataatgaccgatatttattatcctcatgattgtatccccggccccacgtacgataattatggatttgaaccgactgatcctatgattcgaaccgatagggtgggggggcttgccaggcagcgtagaaaatatacatcagtgccgactgataatacggttgtctggcagtttaaaactgacgcgcaagcacaggcatttgaagcatggtacagggatgtattaactgatggtgttgcatggttttacatgaaatgcaaaacacctgtcggccttaaattttttaaatgccgatttgtaggtatttataaggggcctacctttattaaacccggtctttggcgttattctgcaactgttgagttaagagagcgtccacttgctccagttggctgggggaaatatcctgagtggattgtcgggagttctttactcgatatagctctgaacagggagtggcctaaacatgacagcgattaaccgcctttatgcgtcctccgggtctgaggtcatcattggtacattgcagatcgatattggcggccagacgcattatttgtgtgagggttatgaggacattacggcggttaccgaggggggcgaaaccgtaacgtttattgcctgtgccattgtcctttcccttccagccagaaacgaagatgggacgcaggacctgaagtttatgctgtgcaacatcgacggcgttgtatccacggctattcgcaaggtcattgatgccatttccactgccagcatcacattcaggaaatatatttccactgaccttaccgcgccagcggagccgccttacgtcatgccggttaaaggaggctcctggactccgcttactgtaaacgtcaccgccggatttaaaaatatgctcgattatgcctggccacgtgacagatacacgttgacgtacttccaggggctccgttactcccgataggttccttatgctcaacattgacaaatacctggctgtccgctggcagatgggcggccgcacttttcctgttctcgactgctacggcattgtacatgaggtccgccgggacctggggctgcctgaatggcccgcgtttgaggcggtgattaaagagcgtggaagctccgaaatgggggaagtctgcgagagtttttcgcgtgacctgactccctgcaagccgtgcaacggtgcggttgccgcctgctatatgggaaatatgatcggccaccttggtgttgtcgtcgaaatggagggagcgctttacgttattgaatgcaatccccggcgcaacgtaaccattcttcccctggcgcgttttgagcgtcagtttctgaaagtggagtattaccagtgacaatccgcctttacccgtcgcgtttgcctggcgaaccgctggagacgcatgaacacagggatacgaccatacatgactggatgctccagcatgtcgataactaccgtaacgatatggtgcagcgtgttgccttcgaagttaacggtaaaccggtcccaccggcagaatggccgttatgttttatcagcgctgagagcgatgtaaaagtttatccgatcccgggtgagggggtttctgcggcgactattgcggcatgggcggcagcggctattgctgcagcatcggctgtttatgtgctgatcaccatgtctaacatggataaaggcggctactcatcatcaaatgggctggggctggatttaaacccggctaaagcgaaccaggcgaagcttggcgaccccatacgtgaggtgtttggccgctgccgtatttatcccgattatgttgtgcaacccgtgacccggtttaaccctgatgatccgacgcgaatgactgtcgaaatgatggtttgccttggaaaggggaatttcgcgtttacgaatggtgatatccgtgtaggttcaacacctatttcagcattaggggactcgttcagttacaacgtttattcacctggagcagatgtttcaggagatcggcgaagtgaaaactggttcaactcgacagaggtaggtggtacttccagcgggagtgggcttgatatggcgcagacctcgccagattcgacagatatcaacgctgatagtatgaccgtttctggcgcatccgtgacgtttaacgggctggatgatggcaacgatgatgacgatgaaggcaatgcgttgcctgagtcgtgggttgagggggccattgttacgatcgtcgcaccgatgaattttctggtttcaacctcgtcgggatatagcgttctcgccagtaactctctgggtgaaattaatccctatccggggatgccggttaccctggaaatcaacggcactgaatatgaactggttattgcaacttatacggcaaaacaggacgcgataccgggagcgggtggaaacgcggccagcctgaaagcaaatgcctccccatcaacatatgattactccggtactggccagacttttacgatcacctggcagggacatgaatacaccatttccctcattgcggactatgtgaatatgtccggcctgctgatggcgataaacgagggcctgaccggatcaggattactggcgcaggatagtggcggtgttgtgctgattgctgaggcatcaagcccctggctcggcggaaacattacctcatcatcgctcccggtagccgtttttggcgacagtcctgtatttacctccggcaccgcgtccagcggaggccgtccggcaataactgctaacgttacgctggcgtatgggagtgcaaccggagtggcattttccgggataccggagggaacacaacgcctggcgctggctcaccgtggcaacgagtaccgcattgcggatgcggacggtacgaccgcaacggttcagcggctgattgagggagtggttgatccttcctggtctggcttctcaccccgcacgatgattgactatcaggctacagggatcagcgacaacaatacctggatggggccgttccttgcctgcccggaatctgaagtggtggacgctttcgaggtgaatttctcctttccgtctggcatttgcggattcgacagcaaaggcaaaaaacgcatcaggcattgtgagtgggaaatacagtaccgtgtttatggatctggctctggctggacgagcaggcagggggtttacgcgcttaaaaatatcaacgggttgggttttacagagcgttttgatctctcttctcctgggctggttgaggtgcgctgtcgccgccgcaatgagcagggtagcaataacgcgcgtgactcgatgtactggcaagcgttgcgtggtcgcttgttggctcggcctacatcctatgctggcgtcaccctgatgggggttacggttgagacggggggcaaattggcggctcagtctgaccggcgcgtaaacgttgtggccacgcgcatttatgactctggcgtagcccgtagtatctctggtgcgctttatcacgtcggccgttctcttggtatggaaatggatactgaggcaatagatgccctggagcagacttactggaccccgaacggcgagtatttcgattttgccacgggtgacagtatttctgcgctggaaatgcttcagaaaatcgctgcagccggaaagagttattttctgctaaatacccagtctgttgcatcagtgggtcgtgaaggtgttaaaccctggaccggggctatcacccctcacgagatggtatccgagatgcagaccgatttcgttacggtgactgacgatgattacgatggtgttgacgtaacctatatcaacggatcgacctgggcagaagagacggtgcaatgccgtctgcctggcaacccaacgccgctgaaaatagaggcataccgggctgatggggtaggcaatcctgatcacgcataccagattggtatgcgccgactgagaaaataccagctgcagcgtatgacgcataaaacgacgacggaactggacgcgctctgttacaacgtcggggatcgtattgtgctgaccgatgatatccctggcagcaacaccatttcgtgtttgattgagtcgatgactactgctggtggggtgaccacattcgatgtgtcggagccgctggactggacttttacaaatccacgcgtctatctgcgttatcaggatggaaaagcatcacggctgtttgaagcatcacccacaggcgacaactatcaggtatccgtcccgtatcaatctgaattcgcagatatcctgctggatgatccgataattgagcctccccggttaattttctgtagttctgagagcgacctgtatcacgccattgtgtccgagatagtgccgcaggacgatggaacctgcgagataacggcccggcaataccgtgctgaattttatgactacgacgacgccacataccccggcgacgctgcttaataccaaaaaaaccctttcaactttatctttcgctcaaaccctcgtttgcgcgaagcctctttttggagcaaaaaacatggccgaacttaacccgcctttgggaacgacgacgcctgaaatattcctggataacgtcaagcgcgctgacgagctggttaacggtccggccggaacggttaacgaccgcgcaggcgaaccgctcgatacctggcgccagatgatggctaagaatgacgaagttcgg

SEQ ID NO: 147 - DNA, 71213 bp, Unknown
  source: /note="Description of Unknown: MKP2_2161_1 Mutant Bacteria sequence"
ggtaaggcgtcagccgccacccggcaaaataaccgcgcaatagcaccgtaggccgggcaaggcgtcagccgccgcccggcataaaagcggctccgtgcccgcggcaatcgcccggcggcgctgcgctagcatgggcctgggggtagtgtaggtcgggtaagcgcagcgccacccgaaaaacaaatggcgcctcgggtaccccggataaggcgcaagccgctatccggggaagattaactgaacagggcggtgatggaggcgctggcgagggaatggaaatggacgttaaagccgaccatcgcgccgctggcctcagcatccacctcaattttctcgacgtccagggcgtggacggtgaagatatagcggtgggtttcgcccttcggcggcgccgcgccgccgtagcctgccttaccaaaatcggtgcgggtctgaacggcctcttccggcagctccgcctgaccggaaccggccccttgcggcaggacgcgggtatcggccggcaggttagcgaccacccagtgccaccagccggagccggtcggcgcatccggatcgtagcaggtcaccacaaagcttttggttcccgcgggcacatcatcccacatcagatgcggcgaaatattgtcgccatcgtagcccatgccgttgaagacgtgacgattaggcagcttaccgccgtcctggagatcgtgactgatcagtttcatgcttcatcctcattgataatgcgctgattaacaaagaagtgtagccttcccgacgacgcaattccgctatttattcgctaaaaaatgtttcgtcctgcactgcctggttgaccgcacgggtcaggcgggtcagctgctcgggcgtgatgatgtacggcggcatcagataaatcagccggccaaacggacggatccagactccctgctcgacgaaaaagcgctgcagggcggccatgttgaccgggcgacgggtttcaaccacgccaatagcgcccagcacgcggacgtccgcgaccagcgcagatccccgcgccggggccagctcggcctgcagctgggcttcaatcgccgccacctgcggctgccattcgccgctctccagcaggcgcaggctttcgctggccaccgcgcaggccagcggattgcccataaaggtggggccgtgcataaagcaaccggcttcgccattgctaatggtttcagcaaccgttcgggtagtgatggcggcggaaagggtcatggtgccgccggtcagcgctttgcccagacacagaatgtcggcggtaatcccggcgtgttcacaagcgaacagcttgccggtgcggccaaagccggtggcaatctcatcggcgatcagcagtatcccttcccggtcgcacattttacgcacccgcttcagccactccggatggtacatccgcatgccgcctgccccctggacgataggttcgaggatcaccgcggcgatttcatgacgatgcgcggccatcaggcgggcaaacggcaccatatccatctcgtcccactcgccgtcgaagcggctttgcggcgcgggggcgaaaagattatccggcaggtagccctgccacaggctgtgcatcgagttctgcggatcgcagaccgacatcgctccgaaggtatccccgtgatagccgttgcggaaggtcagaaaacgacgacgtggttcgcctttagcctgccagtactgcagcgccattttcatcgccacctctaccgccactgaaccggagtcggcgaggaaaacgcactccagcgaggccggggtcatcgccaccagctgacggcatagcgctactgccggcggatgggtgatcccgccgaacatgacgtgcgacatttggtcaatttgccccttcagcgccgcattgaggcgtgggtgattgtagccgaggatcgccgcccaccaggaagacataccgtcaaccaactgttcgccgccggcgagggacagctcgcaaccgtgggcggacaccaccgggtagaccggcaggggggaagtcatagaggtgtaggggtgccagatgtggcgccgatcgaaagcgagatcgtccagtgtcataagcgacttgtaaaccattttgaaaacatttaggtttacaagtctacactgaacttacttacaatgaaacgtacacaaaatatttcgcgcagcatcgaggcggcaagcgagaacatccccaggagcatagttcactatgtgactgggaggcgcgagtgccgccaacaaagaggctgtgtgaaataggaagtgtacgaccttttggagaggaaaatggctcaccaacctcgctggacaatgtcgcaagtaacggaattatttaataaaccgctgatcgatctgctattcgaagcacagcaaatccatcgtcaacactttgatccgcgccaggtgcaggtcagcaccctgctgtcgatcaaaaccggcgcctgcccggaagattgtaaatattgcccgcagagcgcacgctacaaaaccggcctcgaagccgagcgcctgatggaggttgagcaggtgctggaatcagcgcgccaggcgaaaaacgccggctccacccgcttctgtatgggcgcggcgtggaaaaaccccaatgaccgcgatatgccttatctggagcagatggtgaaaggggtgaaggcgctggggctggagtcctgtatgacgctcggcaccctgaccgacagtcaggcgcagcgcctggccgaagcgggcctcgattactacaaccacaaccttgatacctcgccggaattttacggcaacatcatcaccacccgcacctaccaggagcgcctggatacgctggataaagtgcgtgatgctgggatcaaagtctgctccggcggcatcgtcgggctgggagagagcgtaaaagatcgcgccggactgctgctgcaactggctaatctgccaacgccgccggaaagcgtaccgatcaacatgttggtgaaggtcaagggcacgccgctggcggataacgacgacgtcgacgctttcgatttcatccgcactatcgccatcgcgcgcatcatgatgcccacctcctacgtgcgtctctccgccggccgcgagcagatgaacgagcagacccaggcgatgtgctttatggccggggcgaactcgattttctacggctgcaagctgctgaccacgccgaacccggaagaggacaaagacctgcagctgttccgcaagctggggatcaacccgcagcagacggcggtgctggaaggcgacaatgagcagcagcagcgtctggagcaggccttactcaccccggacactgaggaatattacaacgcggcggcgctatgagctggcagcagcgaatcgatcgggcgctggatgagcggcgggcggcggaagcttttcgccgccgcctgccggtgacgcacggcgccgggcgctggctggagcgggaaggggagcgctggcttaacttctccagcaatgactatctgggcctgagtcagcatccggcgattatcgccgcctggcaacagggggccacgcgctatggcgtcggcgccggcggctcgggccacgtgagcggctatagcgaagcccaccgcgcgctggaagaggcgctcgccgactggctgggctatccgcgcgcattgctgtttatctccggctttgccgcgaatcaggcgctgatcgccgccctggtggagaaagacgatcggattgtcgccgaccgcctgagccacgcctctctgctggaggcggcgagcctcagcccggcgcagctgcggcgctttacccacaacgatccgcatcagctcgcgcaactgctggctaagccgctggcgggcgaacagttggcggtcactgaaggcattttcagcatggacggcgacagcgcgccgctggcggccattcacgccgcgacgcaggcagcaggggcagtgttgctggtggatgacgcccacggtgttggcgtggtcggcgacgaaggacgcgggagctgcgccgcgcaggcggtgcgccctgagctgctggtggttaccttcggcaaggccttcggcgtcagcggcgcggcggtgctgtgcgacgaagcaatggccgattatctgctgcagtttgcccgtcatctgatctacagcaccgcgatgccgcccgcccaggcggtggcgttgagcgctgccctggggatcattcgcagcgatgaagggcagcagcgtcgcgacatcctggccgcccgcatccgtcagttccgtgagaggatgggcgaggtgtcgctggggttgaccgactccgtcagcgcgatccagccgctgatcgtcggcgacaacgcccgggcgctgaacctggcctgccgtctacgcgacgcgggctgctgggcaacggcgatccgtccaccgacggtgccggtcggcagcgcgcgtttgcgcctgaccctgacagccgcccatcatgctgaagacattaaccgtttactggaggtgctgcatggccacagtgaataagcaggcggtggccgcggcgtttggccgggcggccagcggctatacgcaacatgatgaactgcagcggcgctgcgccgatctactgctgcgccagctggcgcgccgcgattttgcgcaggtgctggatgccggctgcggccccggcagtatgagtcgctattggcgtgaggcgggcagcgtggtgaccgcgctggatctctccgccgggatgctcgcccaggcgcagcgtaacgacgccgcgcagcattatctgctgggggatattgaggcgctgccgctgccggacgcctgcgtcgatctggcgtggagcaatctggcggtgcagtggtgcgacgatctacgggcggcaattggcgagctgtaccgggtggcgcgtcccggcggcagagtggcgtttagcacgctgctcgccgactcgctgccggagctcaatcaggcgtggcaggccatcgacgaccggccgcatgccaaccgtttccttagcgaagcggcggtgcgcgcggcgcttagcggcctgcgcgcgaccggcgaggttcatcagattagcctgccgttcgccgatgcgctgagcgctatgcgctcgctgaagggcatcggcgccacccatttgcaccaggggcggaccgccgccccgcttggccgcggcaaactgcgcgagctgcagctggcctggccgcagcggcagggcatctgcccgctgacgtattctctttttacaggagtcattgagcgtgactaaacgtttttttgtcaccgggaccgatactgaagtcggtaaaaccatcgccagcagcgccctgctgcaggcggcgaatctgctgggttttcacactgccggctataagccggtggcctccggtagcgagcttaccggcgatgggctgcgtaatgaagatgcgctggcgctgcagcgtcatagtcgggtcgcattgcgttacgaccaggtgaacccctataccttcgccgagccgacctccccgcacatcatcagcgccgacgaagggcggccgatcgccgcggccaggctctccagcgggctgcgtgagctggaaggtctcgccgactgggtgttggtggaaggcgccggcggctggtttacgccgctctcggattccctgaccttcgccgactgggcgcaggcggaacagctgccggtcattctggtggtgggcgttaagctcggctgtatcaaccacgcaatgcttaccgctcaggcggtacgccaggcgggactaccgctggcggggtggatcgccaatgacgtacagccgccgggcaagcgccacgccgaatatctggcgacgctgaaaaaccgactggccgcgccgttcctcggcgaaataccgtggcttgccgatatcgcgcagcgcgacgatctcggccagtatctggacctcagggcgctggatccggcgttatccactgcgccagcagcggctcatccagcgccataatatcgccttcggcgacgttacggccccggtgcaagacacagaagcgatccgccacccggcggataaagggcaggtgctgctcggcgagcagcaccgtcaggccgatatcgcgatttaaccgcaacagcagatccgccagcttttgcaggcagcgcggccctctgccgcgcgagggttcatcaaggatcagcagccgcggctggacgatcagcgccctggccagcgccagctggtactgatcgtcgtcgctcagcgaggcgcctttgcgctgccgtagggcatagagctcgggaaaatgctcataaatctcgccgccgctggcgttagccccgggtttcccggccgccagggcgatgtgcaggttctcttccacgctgagttgggaaaaaatgcgtttatcttgtggcacgtagccgataccaatggcgctgcgcgattgagcggacaggggggtgagatcctgcggcggggcgccaatgtcatgccaggtcatccggccgctagccaccggcaggtggccagcaatgcagttaaccagggtggtttttcccatgccctcgcgtcccagtacgccaatgcactctcccgggcgtagtacaagatcgacattccacagcgaatgctggttgccgtaaaagtgatttactgcctgtaaattcaacatggacgttttctccttatcctggcgtcagggcgacagaaagatgctgcaaaactcttgccaggaaaaagaacgctcggaaaaaagcgctaaacgccgataccatcgggcctcgtcagcgccggggctgcacttttccggtgcccgacgctaaagggtggtgcaaaaagcagcaaaaatcgagcggctttaagcggatagttatcaaaaatagttcgataaaaatttttcgccacgcggttgaccgcaaaaggcgacaggcgccgggcggcggtggtcttgggctgcggacagttatccactattcctgtggataaccttgtgtattagagttagaaaacctgcggtaagctagagcgtacgcggcttgcggctgaattggcgcgaaaggcgtcttttctttaaagatcttaaatatcagcttgttagataaaatcaatgggtgtaagaaaagcgtcatctgctgccataaaagtttcacccgtccgcttgacaaatgttaaaaggtaaaattttctggggataaccctggcggccggaggattattccgtctgacgcgcgttttgcacccagcttgccggccaataagacccttttgtggcgttatcataagtacgcactgtttaaatatccagtataatttattggcaaaaaacggtccggggggtagaattaaacaccggccgctaattcttttttcaggttctgattgatgagtaaatcgtttgtactgcattccgcctttcgcccctccggagaccaaccggaagccatccgccgcctggaagaggggctggaggatgggcttgcgcatcagacgctactgggggttaccggctccggtaaaacctttaccatcgccaacgtgattgccgacctgcagcggccgacgatggtgctggcgccaaacaaaaccctggcggctcagctctacggcgagatgaaagagtttttcccggagaatgccgtcgagtatttcgtctcctactacgattactatcagccggaagcctacgttcccagctcagataccttcattgagaaggacgcctcggttaacgaacatattgagcagatgcgtctgtcggccaccaaagcgctgctcgagcggcgcgacgtagtggtggtggcgtcagtctcggcgatctacggcctcggcgacccggacctgtatctgaaaatgatgttgcatctaacggtcggtatgctgattgaccagcgagcgatcctgcgtcgtctggccgaactgcagtatacccgcaacgatcaggccttccagcgcggcacttttcgcgtgcgcggcgaggtgatcgacgtcttcccggcggaatccgacgatatcgctctgcgcattgagctgtttgacgaagaggtcgagcgtctgtcgctgttcgacccgctcaccggccacgtcgaagggacggtgccgcgctataccatttatcccaagacccactacgtgacgccgcgggagcgcatcgtccaggcgatggaagagatcaagctggagctggcggagcggcgcaaggtgctgctggccaacaacaagctgctggaagagcagcgcttaacccagcgtacccagtttgacctcgaaatgatgaacgagctgggttactgctcgggcattgaaaactactcgcgctttctctccgggcgcgggcccggcgagccgccgccgaccctgttcgactatctgccggcggatggcctgttggtgattgacgaatcccacgtcacggtgccgcagatcggcggtatgtaccggggcgaccgggcgcgcaaagagacgctggtggaatacggtttccgcctgccgtcggcgctggataaccggccgatgaagtttgaagaatttgaagcgctggcgccgcaaaccatctatgtgtcggcgaccccgggcgcctatgagctggataaatccggcggcgaggttgtggatcaggtggtgcggccgaccggtctgcttgacccaatcatcgaagtgcgcccggtggcgacccaggtcgacgatctgctgtcagagatccgcctgcgcacggccatcaacgagcgcgtgctggtcaccactctcaccaagcggatggcggaggacttaaccgagtaccttgaggagcacggcgagcgcgtgcgctatctgcactcggatatcgacaccgtcgagcgcatggaaatcatccgcgacctgcgtcttggcgagtttgacgtgctggtggggatcaacctgctgcgtgaggggctggatatgcctgaggtgtcgttggtggcgatcctggatgcggataaagagggcttcctgcgttctgaacgctcgctgatccagaccatcggccgagcggcgcgcaacgtcaacggcaaggccatcctctacggcgataagatcaccccctccatggccaaagccattggcgagaccgagcgtcgacgggagaaacagcagcgctacaacgaagagcacggcatcgtgccgcaggggctcaataagaaagtggtggatatcctgcagctgggccagggcctggcgaaaaccaaagccaaagggcgcggtaaagcgaaggccgttgagcctgccgggcttagcgctgtggatatgacgccaaaagcgcggcagcagaaaatccacgagctggaagggcagatgatgcagcacgcgcagaacctcgagtttgaggaggcggcgcaaatacgcgaccagctgcatcagctgcgcgagctgtttatcgccgcctcctgattctgggcgcagaccggcggagtggacgtgcggggtatagtgaaggcgcgcttctcttatcgtcctgcttgccagataacaaacatttgagaagaaaaaaggccgcgttgcggccttcttaatgtttgcttaatctcgccaggcgacactatcttcaacctgatgaggatagcgcccatgcaaaaaattaacttccgtgaatatctggcggtcgccaccgccctggtcattattgttgccttcatccatcaatgggtgctgacgttctgacccccgcgctgcgggaatagcacccacgcgcggacccctggccctggctgtcggttatgcaaaaaaaactgggcgtcatgcagctgagcgatgcgcgtgacgatgctcagtccgaggccaatgccgccgtagcgactgtccatgcgcacgaaggctttactgagttcgccgcttttcgcctcatcgatccccggcccttcatcttccaccgccatcaccggcatcaggcccgctttcaccgacacacggatcgtcgacccttcagggctgtagcggtgagcattctccaccagattgcgcaggatcacgcggattaacgtcgcatcgccagagacgacggcctcgttttcgatatccgtcagcagcagccgctgctgacgctgcgccagcatagcctccagttcgtcctgcaggggttttaccacgtcatccagcaacagcacctgctggtagctgccggcggagaaggactggccgacgcgcgccagctgcagcagctgggaaatgctggtggtcatctgatcgagacgctggatcagcgggtcgacgcccatgccatgcactttcgccagcagctcaaggtgcagccgcagcccggccagcggggtgcgtagctcatgcgccacgtcggcggtaaacagccgctcgcggtcgagggtcagattgaggcgggaaaccaactgattcagggcggtggtcaccgccgtgacttcgggcaccgattcgctgagtacgataggagtgaggttgtccggcgtgcggttctccagttcgctttgcagtcgtgaaagcgggcgggtgatcttgcgcaccgccagcatgctgatatacagcgccaggccaacgatcagcaggctcggcaccagcaggctggcaaccgcttcccgtacctcatgctccacatgtttctggttgttgtgcccttcgatggcgctggccaccagcagctggatctgctctttgctctcatgccatagccagaagacgcttatcagctggcagaccaccaggatggcgccgatggtcagcagcagccggtggcgcatggtccaggtttcagttgcaaacagagccatggtctattccgtgtcgatgttgttagccagcatatagccaaagccccggacggtgcggattcgcgatttgccaatcttttcgcgtaggttgtgaatatgcacttccagggtattggtcgccggctcgttgtcccagctgtaaatgtcgttgtagaggatctcgcgatgcaccgggctaccggctttcatcatcagccgcgacagcagggcatactctttcggcgtaagatccagcgccgtttcacccagccacaccaggcggcgagtgacgttaaggcgcagatttccgacgctgatttcattatcgccctggttgttatgccggcggagcagggcgcgaatgcgcgcattgagttcctccagggcaaagggttttaccaggtagtcatccgccccggtatcgagaccgctaatgcgatcctcaagcgtatcgcgggcggtgaggatcagcaccggctgggtcattttctcccgccgcatgcgggagagaaaatgcagcccgtcttcatccggcaggccgagatccagcacgatcaggctgtaatgattgctggccagcgatagcgcggcttcgtgcgcggtggagacgccgtcgcacacgtatccttcactttgcatcgccagaattaacccctgcaacagcagcgcatcgtcttcaatgactaagattttcatcaaccagcctctctacatggcgttaagatatcatctgccgcctggtactcgcgggtgctgacgccgagcaggccgagcagggtggagaacagattatcctgcgagtaattctctttttgcgcccgctgctgtagacagtgcgcggaaatgccgtagcgctgctggtagtcggcggagagccacagcgccatcggcacatgtttctgcgtatccggcgcgatggaatacggcagaccatgcaaatagacgccatcttctcccagcgattcgccgtggtcggacaaataaaccagactagtggtaaatttatcctgtttagattgcagtagttttatcgctttatcaacgacatagtcgacataaaggatggtgttgtcataggtattggtcaactgctcccgggtacagccctggatctcattggtgtcgcaggtcggcgtgaatttgcgaaacgccgctggatagcgattgtagtacgtcggaccgtggctgccgatggtatgcagcacaataatgccatcctgttgcaggttatcgatatagctgtcgagattatggaacaggacgtcatcgtagcactcgccatcgatgcactgcccggtgagcttcaggtcggtgacgctctggtgtggtacccggtcgcaggcgcctttgcagccgccgtcattatcgttccacagcacctggatccctgcgcgctgtagaatatccaggacgccttcctgatggtgcgccagctcttcgtcataatgcgcgcgcggcatattggagaacatgcacggcacggaaactgcggttgccgtgccgcaggaagtggtatgcggaaaatagatcacgccgtcctgccgcatcagcgggttggtgtcgcgcgaatagccgcccagtgagaagttatccgctcgcgaagtctcgccgagcacgacgatcgtcaggttcttacggggagcgttatgcatcaccgctttctgcatggcatcttcgccaatcttcaccagcggcaggttgtccatccgatgatgagcataccaggagttcacggccacaatgctgttggaagggctaagggatttcaccagctctttgttgttacggaacaccgaggcgtaatctttgtagaacagcgcggccaccagaataatcagcagcgccgaaacggcgatattgagcaggcgcatcgccgcgccgcgccaccgcgtggcgggcttacggattttcacccaccaggcgacgaataccgccaaaaccccggaaaggccgaggacggcaatcatttcgccggagagtagagcaaagctttccgccggagtggtgtcgaggatattggtgatcatgctgcggtcgatcaccacgccaaagttccagatgaagtattgcgccgaggcgctgagcagaatgaacaggctaatcaccagccggtccagcttcaggaacgaggcgagagtggtgaggatattcatcacgctaatggccacgatcggcatactgaggaataccagccagttatgcaggctatttaccggcagtaacgggaaaacctggcgataaaaagccaggttgagacagataccgatatagcaagcaaagagaatcagataagtcgtgcggctgaccaccggccgacgcagaggcaataacgacataatgcacacccacagaaaaagatgagggtatagtgccagccctattttaagacaaccttaagattttaaggtgcgccgaagagggccgcctccggcgcgcaggatcagcccggcagctggatcgctttctccagcgccccgcggagcagcgcccggtcatgacgatagggaacgtcgctggcctccagcggcgtctggatcaccaaccggtcgtcgatgccgctgatatcggcttttggaccggcgatcaccgcatccaccacccgtttgcctacatagcgctccataatcgcgatgcgctccgccagcgacagcctcgcggccgggctatgctctttgccgaggttatcgataaaaaccatcggcgccggggtgcggcgcaacgcctgggccatctcgtcgagcaacaggatcggcagcaggctggtgtaaaaactgcccggcccaatgaggatcaaatcggcttcggcgatagcctccaccgcctcgcgggtggccggtaccggcggggtgagcatcagctcctgcggcacattatcaagctgatcaatattcacttcgccataaacttcatggccttcatgatcgagcgccatcaaatccaccggttgttctgacatcgggatcaggaaagcgtccactttcagcaggtttctgatcaaattgatcgcctctaatggccgcacgctcaggtgatccagcgcctttaacatcaaatttccgaggttatgtccggaaagctcgccgttaccgccaaaacgatactcaaacatcgccgacgctacgctcggctcggcaattaactgattgatgcaattgcgcatatcgccccaggcaatgccaccttccgaacgacggatccgcccggtggaacccccgttatcggtggtggtgacaatgccggtcagccgtgagccgagcgaggagagggaggacatcacccggcccaaaccatgcccgccgccgagcgctaccacccgatcgaggtcagcgaatgtacgattgcgcatagaaattccttatttcacataaacggccacacactacccgatctacccctaaaagacgatgggaggagcccgacaaactgaccgacatcaaggcaaaaaaatgatttatggctattctgtagcgaaaatgcacgaagatagcgatatgtataagattatatagcgaaatcgccaatggcgaaactgcctgtaacgcgctactatcgacataacctgttaacactctagcctcttcgcctgtgtcaaaagatatggcgatttggccgcgacgccaccagttgtcgccagggcgtggaaagaaatgaccgcgtctcccgtatttggaaaggtgtatatggcctcacagcttaccgatgcattcgcgcgtaagttttattacctgcgtctgtcgattaccgatgtgtgcaacttccgttgcacctactgcctgccgaacggttacaagcccggcgccgtcaataacaatggctttctcagcgtagacgaagtacgccgggttacgcgcgctttctctgcgctgggcaccgaaaaagttcgcctcaccggtggggaaccctccctgcgccgcgacttcaccgagatcattgccgccgtgcgtgaaaacccggcgatccgtcagattgcggtcactaccaacggttaccgcctggcgcgcgatgtcgaacgctggcgcgatgccggcctgacggcgattaacgtcagcgttgatagcctcgacgcccgccagttccatgccatcaccggccaggacaagttccaccaggtgatggacggcattgacgccgccttcgccgccggctttgacaaggtgaaggtgaataccgtgctgatgcgtgatgttaaccatcaccagctcgataccttcctcgcgtggatccaaccccgtcgtatccagctgcgctttattgagctgatggaaaccggtgaaggcagcgacctgttccgccgtcaccatctctccggcatggtgctgcgcgatgaactgctgcgccgcggctggatccatcagatccgccagcgcagcgacggcccggcgcaggtcttttgtcacccggactacgccggcgagatcggcctcatcatgccgtatgaaaaagacttctgcgccacctgcaatcggctgcgcgtctcgtccgttggcaaactgcacctgtgcctgtttggcgaaggcggcgtcgacctgcgcgacctgatggccgaagaccagcagcaggccgcgctggaggcgcggatcgccgaagccttaacccataaaaagcagacccatttcctgcatcagggcaacaccggtattacgcagaacctgtcctatattggcggttaatcgttttcgaaaggagcattcagatgagccaggctagcgctgagtttatcccgacccgtattgctattcttaccgtttccagccgtcgcggcgaagaggacgacacttccggtcactggctgcgcgaggcggcgcaggaggcggggcaccaagtcgtcgagaaggcgatcgtcaaagagaatcgctacgccatccgcgctcaggtatcggcgtggatagccagcgataacgtgcaggtggtgctgatcaccggcggcaccggttttaccgacggcgatcaggcgccggaagcgctgctgccgctgtttgatcgtgaggtcgaaggctttggcgaagtgttccgcatgctgtcgttcgaagagatcggcacctcgacgctgcagtcccgggccgtggccggcgtcgccaaccgcacgctgattttcgccatgccgggctcaaccaaagcctgccgtacggcgtgggacaacatcatcgccccgcagcttgatgcccgcacccgtccctgtaacttcattccacacctgaagaaataatctatgtcacaactgacccatattaacgccgcgggcgaagcccatatggtcgatgtctccggcaaagcggaaacggtgcgcgaagcgcgcgccgaggcttacgttgaaatgcaggcgacgaccctggcgatgattatcgacggcagccaccacaaaggcgatgtgttcgccaccgcgcgtatcgccgggatccaggcggcaaaacgtacctgggagctgatcccgctgtgtcatccgctgatgctcagcaaagtggaagtcaatctgcaggcgcagccggaacataaccgggtgcgcattgaatcgctctgccgactcaccgggaaaaccggcgtcgagatggaagcattgaccgccgcctcggttgccgcgctgaccatttacgatatgtgcaaagcggtgcagaaggatatggtgattggctcggtgcgcctgctggcgaaaagcggcggcaagtccggcgattttaaggtgggtgaatgccatgattaaggttctgttttttgcccaggtgcgcgagctggtcggtaccgattcgctgacccttgatgccagcgaactggcgactgtcgaagcggttcgtcagcagcttgccgcccgcggcgatcgctgggcgctggccctggaggagggcaagctgctggcggcggttaaccagacgctaacctctttcgaacatccagtggccagcggcgacgaagtggcgttcttcccaccggtaacggggggctgacatgacgcaaacccgtatcgtggtcagcccggcgcgctttagcgtcagtgaggaatatccctggctggcggaacgcgatgaagacggcgcggtggtcaccttcaccggtaaagtgcgtaaccacaacctcggcgacagcgtgaaggcgctgaccctcgagcactatccggggatgactgaaaaatcgctggcggaaattgtcgagctggcgcgcgagcgctggccgctgggccgggtgacggttatccatcgcatcggcgaaatgtggccgggggaagagattgtgtttgtcggcgtcaccagcgctccccgcggcagcgccttcgccgccggcgagtttattatggattacctgaaaacccgcgcgccgttctggaagcgtgaagcgacgccggatggcgaacgctgggtcgacgcccgcgacagcgatcgccaggcggcagagcgctggtagtgtgatacgcttacagggtgaaactttgtttatcaggagagagtcatggacagatatccgcgttccgattcaatagtgcagggccgtaccggcctgcagacttacatggcgcaggtgtacggctggatgacggtcggcctgctgctgacggcgtttatcgcgtggtttgcagcgaatactccggcggtgatgatgttcgtcttttcgagcaaaatcactttcttcgggctgattattgcccagctggcgctggtgtttgtgctgtcgggaatggtgcagcggctgagcgccgggatggccaccacgctgtttatgctctattcggcgctgaccggactgacgctatcgagcatttttatcgcctatacctattcatcgatcgccagcacctttgtggtcaccggcgggatgtttggggcgatgagcctgtatggttacaccacgaagcgcgatctgagcggcttcggcagcatgctgtttatggggctgattggcatcgtgctggcgtcgctggtcaacctgtggctgaagagcgaggcgctgatgtgggccgtgacctatattggggtggtgctgtttgtcggtctgacggcgtatgacacccagaagctgaaaaacatcggcgagcagattgatacccgcgacagcgccacgctgcgtaaatactcgatcctcggcgccttaacgctgtatctggacttcatcaacctgttcctgatgctgctgcgtattatgggcaaccgccgctaacctctttatatcaaggggttgcatctccgaacgcccggcaagcgcagcgccgccgggcgagatttcaggcacggtacccttgattttgccgggtggcggctgcgccttacccggcctacaggatcctctcacaggcttacgctccgtaggcccgcgcaagcgtagcgccgccgggcgatggcatcagacacggtacccttgattttgccgggtggcggctgcgccttacccggcctacaggctcctctcacaggctcacactccgcaggcccgtgcaagcgcagcgccgccgggcgagatatcaggtacggtacccgtggtattgccgggtggcggctgcgccttacccggcctacaggatcctctcacaggcttacgctccgtaggcccgcgcaagcgtagcgccgccgggcgattgcatcaggcacggtacccttgattttgccgggcggcggcaggcgccttgcccggcctacaggatcctctcacaggcttacactccgtaggcccgcgcaagcgcagcgccgccgggcgagatatcaggcacgatacccgtgatgttgccgggcggcggctggcgccttacccggcctacaggatcctctcacaggcttacaccccgcaggcccgcgcaagcgcagcgcggcctggccgtttcattcgcgggccagcttgcgctggttcttttgccgcagctttttcgcccggctctccagcagcagataggccaccgtcgccagcagtaatggcaggaaataatagagcgcgcgccaggcgagcagggcggcaatgatcgcgcccttcgaaatatcttccccggagagcatggcgataaacaccgcctccagcacgccgatcccagccggaatatggataatcaccccggcgatactgctcaccagcagcacccctaataccagaaaatagttaatctcgctgcccaacagcagccagattatcgcccccatcgccatccagttcgccgccgagagcaccatctgcagcagcgcgaagcgccaggagggcagcaccagccgctggcctttaatcgtcaggtgacggcgtttagcgaacgcgcagccgaacagatagcaaagcgtaaggatcagcatcaccccgccgataatgcgcagagtggtctggctgatgtaccagtgcggcggcagcttcaccagatctgccgtgaatatcaccccgcccagcagaatatagcccaaccagttggtggtaatgcttaaggaaaaaatacgggtgatggtgctgccgttcagccccagccgcgagtacagccggtagcgcataccgatcccgccgacccaggtgctgagtgtcaggttgaaggcgtagcagataaacgacaccagcatgacctggcgtttcgccagtttgtgcccgcaataggcccgaccgagcagatcgtagcagccgtaaatgaggtagctgacgataaccagcgcaatggcgctaaacaaggccagccgatcgtagccgcggatcaccttccacacgtcctgccagtcgactttttgcgcgtagatcaccaacaggacgatgacggcgataaaaaagagcacggtcagcactcttttcgccatccgccagcggggatgtgatttgctcatagttgattatccctggctggagactcgacgcggtcctgagtttcaatttccggctggaccggcgggctgactctggccagccgcggggtatgagccggtagccagccgacccatgccgggaagtggcgcagaaagtggaaagccatcacgctgacgcccagccgccaccagttgcgtttcggcagcatcgttttatcgatccgctggcaatcccgggcgataagcccgttgagattatcgcgcagcgtctggttaaacacccgatcgtggatgatcagattggcttccagattcagcgacaggctaagcggatccaggttgcttgacccaacggtggcccagtggtcgtctgccagagcgaccttgccatgcagcgggcgacggcgatattcgtaaatctgcaccccacccttaacgagatagtgatagagcaggtgggcgccaaacttcacaatgggaatatccggttcgccctgcacgatcagcttaacccgtactccgcgccgcgcggcattgcgcatcgcatgcagcaggcggtagccggggaaaaaataggcgttagcgataatcacttcccggcgggcgctggtcagcatcttcaggtagtggcgttcaatatcgtcgcggtgatcctggttgtcgcgccagacgaacagcgcctgcgcctcgccgggggtctggttaatctccggctggtggcgacgacgtcgccaccagcggcgggcggtttcgctgttgggcaggttttccagctcgaactgcaggatgtcgagcaccaccggcccttcgacctgcaccgcataatcctgcttcgcctccggaccgtagtcgctcatatgttcggcggagtagttaataccgccgacaaaggcggtggtgtcgtcgattaccacgattttacggtgcatgcgacggaacagattggtgcgcatccccatcagcttaggacgcggatcgtagtagcggaaaatcacgcccgcggcggtgagctcgcagacaaattcatcgctgagatccggggaaccatagccgtcgaggagcacctccacctggatgccgcggcgggcagcctcgagcaggaccgcgtgcagccgccggcctacctcatcttcaaaccagataaaggattcgaggatcacccgccggctggcgcgaccgatggccgcaaacagcgccggatagtactggtcgccattctccagtagcgtaatgcggttgccttcctgccaacgacatttcacaaatgtatctccacgctaaggggtgcatgatcggacagatggcgccaatgtttaagggccagcgccttcgggcgactggcgtgggcgttcttgacgtaaatgcggtcgaggcgcaacagcggaaaactgaccggaaaggtgcgcgccggccgtccgcgggcgcgggtaaagatctcttccagcccggcctgggcttttaacggctggttagcctgctgacgccagtcgttaaaatcgccagccaccaccaccggctcgcccgcgggcagggtattgacccactccgccagcatggtcaactgcgcctgccgttggtcggcgcgtagaccgagatggacgcaaatcacgtgaatagttatcccgctccgcggcggcacgatgcggcagtacagcaggccgcgcttctccccgttgccgaccgagatatcgcgattttcgtagtattcaatgggaaagcgcgacagcacggcgttgccgtggtggccttccggataaaccgcattgcgcccgtaggcgtagtcgctccacatggtgtcggcgagaaattcataatgggtcgtatccggccagttttcgatgtgcagcggatgtacctcatgagcgcccatcacctcctgcaggcaaacaatatccgcgctaacgctgcgcacggcgtcgcgcagttcgggcaaaataaaacgccgattaaacgccgtaaagcctttatgggtgttaattgtcagcacgttcaacgaaaatcccgccgttggctcagccataattctccagtaaatgtcactttcctgaataaaatagtgtagtagacgtcacaaaaagatgcggtgttacggaattttccgtaaagtgcggtactctgagtagcagagaaaaatccttcaggagagaagccatgaagtggcaacaacgtgtacgcgtcgcaacgggtcttagttgctggcagattatgttgcatctactggtcgtggcagtactggtgatgggttggatgagcggcgcgctggtgcgcgtcggattgggactgtgcgtcctctacagcgtcacgctgctggcgatgctgtttttacagcgtcaccatgaggcgcgctggcgcgatgtgggagacttccttgaggagctcaccacgacctggtacttcggcgcggccatgatagcgctgtggctgctgtcgcgcgtgctgcacaacaacctgctgctggccctcgccgggctggtgatactggcaggcccggcggtggtctcgctgctggcgaaagataagagccgttaccctaaagcgttcgggctacaacaaggcggcaacgcagcgaatccccagaagcatagataactatgcgactggggtgagtaaggaaagccaacgccgttgtagtttgaacgatgacgggtattacgcaatcttccttcggaacatcgcatacgccgctgagccggtggtggccgctatgaccagtagcggccacaaacttccccacacaatctccagactcgcatccttcagataaatttgcttggtgatatcggtaaagtggcggatgggatttatccaggtcagatcctgcagccactgcggcatgttttccactggtgagacgtaccccgacaggagaatagccggcatcataaagacgaacacgccgataaacgcctgctgctgggtggcgcacagcgacgaaatcaataagccaaagcccaccagcgatagaccgtaaatcaccatggtgaaatagaacagcagcagcgagccggcaaacgggatctgataggcccagataccaatcgccagcacgatagttgcctgcagggtggcgacgatcagcgccggcaccgccttgccgacgaaaatttgccaggtggcgaggggggagaccagcagctggtcaagggtgccctgctcgcgctcgcgagccaccgacagcgaggtgacgatcatcaccccgatggtagtgatcatggcgataagcgacggcaccacgaaccatttatagtcgagattcgggttgtaccagttgcgcaccaccagctcgctgttgttcggcttcgctttaccctccagcagctcctgctgatagtttttcacaatctgttgcagatagttggcggcgatttgcgcgctgttggagttgcgtccgtcgagcagaagctgcagcggggcggttggatagttatccagattgcgcgagaaatcggccgggaagcgcaccaccagcagagctttttgttcatcgatggtcggctggatcgcctgcgggctttgcagcagcaggacgtgggtaaaggctttggcgcgggcaaagcgctgagtgagttccaccgcgtggcgaccgctgtcctcgttgtagatagcgatggtggcgttggtcacctccagcgtcgcggcaaagggaaacagcagcacctgaatcagcaccggcatgattaaaatcgcccgcgtctgcggctcgcgcagcagcgactgcagctctttgcggattaatgtccataaacggtgaaacataatagctcctttggcccattcaaccacgccgggcggcactgcgtttgcccggcctacgggatcggcgaaccgtataatcgatgttggttaaaccgtaggcccggtcggcgcagcgccaccggacaaaacctaatccagacgccgtttggttttcagccacgtcagaccgataaacatcaccgccgacgcaatcaaaaacagcacgttgaccagcagcaccaccggaatattgcccgccagaaacaggctttgcagagtactaacgaaatagcgcgccgggatcacataggtcaccgcgcggatcaccgccggcatactgtctatctggaaaataaacccggacagcataatcgacggtaaaaaggcggcgttcagcgccacctgcgcggcgttaaactggttgcgggtaatggttgagatcagcagccccatccccagggtgctgagcaaaaacagactggtaatgacaaacaggatcggcagcgagccgcgatagggcacgccgagaataaataccgacaccagcatacacaacagcatcgccagcatgccgaggaaatagtagggaatgagcttgcacagcagcagttcggcgcgggtgatctccgtcgacagcagcgcctccatggtgccgcgctcccattcgcgggccaccaccagcgaggtcagtatggcgccgaccacggtcatgatgatggtgatcgccccggggataataaagtgctggctaatagccgccgggttaaaccagtagcgcatctgcacgtcgatcagcggttcaaaggtttcgccgcggtcttccgcccgctgctgctgccagatttgccaaataccttccacatagccctgagcgaagttggcggtattgggctcgctgccgtcggtgatgagctgcagcggtgcgtcggcgccggggcgggccatctggcggtcgaaatccaccggaatgaccaccatggcgcggatgcgcccggcctgcatcatctcaatcagctgcctgcggctgtcgctgacggtggcatcgatatagggcgagccggtcatggtatggacgaaatccagcgcctcttcgctctgctgctcaagcaatacgccgacccgcagcctgctggagtcgaggttaatgccgtagccgaagataaacagcagcagcagggggatcaccaccgcgatcagccaactgctgggatcgcgcacaatctgccgggtctctttgacgcacagggcgcggacccgccgccaggagagaatgctattgcccatggctattctccttgtcccagcggttaatcagggtaataaacgcctgctccatggtcgggtccgtctggctgtcgtccgccgcctgggccttcagcgcgtccggggtcccgctggcgataagcttgccgtgatagaccagcccgatgcggtcgcagtattccgcctcatccatgaagtgggtggtgaccattaccgtcacgcctttatcaaccatgctattgatatgtagccagaactcgcggcgggtaaggggatcgacgccggaggtgggttcatcgagaaacagaatatcgggttcatgcatcagggagcaggccagcgccagccgctgcttgtagccgagcggcagctcgtcggcggcgtggcgggcgatacttttcaggccaaaggcatcgctcatccgggcgattttttcattttgcgccctgccgcgcaggccatagacgccggagaaaaagcgcaggttttgctcgacgctgaggttgccgtacagcgaaaatttttgcgccatatagcccagatgctggcgcgccttgccagagctgaccttgagatccattcccagcaccagcgctttgccggaggtgggcaccagcaggccgcacatcattttgaaggtggtggatttcccggcgccgttggggccgagcaggccgaaaatttcaccgcgcttaacctggaaatcgacatggtcggtagcggcgaaatcaccaaactttttcgttaacgactgggcttcaatgaccgtttcctctttgctgccgtcaacgcgatggataatcgcccccaacggcgattcagcggtcccggcgccgccgagcaggtcgataaacgcatcttcaaagcgcggcgcggtgtcggccacctgcagcggcggcatgtcgccatgctgctggacttcctcaatgcgcgcgtcctttttcaggatcagacgcaccgatttgccctggatcaccccgtcgctaacctgcggcagcttcagcgcccgctgcagcaggcggcggttgttctcctgcgggctggaaaccagaaagctgcgcccggccatggtttgcgtcagcgccgtcggctcaccctggtagagcagtttgccttcgttcatcagcagcacatcgcgacactgctcggcttcatcgagataggaggtgctccacaggatcagcatgccgtcgccggccagctcgtgcaccatctgccatagctcgcggcgcgagatagggtcgacgccgacgccgggctcatcgagcagcagtactttcggatcgcccaccagggtacaggcgaggcccagcttttgcttcatcccgccggaaagcttgcctgccagccgttcggtgaatggaccaagggaggtgaactccagcaggcggtcgaaaattttcttccgcgcctcgccggtgacgctgcgcaggtcggcgtacagggtcaggttttccatcaccgtcagatcttcatacaggccgaacttctgcggcatatagccgagcaccgcgtgcagggcgctgtcgtcttttagcgggtcgaagcctatcacgctggcgcgaccctcatcaggcttgagcaatccggcgagcattcgcatcagggtggttttccccgcgccgtcgggtcccaccagcccggtgacgtagccggcgcggatcgtgcaggtgagcggcgctaccgctggcctgtccataccgggaaaacggcggctcaggccgtttaaggcgatgacggtctcactcatgtccgttcccgtggctaaaggagatggtcaccggcattccctggcgcagcgcgccgtcggcatcagtcaccacaatgcgcagacggtagaccagatcggtgcgcagatccggggtctcgacggtcttcggcgtgaattcagcgctcggcgagacaaaaccgattttgccgtgatagggcttatccggccggctgtcggtatagagcagcacttcttgtcccggctgcgcctggccgaggtttttctcgtcaacatgggcgcggacccacaccggatgcgttaacgacagcgtcagtacggtaccgccggcgttgagcatagtgccgggctcgacggcgcgggtcatcagcgtaccgtcagaaggggcggtgagcacggtatcgtgcaggtccagtttggcctgggccagcgccgcctgcgcctgttccagactggctttggcctgggcaatctcctgcgggcggttaccggcgcgatactgacgcagcttatcctgcgccgatttgagcgttgcctgcgcctgatcgcgcgaggagcgggcattctccagatcgttggcggaaatggcgctgctggcgcgcagcccgagctggcgctgataaaagttttgcgcatagtcgtaagcggcctgcgcctgtttcaccgccgccgcggcctgggcaatctcttccgcgcggtagccggccatcatcaggtcatactgcgcctgggcggtggatacattggcctgggcctgcagcagggcattttcatacggcgcgcggtcaagctcgccgagagtttgcccggcgcggatgctgtcgccttcgtcgacggtcagcgaggccagcctaccgccaacgcggaagctcatgttgacggtgcggatatcgacattgccatacagggtcagcggctgctgccggctgctctggtaccaccaccagccgccgcccagcgcggcgagaagaatcacgatcagcagaatgacgacgacgggttttttcatcagcccaaactcctttgcgataacccatgcaggatgaaatcgatatgacaggtaatgacttcgaaaatctgttccgttttttgcgcgtcaaactgcgtccagccggtgcgcagcaggatagtttcacgcccgagacggaaagcgagcacctcgcccagcagggcgtgggtatggaggatcatttgcgtatcactggcttcgcagccggtccaggcggcaatcagccgggtgagataatggtgcaagggggcaatcacctgctggtggatcagatggtaggcggcggtcggcgccagctgctcacgggaaatgaatttgcttaagttaaccgtgtcgtcctgggtgagcagcaggatcatgttgtggcaggcgctaaggatgaggtcgcggatcgcctggcgatccggcgcttccccggcaagcaggtgctccgccgcttcggcctgcgggcgaaaattgtcgccgataaaatcggcgatccactgggcgcaggcaagatacagatcgtctttcgagccaaaataataggtgatagcggcgatattctgcccggcctgggcggcgatatcgcgggtggtggcgtgctggccgtactcgccaaactgggcgatagcggccgcgataagctgattttttgcctgttcgcctttactggtcatcgcgctcggtaaaagttaaacaatcgattgattaactttaggcgccgactggcggtttgtccaccagccgggatcaaatatggaacccttcctctttcagctctccggcgacccaggcgaagaagcgctggaccttctccttctgttcattagcgtgggggaggacgaagtggtgcgcgccgaccggcatgctccgctcgtcggcaaataccggcgtcagctgcccctggcgcacgtgtccgccggccagcagattgctctcgaggatcacgcccatccccattctggccgcctcgatgctcatatatgaccggtcgaaattaaaaatgaagtttttatgccagccgcggaccttgtgccacgacagccagttgctccagttaatcaaggtgctgtcggagtggatcagatcgcaggccagcagatcttccacagcctgcacaggatggctggctaaataagacgctgcgctgtagggcaggacgcgctcatttttaatggttctgaccagcagcgtcggccactgtgacagcccgtgacgaatatcgatatcaatattatcccgggagaactggatgctttcgtatgaacaggtcaggctgatttttaacgccggccacgcctggcggaatttatccagacggggcatcagccatagcaggccgaagctcggcgccgaatgaatgcgtaaataatcctgatggatatcgttgatcacctggctggtggcctggccaatcatattcagcgccccggagacctctttgagatatttttctcccaccgccgttaacgtgacgcctttgctgctgcgggagaacagttttttccccagaaagtgctccaggctggctatctgatggctgaccgccgaggcggtaatattgagattctctgcggccagattaaggctgccggtagcggcgacttcaataaaagcctggatattgcgtaaagagggcatcggcagatttttattgggtagcggttggctcatggcggcatcctgcgcggggcgcgaataaaagaaaatagcgaacagcgtggcgcagccgggatgtacagcatagggaaaagcgaaaaaacaacgttaatttgtgatgggcttaacaatttatcttgttaaaagcgcgcaggtcagaaaacgctaaaaatttgcgggaagtcactaactcaatttttctcaatcataattgaggttttttgaataccgtttcattttggggttgttatattcctctcacaggcctgataacaatctgcgatgctcttgcatcgcaattataaaacacctaaccacctgtttcgctggcgaaaagcatttatctcttgctcctgtatggatagtaaaacgcggtgatccgaagcggcagcttacagcgaagtggatgaggtataaaacgaggaaaccctatgtcacgtatagatacgctggtctgtactgacgccaggaaaacgaaatatcgtttcgtggttttgacgatgatttttctggtgtatgccatcaattacgccgaccgaacgaatattggcgcggtactgcctttcatcattgatgagtttcatatcaataattttgaagccggggccatcgccagtatgtttttcctcggctatgcggtaagccagatcccggccggctttttcatcgccaaacgcggtacccgggggctggtatcgctctccattttcggcttctccgcctttacctggctgatgggcacggtgagctccgtgtttggcctgaagctggtgcggctgggactggggctgagcgaagggccttgcccggtggggctggcttccaccataaataactggtttccaccaaaggagaaagccacggcaaccggcgtttacatcgcggcgaccatgtttgcgccgattattgtgccgccgctggcggtgtggattgcggtgacctggggctggcggtgggtctttttctccttcgcgatacccggaattgtggcggccatcgcgtggtatctgctggtcaaatccaagcctgctgagagcggatttgtttcccaaagcgaactggcagagattaatgccgggcgtgaaagtcataataatagcgtacgcgaaaatatcttaattgccgaaagattcacctggctggataaaatcattcgggtaaagaaaatggcgccaattgatacggcgaaaggcttattcacctcaaaaaatattctcggtgactgcctggcgtattttatgatggttagcgtgctgtacggattattaacctggatccccctgtatttagtcaaagagcgcggtttcgatgtaatgagtatgggcttcgtggccagtatgccgtgcatcggcggctttattggcgcgatcggcggcggatgggtttcggataagctattaggccgccggcgtaaacccaccatgatgttcactgccgtgtcaacggtggtcatgatgctaattatgctgaatatcccggccagcaccctggcagtttgtattggattattctttgtcggcttttgtttaaatatcggctggccagcctttaccgcgtacggtatggccgtttcggatagcaaaacctatccaatcgcctcttccataattaatagcggcggcaacctcggtggatttgtcgcgccgatggcggctggtttcttgcttgataaaaccgggagttttaattctgtatttacctattttggtatctgcgccgccattggtttggtggtgattcttttcctcgatgaaccacaataacggaaatatatcctgttaattaatatgacgtaatgtcatggagtgaaactatgttattaaaagataaagtcgccattattactggcgcggcctccgcacgcggtttgggcttcgcgactgcgaaattattcgccgaaaacggcgcgaaagtggtcattatcgacctcaatggcgaagccagtaaaaccgccgcggcggcattaggcgaaggccatctcggcctggcggccaacgtcgctgatgaagtgcaggtgcaggcggccatcgaacagatcctggcgaaatacggtcgggttgatgtactggtcaataacgccgggattacccagccgctgaagctgatggatatcaagcgcgccaactatgacgcggtgcttgatgttagcctgcgcggtacgctgctgatgtcgcaggcggttatccccaccatgcgggcgcaaaaatccggcagcatcgtctgcatctcgtccgtctccgcccagcgcggcggcggtatctttggcggaccgcactacagcgcggcaaaagccggggtgctgggtcttgcgcgggcgatggcgcgcgagcttggcccggataacgtccgcgttaactgcatcaccccggggctgattcagaccgacattaccgccggcaagctgactgatgacatgacggccaacattcttgccggcattccgatgaaccgccttggcgacgcgatagacatcgcgcgcgccgcgctgttcctcggcagcgatctttcctcctactccaccggcatcaccctggacgttaacggcggcatgttaattcactaagcgaggcaaacagatgaagatgaccgaatcacaaaaagtcgccgcggcggcgtggcgtattcgccgttacgccctgcaaatgggggaagtgcaggggcagggctatatcggccaggcgctgggctatgccgatgtgctcgccaccgccttcagccatgccatgacctatcgcccggaagatcccgagtgggaggggcgcgatcgcttcctgctctctcatggccattacgctatcgcttattatgccgcgctgctggaggcgggcattatcccggaagccgaactggaaacctacggctccgacgacagccgcctgccgatgtccggcatggcgacctacaccccggggatggagatgtccggcggctcgctggggcaggggctgtctatcgccgtcggcatggcgctcgggctgcggcagaaacagagtaaggcctgggtctacaactccatgtccgatggggagctggacgaagggtcgacctgggaggcggcgatgtcggcggctcactatggcctgagcaacctgattaaccttgtcgatgtcaacaaacagcaggctgacggcgattcacgcaaaatcctcggctttgagccgctgcaggataaatgggccgccttcggctggtacgtacagcgcgtggacggtaacgatctgccggcggtgatggccgcctttgacaacgcgaaaagttattccggcaatcagccgcgggtcattttatgcgacacgctgatgggcaaaggggtgccgttcctcgaaacccgcgataaaaaccattttattcgcgtcgatgccgacgaatggcaaaaagcgatcgcggtgctggacgctaacaaaccggaaggagtgctgtaatgagccagagtcaaccccgtttaaaaacgtcggcgatgatcgcctcgattgctgatgaaggccaggcgaccgtccctgcgcccttcggcgtcgcgctgtcaaaactggcggcgcagcgcccggaaatcgtcggcatgaccgcggacctgtcaaaatataccgacctgcatattttcgcccaggccttcccggatcgctttttccagatgggcatggccgaacagctgctgatggcggcggcaggggggatggcgaaggagggatttattcctttcgccaccacctatgccgcctttgcaacccgtcgcgcctatgattttattcaccaggtcatcgccgaagagcatctgaacgtgaagatctgcgcggcgctgccgggcctgacgaccggctatggccccagccatcaggccaccgaagatctggcgatcatgcgcggtatccccgggatggttatcgtcgatccttgcgatgcgctggagatagagcaggcggtaccggccattgccgatcaccaggggccggtgtatatgcgtctgctgcgcggtaaggtgccgctggtgctggataaatatgactatcagttcgaactgggtaaggcgaagctgctggaggacggcaacgatgtgctgattatctcctccgggctgatgaccatgcgcgcgctggaggcggctgaaaagctgcgggccgataatatcggcgtggcggttctgcacgtgccgaccatcaaaccgctggatgagaaagcgattattgaacaggcgtcgaagccgggccgcctggtggtaactgcggagaaccacaccgcggtcggcggcctgggggaagcggtggccgcgctgctgatgcgtaagggcgtacgctgtgagctggatagcgtggggctgcccgacgcgttcctgttagccggcgccctgccgaccctccacgatcgctacggcatctccaccgcgaagattgtcgaaaaaattaagtatcgtctgcgttaaccgcgctgctatgacccactggccgctgagcgcgctcggcggccttctcatgcccgccagccaggcgcggcattcttttgcagattttatgcggcctgtcacaaaatctgctagactgcgccccttcatggcattgtggtttttgccatctcttatcgcaataatctccctgaaaactacgcccttcaccgggccggggcggttcggagttgttatgtcttttgattcccttggcctgaatcccgatatcctgcgcgctgtcgctgagcagggctacgttgagccgacccctatccagcagcaggcgatcccggcggtactgcagggccttgacctgatggctagcgcccagaccggcaccggtaaaacggcgggctttaccctgccgctgctgcagcgcctgatccagaatgagccgcacgcaaagggccgtcgtccggtgcgcgcgctgatcctgaccccgacccgtgagctggcggcgcaggtgggcgagaacgtccgcgattacagtaaatacctgaatattcgctcgctggtggtcttcggcggcgtgagtatcaacccgcagatgatgaagctgcgcggcggcgtcgacatcctcgtcgccaccccgggccgtctgctggacctcgaacatcagaacgccgtcagtcttgataaagttgaaatcctcgtgctggacgaagcggaccgtatgctggatatgggctttcttcatgacatccgtcgcgtactggccaaactgccggcgcgtcgacagaacctgctgttctcggcgaccttctccgacgagatcaagggcctggccgagaaactgctgcacaacccgctggaagtggaagtggcgcgtcgtaacaccgcgtccgagcagatcacccagcacgtccattttgttgacaagaaccgcaagcgtgaactgctgtcgcagcttatcggcgaaggcaactggcagcaggtgctggtgtttacccgtaccaagcatggcgccaaccacctcgcggaacagctcaacaaagacggcatccgcagcgcggcgatccatggcaacaagagccagggagcgcgtacccgcgcgctggccgactttaaatccggcggcattcgcgtgctggtggcgaccgatatcgccgcccgcggtctggatatcgaagagctgccgcacgtggtgaactacgagctgccgaacgtaccggaagattacgtccaccgtatcggccgtaccggtcgcgcggcggccaccggcgaagccttatcattggtgtgcgtggatgagcataagctgctgcgcgatatcgagcgcctgctgaaaaaagagatcccgcgcatcgcgattgccggctatgagccggatccgtccattaaagccgaacctatccagaacggtcgccagcagcgcggcggcggtcgtgggcaaggtcagggacgcggcggccagggtcagggacgcagcggacagccgcgcagccagaataatgccccgcgccgtcaggacggcgaggcgccgaaagcgcgcactcaggacggcaaaccgccgcgccgccgtcgcccgcgtaaaccggctggcgaataacacgctgatgtccgggccgcgataacgcgccccggctcaggcccgtctgtccgctacgcggcggcgggcctttttctttccattacactatttgtcgagcaggcttccacactccgcagaaagcaatacctccgggcgggcaaaaatggcacaatagtggctgtttatacagtattcaggttttctcatggctttgaccgctgcgctgaaagcgcaaatcgccgcctggtataaggcgcttcaggaacagatcccggactttattccgcgtcccccgcagcggcagatgatcgccgatgtggcgaaaacccttgccggggaagagggcaggcatctggctatcgaagcgccgaccggtgtcggcaaaacgctgtcatatctgatcccgggcatcgccatcgcccgcgaggaacaaaaaacgctggtggtcagcaccgccaacgtcgccctgcaggatcaaatctacagtaaggacctgccgctgctgcgtaaaatcattcccgacctgcgcttcaccgccgcctttggccgcggacgctacgtctgtccgcgcaacctgacggcgctggccagcaccgagccgtcgcagcaggatctgctggcctttctcgatgacgatctcaccccgaataatcaggcggagcagaagctgtgcgcgaccctgaagcaggatctcgacagctaccgctgggacggcctgcgcgaccataccgacaaagccatcgacgatgggctatggagccggctgagcaccgataaggccagctgcctgaaccgcaactgccactactatcgcgagtgcccgttctttgtggcgcggcgggaaattcaggaggcggaagtggtggtggccaaccatgcgctggtgatggcggcgatggagagcgaagcggtgctgccggagccgaaaaacctgctgctggtcctcgatgaaggccatcatctgccggacgtcgcccgcgacgcgctggagatgagcgccgagatcaccgccccctggtttcgcctgcagctggatctgttctgcaagctggtggccacctgcatggagcagtttcgtccgaaaaccacgccgccgctggccaatccggagcggctcaccgctcattgcgaagagcttttcgagctgattgcctcgttgaataatattctcaatctctatatgcccgccggtcaggaagcggagcatcgcttcccgatgggcgaactgccgcaggaggtgatggagatctgccagcggctggcgaagctcaccgagttgctgcgcggcctggcggagctgttcctgaacgatctcagcgaaaagaccggcagccatgacgtggtgcgcctgcatcgggtgctgctgcagatgaaccgcgcccttggcatgtttgaaagccaaagcaagctgtggcgcctggcgtcgctggcgcagtcctcaggcgcgccggtaaccaaatgggcgacgcgggtggtgcgcgatggccagatccacgtctggttccactgcgtcgggatccgcgtcagcgatcagcttgaacggctgctgtggcgcagcgtgccgcatatcgtggtgacgtcagcgacgctgcgctcgctaaacagcttctcgcgcctgcaggagatgagcggtctgaaggagaaagcgggggaccgcttcgtggcgctggattcgccgttcaaccacgtggagcaggggaaaattattattcctcaaatgcgttatgaaccgctgatggataacgaagagcagcacattgccgagatggcggcctattttcgccagcaggtggagagcaaaaaacatctcgggatgctggtgctgtttgccagcgggcgggcgatgaaccgcttcctcgagcatgtgaccgatctgcgcctgatgctgttggtgcagggcgaccagccgcgctaccggctggtggagctgcatcgcaaacgggtggaaagcggcgagcgcagcgtgctggtgggtctgcagtcctttgccgaaggtctcgatttaaaaggcgatctgctaagccaggtgcatatccataaaatcgcttttccgcccatcgacagcccggtagtgatcaccgaaggcgaatggctgaaaagcctcaatcgttatcccttcgaggtacagagtttgcccagcgcctcctttaatcttattcatcaggtggggcgtttgatccgtagccataactgctggggagaggtggtgatttacgataagcgtctgttgaccaaaaactacggcgcgcgtctactgaacgcgttacctgtttttcccatagagcagccgggcgttccggaggttatagtaaaacggaaagcaaaacagacagcaaaacagacgggccgcaaacgtcgctgacgccggcgcgtgatgcaccagggggagccatggagtacagcaaaattataaaagaggtgggtcgcggtaagaatcatgcccgcgatatcgatgaagagaccgcccgggcgctctacgcgcggatgctgaacggcgaggtgccggggctggggctggggggaatattaatcgccctgcgcattaaaggcgaaggcgaagcggagatgaaaggtttttacgccgcgatgcagcagcatacgctgcgcctgaccccgccggccggcaagccgatgccgatcgttatccccagctacaacggcgcgcgcaagcaggcgaacctcacgccgctgctggcgatgctcctgcacaagctgggatttccggtggtggttcacggcgtcagtcacgatcccacccgggtgctgaccgaaaccatttttaccctgctggacattccggccaccctgcacgccggacaggctcaggcgcagctggagggccatgaaccggtgtatatcccggtgggggccttctgtccgccgctggagaaacagctggcgatgcgctggcggatgggcgtacgcaacagcgcccataccctggccaagctggccacgccgtttggcgaaggggaggcattgcgtctctccagcgtgtcgcatccggaatatgttccccgggtggcgaacttctttcgcgagaccggtggccgcgcgctgctgatgcatggtaccgagggcgaagtgtacgccaacccgcagcgctgtccgcagatcagcctgattgatgagcagggcgtgcgggtgctgtacgaacgccagactgagatggcagcggaggcggtggtcctgccgacctcgaaagaccctgaggtcaccgcgcgctggattgaacgctgcgtcgctggcgtcgaaccggtgcccacctcgttgaagatccagcttgcctgctgtctgctggcctgcggggaagtcacctcgctggagcagggcctcagccgcgtcaacgactgttggtgatcggatctgcaggataaaaaaagcccgtccggtggctcggacgggcaaggcaagggtattaaaggtcttttcagggttaattcagtggcttacagatgggtgcagcgattatttatagataaccgcagtaccgctcagtttgttgttggtgttagcggaagtaatgctgtagccggtcgcgccagcggcttcggctttagcagccagttttgcttccagaccatctaaagtggttgcgccttgcgcagacaccacgccgatcttattcatgctttcagcctgagcgggggtaaccggttcggcggcaaaggcgccgaaggaaagagcggtcagagcgatggcagcggcagcatatttgatgtttttcatagttaatctctcgcaggttgttctgttcaggggacgatgttccgtcgatgtgataagtatcacgcttttctgcgagagataaaatcgaaggaaattcacagtcttcatcgaattttttgaatgattaataatttactgattattaataaattatttctcattcttttcgtcacgaagcgtagcgaggaacaccgacgcgtttaagggcacatattgcgactttttccgccaaaaaatgtgcgcgaaaagataatgcgaaaggctgtcataaacggtaaaggaaagtcagcgtagctggctatccttggaaccgcgacgattatatcctgaaaatgtattgttatgtaaatctttctcctgctggcacttcacgcagtatctgacccctgggatggcctgtcgacgggcctccggaatcggctctccgcattcatcacaaaatttgttgctttcgccgcgcggaagctcgcggcgggcgcgagccaccgcatcgtcaatagtgctgtcgatctgatcctgtacggcgccgtcgcctgcccaacctgatgccatcgtctgcctcctgtaaaaggttattgataaattatagctgaaccgtacagccggttaccgctgctggcggcattgatccgccaggctatcgccccctgacggtgggccttatccgcgagggcggccgccaggtcgtccagggtgctggcgccgaaggcggagacggtgccgacagggcggagcggcccgttatagggcagtacgggtggcgggggcaggggagaggccgcggtggcatgagcggtgagcgccgcggcgaacagcagcgagacgaatttcatcagcatatcctcataaaccgcatgggacatagcttaagtgtaggtctttccagaccgcgcgacagggaatgtttaatgcaaaacagtgcgttttgcatgctaccggcgcaggggagcgctactctggccggtagattatttagcgggcgtcagggcggatcatgtcaaagcgcaggctgtcatcaataccgtaataggcgctcgggccaccggcgcgcaggatcggctgggcccgggcggtttgatagataccgttgtccagcagtgattcatcgatatgcacggcgaccacttcgccgagcaccagccacgtatcgacagggttgccgtcggcggtggtgagttgaatacactgcgacagacggcactcaaagttcaccggactctccgcgacccgtggcgcgctgaccaggcggctggcggcggcggtgaggccggcgcgcacgaattcgtcctcatggtgcggaatcgaggctgacgtttcattcatcgccatggccagcggtcgcgtcgccaggttccagacaaactcctttgtttcgacgatatttcgcacgctgtctttccagccgctgctggcgaaaccaatgatcggcggccgatagttaaagcagttaaaaaagctgtatggcgccagattacgctggccctcggcgtcctgcgaggcgatccagcctatcgggcgaggcccgattatcgcgttcagcgggtcatgcggcaggccgtggccctgcgaaggttgataaaagtacatgctgcacctgtcacggataatggagatatccagactcccttatttaccgcgccgccgtcaacgggtatcttacgcggctgttcaaaggagattgtcatgaaagcccagaaaccggggttacacccgcgtaaccgccaccatcaacgctacgacctgcccgcgctctgccaggcccatcctgacctgcagggctacattacgctcaatccgctgggtgagcagaccattgattttgccaatccgcaggcggtgaaggcgttgaataaagcgctgctggcgcatttctacgcggtcaaacactgggacattcctgacggctttctctgtccgccggtgcctgggcgggccgactatattcatcatctggcggatctgctggccggggatagcggcgaggtgccgaaggatgccacgatccttgatattggcaccggcgccaacctcatctatcccctgatcggcgctcacgagtatggctggcgctttaccggcagtgaaatcaacccgcaggcgttcgccagcgcgcaggcgattatcaatggcaacccgggcttgacccggcagatccgcctgcgccggcaaaaagagagccaggctatctttcacggcgtgatccataaaaacgagacctacgacgccacgctgtgtaatccgccgttccatgactccgcagagagcgcccgggcggggggcgagcgcaagcgccgcaacctcggactcggcgccgaaagtggcctcaattttggcggtcaacagcaggagctgtggtgcgaagggggcgaagtagcctttatctcgcagatgatccgcgaaagccaggccttcgcccgccaggtgaaatggtttacctcgctggtgtcgcgcggcgataatctgccgccgctctaccgcctgctgaccgaggtcggcgcagtgaaagtggtgaaaaaggagatggcccaggggcaaaagcaaagtcgctttatcgcctggagctttatggacgacgccaaacgccgtcgtccattctaacgctactcggcggccgggctgtcggcgcccggcatcggcagctgctgccaggtctgtaccggcgcgcgaaccccggcgcgatcgaagtgctttttcacctgggtgtcgagggcaaaacgcaccgtccactgcttcagcggcagggtagtgaagctgacgcgtagcgtaaaggcggtattgctcagccccaccagcccggcgaacgacggttcgccaatgatcagaccgcggatctcctcctgggccagcagatcgtccaccgccgccttcagcgcctggctggctttatccagatcctcatggcggtcaacgtcatagttagccacaaccgagccaatgccacgcacgaagttggcaaaggtggtgatcgaggaccagggaataatgtgataggcgccggtatcctgacgtacccccacggagcgaatcgacattcgttccacggtgccggtcaaagggccgatggtgaccaggtcgccggtgttcatcccgttctcaaactggataaatatgccagtgataatgtctttgaccagggtttgcgcaccaaacgaaatggccagccctaacgccccggcgcccgccagcagcggcgcaatgtttaccccaatttccgagagcaggatcatcaccgtgatggtgctgatcaccaccgccagcgcgttgcgaaacagcgtcagcagcgtccgggcccgcgcgctgggcagcggacggccatgaatatccgatgccagccggttttcaatcaggctggccagaaccgtccagccaatggcggagaagaagaggatcagggcgatgcggatcagcacatccaccgttttttgcccggcatcgttgtgcagccattcccggaagtcaaacaggccccaggcgctcaacagcagcatgatggcgacacagacggtgagaatgcgcgccgccttcagcgaggcggagatccagccatttagacgcttttgcagttcagggtagttgcgctgagtggcgggcgacagggtgatggttttggctatccagcgcgacaggatgccagataccagcgccgcgccgccgataatcgccaggctttgcagggtggcgcccatcatgaatttcaggctgttgcccgggtcgaacagggaaaagaaaaaaagcaccacaaagtaggcgcaggccagccagtgccagaccagcgcgaaggcgcggataaacaggctaaagaaagcgagtgagtggtcggccaggtggatcaacccttgagtaatcaccgctttgttatgaaaaatcaggtacagcgcccacagcgtaatgcacagcatgatgacgacgttagccagcgcgccaacctgaacattcacctgattggaaataatcggcaccgcgacgatcagaccgtaaccaatcaggctgctgagcgcgctcaggcgcaggctccagtatgacgcggcctcgtcgctgaggttaaagggccgcagggcaggaatgcgcgggcagaaaatgagccgcagaatagctttaaaaaactcgatcagcgcgaaggcgttgaggaaatggctctgctggaaggcgatggtagggttattcccattcaggcgatcgcttagcagctgaccgacaaacagggttagcgccagcagcagcaggtcgatgataaacgccccggcgatggtcaggggcagctggagccagttaccgcgatcgcggtttttatgccgtccccattcgcccattttgcgatacagcggcagcgccgcgaggcgtaccagccaccagaaggcaaacaccagcccggccagcagtaaaaaatgccaggccgcgctggtaaaggtttgcggattaaagggcttatgcggtgagccggtgatattgcgccacagctgggaaaagcgtgatgagagctgttcgccatattcccggcttatctgggtgacgttctccagtaccgtggtctcttctttcaccgccggtggcgtcagcgtcggggtgctgtcgggcggcggcgtggcggctgctttacgcagctggtcaatgagctcctgacgggcggagtcgttggccagcacatcggccagtgcggcataagccgctcttttctgttccacatcgggttcgctggcgctgtttttatcagtgttagccgtcggcacgccggggagggtggcggcggaaagcggggcagtaaacagtgcagcgagcaaaagcaggatccacggcatgggcacctccgttgcaacgtaaacgggtaagtatagaagccgctggcggaaggggagggaagaggattctggaaaagcggctctcatcgtgggggagagagccgttgcgggtcaggcgacgtgttgcaggaattcacgcaggcgcgggctgggcgggttcttcaccagctcctggggattgccgtcttcagcaattcgtcctttgtcgatgaagattagtcgcgaggccactttttcggcaaagccgatttcgtgggtcacaatcaccatcgtcatgccctcttccgccaggtcctgcatcaccttgagcacttcatggcgcagctccgggtcgagcgcggaggtcggttcatcaaacagcatcatcttcggcttcaccgccagcgcgcgggcgatggccacacgctgttgctggccgccggagagttcggacggatagtgatgcgcgcgctcagccagaccgactttcgccagcagctctttcgcctgcttctctgccgcctgcttgctggcgccgcgtacccgcagcgggccaaacatcacgttttccagcgccgtgaggtgcgggaacagataaaactgctggaaaaccatcccggcttcctgacgaatcagacgttcgtccaccttcgggtcgttgaccttcagaccatcgacaatcagatcgccgctggtgatctcttccagcttattgatgcagcgcagcatcgttgatttaccggaaccggaagggccgataatgaccaccacttcaccctgattaattttcagagagatatcgtgtagcacctgggtcggaccaaagtgcttggagacgtttttaaattcaatcacaggattttcatccttctttcaagacgacgcagaataaagctcaggaccagggtgataatcaggtagatcacggctacagcgctccagatttccagcgcgcggaagttgcccgcgatgatctcctgtccctgacgggtcagttcggcgacgccgatgacgatgaacagcgaggtatccttgatgctgatgatccactggttgcccagcggcggcagcatgcggcgcagcgccagcggcaggatcacgtggcgaatggtttcgcgacgcgacaggccaagcgccaggcccgcttcgcggaatcctttatgtatggagagcaccgcgccgcgggtgatttccgcgatataggcgcccgagtttatcatgatggtcactaccgccgcggagaaggggtcgatgcgcagatcgctaaaggccatcggcagcgcaaagtagatgaacataacctgcaccacaatcggggtgccgcgaatgatttcaataaagaccagcgcgatgtggttggcgatccagccgccgaagcagcgggcgaaaccggccaccagaccaattatcagaccgccggccaggccgaggacggaaatccacagcgtcattttggcgccttccagcaaaatcggaatggcaggccagatggcactccagtcaaactgcataatacgttcctgttaccgtgtcgagagcagaggaaagcctccgccaaaataccgtctcccgccgagcctgtgccggaagaccgttgtggtgtcgccggacctcggtccggcgaagtacgtttttattatttgggttcagtgccgaaccattttttataaatttcgttataggtaacattgtcgcgcagcgttttcagcgcaccgttcactttctcacgcagctcgtcgctgcctttcgggaaggcgataccgtagttttgcgcttccagtgattcgcctaccgctttgaacttaccgttgcccgcggttttgatgaagtacagaatattcggcgtatcgtgcagcacggcatccgcgcgaccggttcccagctccatataggcgttatcgatgttcgggaactgacgcagatctttggttttgatattggctttcgcgtagtcaacggagccggtgccgctcttcaccgcgaccactttaccgttcagatctttgacatctttgatgtcgttattattggcgttgaccatcaccagcaggccgcttttgtagtagccgtcggagaagtcgatcgcttttttacgctcgtcggtaatggtgatccccgccagcgccagatcgatatttttggtttgcagcgccgggataatgccgctgaagtccattggcttcagggtgtagtcgagcttcagctctttggcgatagccgcccacaggtcaacgtcaaaacccacatacttatcgccttgcttaaattcgaacgggacgaacgccgtatcggtggcgacaaccagggtcttattggcggcatgggaagaaaccgcaaaagccagggtcagtgcagccagtgaaactttaaatacagacttcatagcatttccttttatatccacgggacgatcccctgcgagaacgactagcctaatgaaaaaatcgtgccacttttacaagctgttgtttttcaacaaacgaagcgtaagtcgttgcacaagatcgatcatttcaggcagtgactgcaccatgatggggcgtcattttggtgcgtcataagggtgctgaattaccagcccatttttagcgcaaaccctgatgggaaaacaatctcgacgtaacgattgtgtgaggtgattattacaatctttttacttttgcgcgcattttcatcaatctggtgccctgaaacggtgcaaggccagtggaggatgaaaagcaaaggatggaatatagggcagggagaaacgctgaggcgccgccgaccgcgctgggccggcggcaaagccttactcgatgttggcttcaatgaaccacaggaatttatccagatcgcgggaagccgcggtgaagatatctgcagtgtcttcgtcttttgcttcgtcgatcgccttacgcacatcgttcgccactaccgcgtagcggtcagccagggctttcaggtgatcctgaacgtgatggatgtccagcgggtagctctgcagcggggttttgctgttaatgacctgagtggtacccagggcgacgccgcccagctgcaccgcgcgctcggccatggtgtccagatgttcggtcagcgcggtacgaaagccatccagcatttcgtgcacggcgataaagttcgcaccgcgcatattccagtgtgcctgcttggtgataagtgacaggtcaatgaactggatcacctggcgattcaacagctcaatggtcgctttcttttcgctgtcagcgacatcgttgcgggtatagaccagattagacgcttttgatttaaccagttttgcggtactcatcgtttcatatcctcttgatattgatgctcatcacacttcagatctgaatgatgtggagcgttgtcccaaatgacttcggaaataagtatagcaagggttttcaagagtgaggcatcggcaggctatatcactccgatagcgcaaagtggttggttattttaaaaatatttaaatatcagctatttatatttggctgaacggcccggatttctctcgggccggcgccgtaacagaatgttaattgatatcgacctgctcgactttactctgccgttgcatagtcagcgtggcgcccatcgaggcgataatgatcgcgccgagcgccagggtctgggagagcttcagcgtttcaccgaggaagatcataccggagagggcagctaacgctggctcaaggctcatcagcgtgccgaaggtgcgcgtcggcaagcgcgtcagggccatcatctcgagggagtagggcagcgcggtagagagaatcgcgatccccaaacccagcggcagcagcgaccactgccacagcgtatcggtggcctgtgccatgcctaacggcacaaacaccagcgaggcgatgagcgaccccatcgctaccgtggctggaccatgctcttcaccggcacgctgtccggtcagaatatagaccgcccagcacgccccggcgccgagggcgaacagcgcgccggttaaatcgacctgcgccacgttctgccccagcggcagaagataccatagtccgaggatcgccagcgccacccagacaaaatccagcgggcggcgcgaaccaaacagcgccaccgtcagcgggccggtaaactccagggccaccgccacgccgagcggaatgcgctgcagggataaataaaagagatagttcatcgccccgagcgctaggccgtacagtcgcagcggcacgcgctgcgccggggagaaacgtagccgccatggcttgaacaccaccaccagaatcagcgttcccagcgccagacgcagggcggtgacgcccggggcgccgaccaccgggaacagcgatttagcaagcgatgcgccgctttgaatcgaggtcatggcgactaaaatcaccagtatcggcaaccatgccgccgcttttctggatggaccgggcatcctttctcctgtcaggttttgtcaaaaggggtaaaagttccagtgtactggaattacctgccggcggttgagctaatgttgaaaaaaacaggggcaaaaacagtacaatggcgaaaactgctgagaaattcaccaggcggttaggattaatctggatgcttgcgaatttcttaatgagcgttaagatgtaagttaacgccaaaaattgttgttttccatattgttacagaaatatggaaacttttggttacatgaaaaagtatgttagacaatgtaaactccaaagagtttcccaaaagtttttgatatatttaaggcttaggacttattagaaacacatttgaggtggttatgaataaaattgcacgtctttcagcactggccgttgttctggctgcatccgtaggtaccactgcatttgctgcaacttctaccgtaaccggcggttacgcgcagagcgacatgcagggtaaagcgaacaaagctggcggtttcaacctgaaataccgttacgagcaagataacaacccgctgggcgttatcggttccttcacctacaccgagaaggataacaacagcaacggtacttacaacaaaggtcagtactacggcatcaccgctggtccggcttaccgtctgaacgactgggcaagcatctacggcgtagtgggtgttggttacggtaaattccagaacaacaactaccctcataaatccgatatgagcgactacggtttctcttacggtgctggtctgcagttcaacccgatcgaaaacgttgctctggacttctcctacgagcagtctcgtattcgtaacgttgacgtcggcacctggattgctggcgtgggttaccgcttctaatcactccggtgatatgaaaaatccgcctctcggggcggattttttttgcctgctgacggccggcccgggcgactggccgggccggcgcgattaattgactgtgaactcatcggtaccgaggtgagcgtagtccaccttctgcagctggaagttggtgatgtacaccggaccggccttttgctcagagataaaccgatagcgtggggtgatttccgccgcctggatcccggtccactgggagaagaaactgaggaaatcattcgccgaacgctgcgccttaatcactttatgcgctttgtcatcgctggatagcaccataaacggcacctggaagttctgctggaacttatcatcatgcgccagatactgcacctctttgccccgctccttgaacgccagaccatgatcggaaaaataggtcagggaaaaagtgtcaccggaattttgcaactgatgataaagcttagccagcagcgaatcggtctgcgtcatgctgtagaggtagcatgaggtctctttcgactgaacgaaaaccgtgtatttgcccttggtccgatcgcaggcctgtgggtgagagcccatcaggtgcaggacaatcagctgcggctgggtacgctgggttgagagcacctgctcggtcagcttcagcaactgctcgtcctgggtgtttttattggcttcgaaatcgccgtttttcaggaactgtacttcatccgcccgtttggcgatgctggcgatagcggtgtcgtactcgccaatttgcccctggttggagaaccaccaggtctggaaaccggcgcggttggcgagggtgacaaagttatcctgatactgtggtttgccatcgaccacccggttaagcgtcaggccgagcgatttctgcgttgagccgctggcggcgatgtagttgttaaacagataaccgtttaccgagctggcaaacggcgtgttgtcccaatggccaccgaaagcgccgagggcatcgcggcgcgcgctttcaccgatcaccaccacatagagatggtattttggctttaccgccagcacgtgccagctgtctttcatgccagccagctgcgccatccgggcctgttcgtccagcacctcgttgttattcaccaccacgtctttgacaaaacgaaaggccggataaccggtgtcaatcaccttgaatacaccgccccaggcaaggttttgcaccggctggagaaagaagatcccgatgctgaacaacaggcccagcgtatccatttttccccagcgtgatggctcaacgatcctacgacgaaccgcaatgaccccgagagcgaagatgaagaccgccagcagatagttgtaccacgggaagatggtcaggatttccgtagactcttccacgttggtggcgtgcagcgccagcagagtgttgaagttgggggcaccgtaggcctggccaaagggatagtacagagccgccagcagggaataggcgccgaccaccgctttctggacgcgcggaaaggcgcgccagagcagatgtaacacgcaggtaaatgccacggtataaagcaggctaaattcatagcccagcgccaggttaattaacagcgactgtaaaaagtagaatcccgtccaggggttcagtgccagtcggcgggcgaccagcgtatctttcagggtggtgacattcatagtaaacaatcaaaaagaggccatgcgcatcccctggcgtcaaggggtaaaacctgctggacagtgcgtgaagagggtctctgcgagccgcgaatgtggcagggctgtgcaaagatagggcttgtaaatggtaaggtcaaccagacataacagattgttttgcgagggcgcttacaaaacttgaaaaaaggtcagggaaacggggggaaccggtcattttaccggcagaaaatgacagaaaaatgaagcggcgtaccgcgacgccgccttaggaattgggtttgccctgctgcggtttaccgttgatcatctcgcacagcataccgatcagcattaatcgtactttaaagggggaatggctaaacacgtttatgcacctcttgaattcattcatctgctctcctcctgccagttcgctccgtcattccctgatggatgtttgcattatatacagatatagcacaggctatattttatagctatggctaaaacgttaattttttgtgctcttggcgcaatccattacaatgtggatctttttatacgatgcttgacgcgtcacacgaatgaggaagcacaatgaaccgtcgcgcaggtaagccaataacaaaaaaagtgacgcagttagtgaatgttgaagagcacgtggaagggtttcgccaggtgcgggaagcgcatcgccgcgagctgatcgatgactatgtggagctgatctccgatctgatcaacgaagtgggcgaggcgcgccaggtggatatggccgcgcgtcttggcgtttcgcaacctacggtcgctaaaatgctcaaacgcctggccagcgtcggtcttattgaacagatcccctggcgcgggatcttcttaaccccggaaggtgagaagctagcccaggagagccgcgagcgccatcaaatcgtggagaacttcctgctggcgatcggcgtcagcccggagattgcccgacgtgatgcggaagggatggagcatcacgtgagcgaagagacgctggcgatgttcctgaaatttacccaaacacagggatctcaggaagcatgactcttcccttcgtccagtcgctgctgcgcgatcgttttctccatttgctgctgattatcgcctgcgtgctcagcgccatcgtgccgtttgtcccggcaagctggccggcggccattgactggcataccatcgtcacgcttagcggcctgatgttgttgactaaggggatcgaactgagcggctattttgacgtgctgggccgaaaaatggctcgccgctttgtgactgagcgccagctggccatctttatggtgctggcggcggcgctgctgtctacctttcttaccaacgacgttgcgctgtttattgtggtgccgttgacgctgacgctaaaaaaatggtgcgccatcccggtgaaccggctgattattttcgaagcgttggcggtgaacgccggttcgctgctgacgccgatcggcaacccgcagaatattttgctgtggggacgatccggcctctctttcttcgggtttatcggtcagatgctgcctctggcagcggcgatgatgctgaccctgctggcgctgtgctggttctgttttccggcgaagcggctcagttaccagagcagcgacagggcgccgtcatggcaacctaagctcgtctggagctgtctgggactgtatgtggtgtttctgacggcgctggagatgaatcaggccctgtgggggctggcgctggtgctgctgggcttcctggtgctggcccgggcggtgatcgtccatgtcgactggtcgctgttgctggtgtttatggtgatgtttattgacgtccatctgctgacccagcttccggcgctgcaccaggtgctgagcggggtggggaccctctccggcggtggactgtggctgaccgctattggcctgtcgcaggtgatcagtaatgtgccctcgactattctgttgctcaactatgtcccgccgtcgatactgctcgcctgggcggttaacgtgggcggctttggcctgctgccgggctcgctggccaatattatcgccctgcgtatggccagcgatcggcgcatctggtggcgcttccatctctactccattccaatgctgctatgggcggcactcagcggctactggctcttcaaactctgcgcctgatctcaacagaatcgcgccatcattcacatcgatcgccaggatcgcctttcggggcgatctttttttgtccggctcacagaaaccgatcccgacctttgcttaccttttcactttccggtatatgactagtcattatgtttaaatgactagtcatataccgaggcgcagcatgaagaacagactaccggcagattttttatggggaaactccgtctccagcatgcagacggagggggcgtggaacgagggtggcaaggggatgtcggtgtatgatatccgtcaaccggcggagttcgcctccgactggaaggtggcgaccgactcttatcatcgttatcgggaagatttcgatctgatgcaggatttgggcatgaactgctaccgttttcagatcgcctggagccgggtgtgccctgacggagatggcgaattcaatgaacaggggatcgccttctaccatcaatttatagatgaactgatcgcccgcggcattgagccgatgatctgcctgtatcacttcgatatgccgctgtcgctggcggagcgctacaacggttttaccgaccgccgggtgatggacgcttttatccgctacggccagaagatgatcgcctgctatggcgacaaggtgaaatattggctcacctttaatgagcagaatctgtaccattcgccggaagcgtttctgatttccggctatctgcagggggagaagaccctgcgcgaactgtatctgatccagcatcatgtgatgatggcgcacgtccatctgactcactatctgcaccagacgaagccgcagtgtctgatgggcggaatgctggctcacgctctggtctatccggctacctgcaaaccacgcgatatcctctgcgcccagcagctggatgagttcttaaaccagaacctgctgcgcgcctacgcgggtgagggttatagtccggaggtgatgcattttgtcgccgcggaagggttcgatgatatctatcgtcgggaggatctcgccctgatggcgacggtgaaggtcgattatctggcgttcagctattacgccagccgcacattgaacagcgacgcgatcccgccgggaacggcggtcaacaactatatgctgtttggcaaccaggataacccgttcctgaaagcgacggaatggaactggcagattgatccgctgggcttccggacgatcatcactcgttactataacgattggcgcctgccggtgttcccgattgaaaacggcatcggggtgattgagtcctgggacggcgaacatcccattgccgatgattaccgcatcgcttaccatcgcgaccatatcaacgccatgaaagcggccatctttgaggatggggcgcaggtgatcggctatctcggctggggattaatcgatatcctgagctcacagggcgatatgcgtaagcgctacggcgtggtgtacgtcaatcgcgaaaaccatgacctcaaggacctgcggcgggtgccgaagaagagctatgcatggctgaagcaggtgttccgcagcaacggcgaagcgatgtaacgctgccctggcggtcagatggtgtatccagcccgccagccactcactgaatggataaggaccgggaaatgacggcgaagtatctgcaaatcgcgcgggaaataaaaaaacgcatcatcagccagcagtatcctgccagcgcgccgctacccgaccagtttgcgctggcggcggagttcagcaccagccggatgaccatccagcaggcgatgcgccagttaatcgtcgaagggctgatctatacccgtaaagggcagggcacctttgtgcggaaaaatttccttcagctgtcgcagtgggagctgcccggcagcgactatttcggcgccaccaaaacctgggagcatcttggcgaggtgcaaagcgaagtggtgcgctttgcggtgcgctttcccagcgacaaggagcaaagttcgctgcttatcgacgccgatgccccggtgtatgactttgttcgcctgcggctgctcaacggcgagccggtatcgctggatctgacggtcatgccggtggggctggtgccggggttaaccaaaagccatctggaaggttccgtgtttcgctatgtgcaggagacgctggggctgaagctgatgggatcttaccgcgtggtgcgggcgatgaagcccggggaactggataaacagcatcttcactgcgaaccgaccgatccggtgctggaggtggagcaggttatctatctggaggatggcacgccgctggagtacgcccactgccattatcgctacgatcacggcgggattattctggtgaataacggctaggccggggctcctgctggcggctgcgcatagcggggttacggcgtggtagggtttggtagcccgggcgagcgttagccgcctcgagggaaaatgccgataaaaaaacggcgggcatcaggcccgccgtttttcttgtcagcacaacttagttcagacgcaccggcataccggagcggttctggatagcctgctcaaccacgttctgatcgacatcagactggctggtaactgcctgtaccggctgagtcagggtgatcggcacgatctcgccgccctggaactgcgcttcggtggtcgacagcgggttgtgcacctcgatgtaacggctgccgtccggctcggtggtcgcttttaccggctcatcgataaactgtacgcgggtgccgaccggcacgttctccaacaggaatttgatgtcatcgttacgcagacgcacgcagccgtggctcacgcgcaggccgataccgaagttagcgttggtgccgtggatggcgtacagacggccgatatacagcgcgtacagccccatcgggttatccggaccggccggtacgacggctggcagcgggttgccggcggcggcgtattcagcatgcattttggcggtcggtgtccaggtcgggccggccttcttgcgttcgactttggtggtccagttgatcggcgtatctttacctaactggccgataccgatcggcagaacgatcacggtattggtgcctttcgggtagtagtacagacgcatttccgcgctgttgataatgatcccttcatgcacggtatccggcagaatcagctgctgagggatgttcaggacgctaccgcccttcggcaggtaagtatccacccccgggttggcttccagcatgttggaaagccccatctgatatttcgccgcgaagtattccagcggctgtttgttatcatccggaatggtaatgacctgattctgaccaaccaaacggctgccatcggttggcaaaggataggtgacagcagacgctgtattgcaaaagcctacgatggcgaaggctgccgctaagagtgtagataatttcatagtctttaatgtcgtgtgcgaaatcaacgccacacaggcctttgttaatgattgagacagtagatgggagcgcattatatgtgcattccgctgaacaggtaaatcagatgtgtacgaaatcacatttttttccctggcgcctcggctgccgcggtccggcaggcggccgaagcatcgctcgccgcgcgggtaaagggcggttactcttccagcagccgggcctgcagcgcggcgcgaaccggcgcggtaagctggtactctgccgccagccaggcgtcgacggtgccatagcgctggtgaatagccgacagcgcggcggcgagataggactcttttaccgtcagaatatccgccaggctttggcgcccctgggcagtgaggtcgttgccgagcagctccaacatccaggcctccacctgcgtcagcatgccgtgggtaaggagatactcctccatcaccgtttcgctgtcgcagccgacggcgaacagcgttaacgcgcagccgacgccggtgcgatctttgccgaccgcgcagtgttgcagtaaagcgccttcaaaaggcgtggtcagccaggcggcgagctggcgataggccgggttgttaaacggcagctggcggtagagttgcagcataaactgctcgccgttcagcgcgttaagggtggcggcattcagctcggtgaccttcgcatttacctcgctcaccggcggattggccggcgcgttaagataatgggtaagcgggctaagcttgtccggagtacgggctacctctccggggtcgcgatagtcgagcacccggctgagcggcaaagtatcgaggtggttgagatcctccgccgttaaccggtttagcgcgccggatcgcaatagcttgccgctgcggacgcggcgtccgtcggcggcaagctggccgcccaggtcgcgaaaattgatgccgccctgcagggataaaaaagccgggtgtcgcgataggctgctggtcatgggactccttataaatacgtacagaataaccgtttgagcgcgggtttccggctcatctgacaaagaccttagcacaagcgccgcggtggaatttaccgcaggccgtgaaaagtgtgtcatttgctggcataatgtctgctgtatcacacccctcatactcttttttcaggatatccccgtgctagtatccagcaacgttaccatgcagtttggcagtaagccgctgttcgaaaatatctccgttaaatttggcggcggcaaccgttatggtctgatcggcgccaacggcagcggtaaatcgacctttatgaagatcctcggcggcgatctcgaaccgacgctgggcaacgtttcactcgacccgaacgagcgcatcggtaagctgcgtcaggatcagttcgcctttgaagcgttcaccgtgctggatacggtcatcatgggccacggcgagctgtgggaagtgaagcaggagcgcgatcgcatctacgccctcgctgagatgagcgaagaagatggctacaaagtggccgacctggaagtcaaatatggcgaaatggacggctactcggcggaagcgcgcgccggcgaactgctgctcggcgtcggcattccggttgaacagcattatggcccgatgagcgaagtcgcgccgggctggaagctgcgcgtcctgctggcgcaggcgctgttttccaatccggatatcctgctgctcgatgaaccgaccaacaacctggacatcgacaccattcgctggctggagcagacgctgaacgatcgcgacagcaccatgattatcatttcgcacgaccgtcacttcctgaacatggtctgcacccacatggcggatctcgactacggcgagctgcgcgtgtatcccggcaactacgacgaatacatgaccgcggccacccaggcgcgtgagcgtctgctggcggacaacgccaagaaaaaagcgcagattgcggacctgcagtcgttcgttagccgcttcagcgccaacgcctctaaatcgcgtcaggccacctcgcgcgcgcgccagattgacaaaatcaagctggaagaggttaaagcctccagccgtcagaacccatttatccgcttcgagcaggataagaaactgttccgtaacgcgctggaagtggaagcccttaccaaaggctttgatgaaggtccgctgttcaaaaacgtcaacctgctgctggaagtgggcgaaaagatcgccattttgggcgccaacggcgtgggtaaatccaccatgctgaaaaccctggtaggcgaactgcagccggacaacggcagcgtgaaatggtctgaaaacgcgcaaatcggctactacgcgcaggaccatgagtacgagttcgaaaacgacctaacggtcttcgaatggatgagccagtggaagcaggaaggcgacgacgagcaggcagtacgcagcatcctcggccgtctgctgtttagccaggacgatatcaaaaagccggcgaaggtgctttccggtggcgagaaagggcgcatgctgttcggtaagctgatgatgcagaagccaaacatcctggtgatggacgaaccgaccaaccacctggatatggagtcgattgaatcgctgaacatggcgctggagatgtatcagggcaccctgatctttgtctcccacgaccgtgagtttgtcagctcgctggcgacccgcgtcctggagatcactccggaccgcgtgatcgacttcagcggcaactacgaagactacctgcgcagcaaaggtatcgagtaatccctgtccgttacccgggtagcggctacgccttacccgggcgacacgcggtgccgtttttttgtcgggtggcggctaacgccttacccgacctacggttcttgcgacctgcctttaatgtcttcaccgcgctggctgaaactaccggcctaaggtcagaacctccactccgttccttcaacgccattcaccagcagcttacgcttttctcctaccggtaatgacagcttcagcgctttccacgccgggcgatagttgccgcgggcgttgatatccaggtttatgctgctggcgctgcaggtcatttcccactccagccatagcgcatccccctgtttatagccccagctttcgccgtcgtcttcaaacagcagaccgcgggttgagccggtacctttcagcgggaacagctgcagttcgcgacgatcgtctttttgcgcatcgacatggctgatacgttcactaagcggcagaccggcgccggcgcggaccaacagcggcagtttttccagcggcgcgtccagcgtcacccactggccgccggcgaaccactgatggctgtagaaatcgtaccaaccggcctgattatcccgcagccatacttcacgctggcgggcgcccggctcgaccacgctggccaccagcaggtcgcggcccagcaggaagtcatcgcattcggcgaaggtctgcgcatcgtgctggtgatcgaggaaggtcgggcggagcatcggctcctcatcagcatgcgcctgccatagcagagtgtacagatagggcagcaggcggtagcgcagctcaatggctgagcggatcgccggagtgatggccggatacatccatgcttcgtttaccgtctggtcgtcattccacgagtgaatggtaaagcgcggatgcatgacgccattttgtacccagcgcacaaacagttccggctcgggtttatcgccggagaaaccgccgacgtcgtggccgacgttaaacagcccggaaaggctcatccccaggcccatgcggatgttatagcgcagcgtatcccagttggtgcggttgtcgccgctccaggtctggacgtagcgctgcatcccggcgcagccggagcgggagatcagatatgggcgcttttgcggcgcaaagcgctgctgggcttccagcgaggcgcgcatcatcaacagcggcatcaccgggcgaatatgtttgatggcgatttcacggccaaagccgtagcagcgggcttcgccgtcccatacttcgtattcgttattatcgttccaggtcgaatcgatgcccatctccagtagctgggtggtcacgccttcctgccaccaggccaaggtttgcggattggtgaaatcgagatgcgacccttcatcatcccagaagctggaacgctccggagcgtcagtttgcgaatcgcgaatgaagagaccgcgctccgccacctcgccgtagcgcgggtgatcctgcagcaggcacggtttgatattggcggccagcttcagcccggcatcgtgaaacgactggctcatcactttgggctgcggcaccttgtcgtagttccagttaaagacgtagcgcttgccgttgattgaggtatagccggaagagagctggaacgaatcgcaggggatcgcgtgctgctcgcacaggcggataaagttcatcagctgattttgcgcatccggcgcgtcggtatagtgcatggtggagccgctgtagccgaggctccatttgggtccaaacagcgttttaccggtcaggcgaacgaaggctttggtcacatccagcacctgcttaccggtaaacaggtaataatcgatgtcgccggcttccgcctgccagcggcgataggcggtgtggtagttgtcgatctcgttccccagatccagccagcagctgctcaggttgtcatagaacaggccgtagctgatatcgctgcgctgggtgatggtgaacggaatatgtttatacagcgggtcagtgctgacggcgttgtagcccatggcatcgaggttacgcatctcatagcgtttaccggtgcgctgcaggtcgccggccttttcgcccaggccgtagaaacgctcatctttgcggcggctcagataatgggcgacgccgtcgccgtgggcattcgccaggtaggcgctggtcggacggtcattggcaagcggctgccattcgccggcctcgtcgcgatagctccactccagccacagcggctggtgaacggtgacgcgcagctggcgggtggcgatagtcagcgtatcgccctcctgggccagctgccaggccgggagactaaaaccgctgaggtcatcccgggcgcggccttcccacggcacatcctgctgcggagcgatgctccaggtgcgatccagcgccagctggccctggcgttttagcaggacgcggaacaaattctcttccagtacatacaggcacagggtgtgctggccatcgaccgtcagttcaacgtgatgctccagctgttgattcaaactccagtgtttcagcgtcttcatatcttacatccactctcaggcgcgcttggcgcgacgttcagcaataaatgccaccaggaaaacggcgccaatcaggtcaaagaaacccatggcgataaatagcgggttgaagccgattttgtcggcggtcaccccgattaataacgagaacaagaagctggcgatccacgctgcggagccgcgcataccgttgaccgtcgccatttgtcccttgtcgaaagactccaccaccagcgcgctgagcatgcaggagatgatctgatggccgaagccgccaatggagatcaggatgatggtgatatagggatcgcgggtgatggcgacgagggccagggagagcatcaggaacgcgccggttaccgagctggcgatcaccgagttcactcgcgtacagccgaaccagcgaacatacaggcgggtgaggtagccgctgaccacgctgccgagatcggcggcgagaaacggcagccaggcaaacatggcgatctgcttcaaatccatgccgtgctctttcgccaggtacagcggcacccagaaactcagcaccgcccaggcgggctcggccataaaggcggggatggcgatcccgtagaaacgtttatttttcgagacggttttgagcgcggtaaagaagggctgttttaccggcggggcttcgttatcctgtttgatgtactccagctcgcttttgctgagattggggtgcttttccggggtctgatagaaggcccaccatagtactacccacagtagcgccagcgcgccggtaaacataaacgccccttgccagccgaaggaggcgtgggcgaagtagatgatcggcggggccagcatcgcgccgatggagaacccaacgccagcccagccggcggcaatcgggcggtcagatttcggaaaccattcgccgatggttttggcgtccgccggagtagcggccgcctcggccccacccataaagaagcgcaaaatagccaggtgcagccagctaccggccccggcgtgggcgatacaggccagcgcccacagggtggcgcagatcataaagccaagcttcaggccgatgacgtcgataagccagccgcacagcggctggaaaatcgtgtaagccagctgaaacgcgccgacgatccacgagtattgttcggtagtaatgccgagggtcgctttcagttccggcgcgataattcccagcgagttgcgtgtgatgtagttgacggtaacgccaagtaaaaacaggaccagcacccaccagcgcaggtttttcactacccggcgcgttttgctgacggcgatatcattgttgaggccttgactcatagcacactccacaagacgtttgtagggggaaagtgacggtctcactccctgagtggtcacgtagatttattaactatttgaatagtctatttttaatctcaacatcattggtataactagtatgggagatgttggaccaattcaggctagggcagaaaaatcgtctggcaaagcgctatttatgcaagttttttcatgaaatgagcgagatcgcatatttgacagcggaatttgcttgtaacgtgtgctttggcgattatgaaaattctttcatttttcaatcggagctggatcacaaaatggataaaaagctgcgcgtcgccgaaattgccgcccgcaccgggctatcgcccagcaccgtttcacgcgtcctggccgggaaagcgaataccagcgacaaggcgcgccgggcggtgctggactgcgcccgcgagctgggtgtcatgcaggggttggccgccgggcgtctgctgctcaatcatctgctggtgtttgccccgcagcgcgcattcgatgagcgatcggatatcttctactaccgggtgatccagagtatcaataacgcgctggcggcgcatgaagtgcgcctgcgctactgcgcgctggatgagaacgacagcgacgccaacctgtttcttgcccgcatgaatgaacctgagacccaggccgcggtgctgctggggatcgacgatccgcatattcatggcctggcggcggatctgggcaaaccctgcgtattgatcaactgtcgggatgaagggatgcggctgccgtccatcgctcccgatcatcggctgatcggccagtgcgcggcccgctatctgtttgatatggggcatcgggcggtgatgaacgtgatgtgcctgcgccgctataccatggagctgcggctgggggggattcaggaggcgtggcgcgcgcgtaatctgcgctttaccgccagccgggatcttatcagcgtcgccaactttagcgccagagagacggaagagcaggtgggcgcctggcttgacggcttacagggcaggccgttgcccaccgccttcctggtgggcggcgattttatggccgccggcaccgtcagcgcattgcaaaagcgtggcctgcgggtgccgcaggatgtctcggtgatgagcattgacggatttaatctggcggcgattcaggaggtgccgctgaccgcggtgcatgtgccgcgggatgagctgggcagcgaggcggtgcatctcctgcagcagcgcctgctgcgcccggaggcgccgcacggctcgctactgctgcatggcacgctggtggtacgcgattcggtacggcggatccggccgggcaaaggccataccgccgtcgagccgcaggggctgtatgacgattagaccggcatacccagcgcccgtttgccgtggatattcagatcctccagggtgaagcgcccctgccagctggcttcatagtcctcgcgcgggaaatcccccggcgaggcgcctttttccagggcgattttcactttctgcgcgtaggcgaggttcttctcgcacatcggcgcggccggaatgtacatcacatttccccagccctgctgattttccaccggcgccaccgagtgaatgatgtcgcagtgccaccagacggagtccccggcattcagcgctggaatcgagcttaacgctttaattaagagcgggtgccactgctcagagatcggcagcactctgcccggcgcgacgccgcacagctcatcttccggcacatcgtcgagcagggggcgcagcagcacataagccatcgcctccgggatcggcaccacgtgcagcagcccctgacccgggatcatgtccgacagcgcggtccagccctggaaggtgcggaacaccgagcatttggtggtgttgtcgacggtatactcttccacttcggtacggtgcgcggcgtcccacgggtcgtaggcgtcgatattgccattaaaaacgttggcgaaaacctgctgataggcgggaagcagccagcgctccagcgcgccggaatcggtatgcgcccccagccccttcgaagtggttcccggcgggcggcggcggatgcggtcgggatagatcacgctgacgtccggatcgaaccagcgtttgccattctgttcaaaacgccacaggcggttgaggaaagattgcactgccgccatttcatcgctctgccgcgcctgcatttgcgagggcgaccagtagatcgggtagatctccgggcgcgaagcctccagcgaaccgaagaagctgtcgccaggccctttgtaaacatcgtcgaaatggttgcgatccagatattccagcatcgcggtatcccacgccagcgcctgttcgcgtgggaagtggcctttaatcaccgcgcagccccggcgcttaatggccgcgcgctgctcatcgctcactgttccttcggcgatatcgcggaacggaatggttggccagacctcctggcctgcggctttcagtgtctcaatcacctgcagccgctcgctgatgcgcgctgagagcttatcgaacaccgcctggacgtcgccaatttgcgcccgcagggcctgtttcatctggcgaatcgccgctttgtgatcggcgggaagtgtttcgtgggtcgggagagcagccataataacctcgctgtatctttcattcgaaagtataaaatcttacaaacgttaatttaagttaaaatggagttaatgcaagtttaaaatcttgctgcggcgcacaaaatggaaaaccggggcgcgatgccccggcgaagggtcaggcgttgaagggcggggtgttatcgaggacggcctggataacgttcagcgcgccgtcatggttattatcgtcggtagtgtagccggcgatggccttgatgctgtcggcagcgttacccatggcgaaagcgtatttcaccagcttcagcatttcggcgtcattgccgctgtcgccgatggcgacgcattgctgcggcgaaagatcccagcgcttgagcaaacggctgatgccgttggctttatgcaggccagggataatcaaatcgacaaagccaaagccgctggtgaccggcttcatgatgccgtcgagcgacacgtgcagtttattaatcagctgtgggatctcgctgtccggcaggttgagagagaatttaaacagcgtatcgtcgatggcgtgatagtcgctcacccgctgtaggcgatggtagtgcttcgacatcagctcaacaaaggcgtccggagctttatcgctgacgtaggcgctctgcaggccgcaggcgacaaagttgagctgcggatctttgagcaattcgccaatcaccacttgtgattcgtggcgggtcagttcgccgtggaacagctgcttgccatgttcataaaccagagcgccgttttctgcgacgaacgaaatctgctcgcggatctccgggaagaaggagatcaactgatagtactggttgccgctggcgacaacaaattcaatgccgcgctgctgcaactgggcgaattgcgccagaaaccgtgagcgatcgtaggttttggcgtcattgagaaaagttccgtccatatcggtgacgataactttaacggtcataaggggatgctcctggcttaacttcgaccagtaacattctaattacaatgtgatggagagcacaaatttatttcgaatgaaagttcaggcattcagaaaatgccggaagggcatgtcttttccggcctgcagaacagggttggcccgctaagcatagcgccagcgggcacgaaggattacagcgtatgttcggtacgggcgatgatatcgtcctgggtatccggcgacagggcggtgaagaacgccgagtatccagcgacgcggaccactaaatcgcggtactggtcaggatgtttcttggcttccagcagcgtgtcgcgcgacacgatgttgtactggatatgccagcctttgtgcacctcgaagaaagtgcgcagcagcaccatcagcttctgcttatcggactcgttctccagcgttgacggattcagcttctgattaagcagcacgccgccgaggatcgccccggtcggcagcttgcccaccgaactgataaccgccgtcggccccagatggtcggtaccggaggccgggctggccccctccgccagcggggtatgcgctttacggccatccggcgttgccatggtctgcgcgccgaacgggacgttagcggaaatagaggaggtgccagcgtaataattgccgccaatcgggccgcggccatagcgcgggttgtgatactgcttcagctcgtcgatataggtctggtaggcccgcgccagcagttggtcgacgctgtcatcatcgttaccatacttcggcgcgccgttgatcaaccgctggcgcagctgctcgtgggtcagaccgtcgaaatcttccgccagcgccttcgccagctcctgctggccgatggcgccctgatcgaagaccagttttttcaccgccgcgaggctgttgccgaggttggcgatacccacctgcaggccggaaacccagtcatacttcgcgccgccctgcttaatgcttttcgcccgttcgatgcagtcatcgaccagcgccgagcagagaatatcgtggacgttctcttccagcatggtatcgaccacgtactcaatctcgatggatttacgggtgtagtaacgaatctggcggtcccagtcggctagcacctgatcgaagttagcgaagttgcctttcgacagggcgtgctcctgcggcaggaacacctgaccgctggtggcatcgcggccgccttccagcgtcgccagcatcacccgcgcgaagttaataaagctcatgccggtgcagcggtagccccacttaccgccgaccgcggtttcgatacagccgatagccgcgtaatcgtaggcgtcctgcggctcaatgcccagcttaatgaattccgggatgacgatttcatcgttgttaaacgccggcatgccgaaaccgcagcggatcacctggacgcaggcgtcgaggaagtcgttgctcatcccggcgtggtagcgcacgctgaggttcggctgggtagaacgcaggcgaccgcaggattccaggatcgcatacgacagcgggttgaccgcgtcctgcggcttaccatccaccagattctggccgccgatggtgacgttctggtatagcgggctgccggcagaggctttggagtgtgagccggaacggatcttattgacctccagcagcttcagccagcagctgtgcagcagctcaatggcctgttcgcgatccagcgactgttgcaactcaacgtcgcggcggtagtacgggtagaggtactggtccatacggccgaaggataccgaatggccattggattcaatctgcaggataagctgaatgaagtagcacagctgcagcgcctgccagaaggttttcggcggctcatgggcgatgacgtcgcagttttcggcaatcgtcagcagttcgtggcggcgtgattcgcgggattctgctgtcgccatctcgcgcgccagcgcggcgaagcgtttgctgtgatcgctgaccgcttccagcacgatatcaatcgctttcaggaactgctcgccgtgcaggtcttccagtaccgtcaaattgatacgcgagcggcgttcggcgactttcgcacgcatcccgtcgaggcctttctccagcagcaaggggtagttgaccgcgaggtgagcatccccggaggtcatattgccttccgccttaataatgccggtggcgagcagcgccttttgctcatcggtgaacataccgtagcagcggtcttgtacggtctggccgcgccaccatgggcacacttcatgcaatacgcgtttattctcctcgctgaccgagaagccggcgccggggcggtcggcgagatcgtcgatctctttctcaatccagctgacggtgtattccgggaaaataggcgcggcgcgcacttcgctggcctggttaccgacgatcagctcatcgtgcttgatccagatggtgcgctccgccaggtggtgagccagcgccagcgcgcggcgcaccgggatcggtttatcgagatgctgctgatacatctccgtatagtgacgggcgcgctcggtacagaccggcggcttgacgatatgcaccagcgccattttatgggcctggatacgggcgctgagggtgttgagcttcagggttgtcatagggttatcctcgtaatatcgccgttagccccttgctccgcgcataatcttgcgcgaaggcgagcagctcaggagcgtccagcggtttgtccggtgcggtgtagggctgactgagtaactggtatttgttcattcccagcgtgtggtacggcaggtaatggatctcgctgacctgcaggcgatcggcggcaaaatcggtgatcgcggcaatgtcggcttcgctggcgttgaatccctggatcaacggcacgcgaataatcatttttttccccgcctgcgccagacgctgcaggttatccagcacccggcgggcgctgccgtcggtccactgctgaaaaacggcctcgtcaacgtgcttcagatcggcgagaaacaggtcgacaaagggtaaagacggttcaatgtatttccacggcacgtgcaggcaggtttccacggcggtgtgaatgcctgcctgatgactggcttcgaacagcgcttgcgccagcgttgggttcataaagggttcgccgccggaaagagtgatgccgccgccgctgcgatcgtagaatggtttatcacgcagcaccgtcgccatgatctcctcgacgctcttctcctcgccgcacaccgtgagtgcggtggtggggcagcagtcgcgcagcgcggcgatatggctgtcgttaacgttttgccggtgaatgatcaggccatcgagggtgcgggtgataaccgccggcgccgcctgctggcacagctcgcagccgggcaggcacagccgcgagtcatacagcagatcttcgctacgggcgcggctctccgggttctggcaccagcggcagcccagcgagcagcctttcaggaagacgacggtgcggatccctgggccgtcatgggtggaatagcgctggatgttgaagatcatggcttatcctcttgtttgcgtatgaatataaaaacactttcgaatgaaagttatgttgacgcaaatcaacaagcgggatggggataagtcagagaggagaaaataacgagagcggtcacaaaaccaccggcgactctcgtcgccggtgtgggggtcagtgcgagccgcatacctcgcactgcgggtgacgcatcagcctcatttcgcgaaactggcaggtcatggcatcgtagatgacgatttttccgctggcaggggtgccgtagccgctcagcagcttaatcgcctccatcgcctgcagcgaaccgatgatgcctaccagcggggccattaccccggcttcgacgcaggtgagggcattttcgccgaacagacggctcaggcagcggtagcagggttcgccatcctgataggtaaagacgctgatttgcccctccatacggatcgccgctccggagaccagtggggttttgtgctgaaagcagccgacgttaagctggttgcgaatggcgacgttgtcggtgcagtcgagcaccagatcgtgatcggcaatctgcgccgccagcgccgcctcatccagcaaggcattgagcgggaccagacggacgtgcgggttaatgcgcgccagcgcctcgcgggcggaatccaccttcggctggccgagggtggcgtcgctgtgcagcgtctggcgctgcaggttggagagcgagacagtgtcgaaatcgagcagggtgagctgcccgaccccggcggcggccagatactgcgcggcggcgcagccgagcccgccgaggccgaccaccagcacgcgagcggcttttaaccgctcctggccgtcaaaatcaaaaccgcgcaagacgatctgccggttatagcgcagcatctcttcatcgctcagctcaacggtcattacagccccccaaacaggtgactgaagggttcgacctcgacccattcacctgcttcaacatggccgcgctcacgctccagcacgataaagcagttgccgaggctgaaggagctgaaaatgtgcgagccctgatggccggtggtgttcaccaccagttcgccgtccgggttgcgctgcagaataccgcgctgaaaatcgaggcggccaggcgactttttcaggcgcgtggcggcgcggacccgcaggcggggcgcctgaagcgggccgtgcttgcccgagagtttcgccagcaggggttgcaccagctgacagaaggtgacggtggcggacaccgggttacccggcaggccgcagaaccagctgctgctgagcttgccgaaggcgaagggtttccccggcttaatcgccagcttccagaagccgatctcccccagctcttcgaggatagttttggtgtaatcggcttcacccactgagacgccgccggagctaatgaccacatcggcctgctggtcggcggcgataaaagcgtcacgcagcttggccgggtcgtcaggaataatgccgaggttaatgacctcgtagcccaactgctgcagcatcaggtgcactgccaggcggttggtatcgtaaatctggccgtcgccgagcggttgacccggcagctgcagctcatcgccggttgagaagaccgcgacgcgtaccttgcgcaccacctcgacctcggccatgccgaacgaagccagcaccggcccacccgccaccgccaggggtggccacacacggacgcgcaacgagccctgagcgagaccgcccccccggcggcgcgcatccggcccgggctttaccgccccc

SEQ ID NO: 148 - DNA, 69445 bp, Unknown
  source: /note="Description of Unknown: MKP2_2161_1 Mutant Bacteria sequence"
ttcgcgctgtctgtgtgatctcctcgtggtctctcgtcggcatcttcgggtttttttagggtgctgtttttcgactttgcgacgtgttgttcgcctttccggggatcctgctggcgatcgcggtggtcgccgtcatgggcagcgggatggccaacgtgatcatcgccgtggcgatcttctcgatcccggcgtttgctcgtctggtgcgcggcaatacgctggttctgaagcagcagacctttattgaatcggcgcgcagcatcggcgccagcgacgccaccattctgttcaaccatatcctgccggggacggtgtcatcgatcgtggtttatttcaccatgcgcattggggtatcgattatttcggcggccagtctgtcgtttctcggcctcggcgcgcagccgcccaccccggagtggggcgcgatgctcaacgaagcgcgggcggatatggtgatgtctccgcacgtggcgctctttccggcggtggcgattttcgtgaccgtgctggcgtttaatctgctgggagatggcctgcgcgatgcgctggatccgaagttaaaggggtagggtgagggaaagctccgccgggagtcctttatgttatctgcggcttcagcgcacattgcgcttccggttaattttctgcgttatgtctctcatggcgcagggagcgcacagggggcggccagtcgccgccgccccctgtacccccgggctccggccagcaacatcgccactgcgtggtgccttcgacttatccctgcaggcttcgggtcgggccgaggcagcgtccgtgcaaaacacggccctcagcccgcatccatgcggcctgccccggcctttcgggaacgtctcagcgatgttgaggccgccagcatcggctgtttcagcggccccatgtccggcggcgattcacatattgggactggaccccgtaggccgggtaagcgtagcgccacccggcaaaataaccgcgcaacagggctgcctggaaggtaatcaatgcttgcccgcggcgctgcgcttgcgcggacccgggggtgagcctacgggaggaccccgtaggccgtggaatgcgctaagccgctatccgggaagctggactagacccgggtaccccacaggtcgtattcgtcggcgtgctcgactttcacccgcaccacgtcgcccggcttaacgcgggtttcgccgttcaggtacaccgcgccgtcgatttccggagcgtcggccatgctgcggccaatggcgccttcttcatcaacttcatctaccagcaccaggatttcgcgccccactttctcctgcagacgctcggcagagatctgctgctgcagctgcataaagcggttccagcgctcttctttcacctcttccggcacctggtccgccagctcgttggcggtagcgccttcaaccgggctgtacttgaagcagccgacgcggtcgagacgcgcctctttcaggaagtcgagcagcatctggaaatcttcttccgtttcgcccgggaagcccacaataaaagtggagcgcagggtcagatccgggcaaatttcacgccactgcttaatgcgcgccagctgacggtccgcagaacctggacgcttcatcagcttcagaatacgcgggctggcgtgctgcagcggaatatcgaggtacggcagaatcttgccttccgccatcagcgggatcacatcgtcaacgtgcgggtacggatagacatagtgcaggcgcacccagatgccgagcttcgccagctcttcgcacagactgaccatgctggtcttcaccggcataccgttgtggaagccggtgcggtgcttgacgtcgacgccgtaggcagaggtgtcctgcgaaatcaccagcagctctttcacgccggcgtcagcgaggcgtttggcttcggccagcacttcgccaatcggacggctcaccagatcgccacgcatggacgggatgatgcagaaggtgcagcgatggttgcagccttcagaaatttttaagtaggcgtagtggcgcggcgtgagcttaaccccctgttccggcaccaggctcaggaacgggttgtgcttcggcttcggcgtataatgatggacatgctccagcacctgctcatagctgtgcggaccggtgatctccagcaccttcggatgcacttcgcggatctgatcctctttcgcgccgagacagccggtgacgattaccttgccgttctctttcaacgcttcgccgatcgcttccagcgattcctgcacagcgctatcaataaagccgcaggtgttaacgatcaccatatcggcgttgtcgtaggtcggtacgacgtcataaccttcggtgcgcagttcggtcaggatacgctctgagtccacgaggtttttcgggcagcccagggagacgaagccgattttcggctgatgcgtgacattgctcatagcttaaaaagtgttcaattattggaatggtcagggcaggaattctacagatctttgcgaaaaagagtatagctccgtcgcggttaatggtgaaaaagcgcccccgacctgtcttttacgccccccaccgccagagcggatcccacacgccccggagcagaggggcgggacacgcttctgacaagccgtgcgcgcaggcggctcaagcccggcgtggctgccgggcagagacttattgcgccgggttaatggctgcggagggcgtggcgccggtttttttcggctcgcgcttatcctgcagcgtgaaaatagagatcagggtaaagagcccggcgacgctgccgagaatcagataggtgttggcgaagccaatggtatcgtacagatagcctgccagcggagagtaaatagcggtggcgatcgaggcgacgaacagcaccagcaaatagaccgtcgaagagagcttgtggtcgaagttggcggcgatgaatttaaagaccgataccagaatcaacggcttctccagagcatgcatcattttcaccgcaccaatccacaccgggccgaggggcacggctgagccgacaatacgtaccgacatgatcagcccggcgatgatcagcgcccatttggcgccggtccggttaacaaaccatggcatcaggcagaggaacagggtttcaccgcagacctgaatagacgcgaggatcccgtaccagcggttgccttcctccggcgtcgggaactgtagcgagaagtactgggcaaactgctgatcgtaggtgtcgtaaatctgcgtgacgaacagggtaaagagcagcagcatccagaactgaccattcttcgccagctcaagggcatgagagaccttcagcgattcgcttcgcgccacatcggcgtcggttaattcaattttggttagcataaagcagatggcggcgatgacaatggcgaggctggcgagccagaaggccagattaggattgctgtctatatatttacccacaatccaggccgccgctgcccagcctaacgagccccacatccgcacacgaccatattcgaactgatagcgccgggaaatcttatcgatataagagtcgattactccgcagccggagttaaagatgatccccagatagatccctcccagcaaggcgccaaaccaaaagttgtgcaccagcagcggcgcgtaaacgtagataaagaaggggcccaccggcaggagcagggcgaccagcagccagataagccgttttttcaggccgaacttgtcagagataaagccgaagaaaggctgcatcagcagggcgataaaggcgttgaccgagtaaagcagcccggtcttcgtggcgctgatgccaagatgctgggtggtccagataacgaagaaagccatggtcgacgaccaggcgaacaggtagaggaaatcgaaaagactcaacagaaggtagtttcttttaccggacgtcatgtttcagttccttgcaaatgggcagagagaatttcagcgatccgcgggccgcgttcgctgttttcctgacatgttatacgtattacattaattatttgttatgacatcctaattgacgatggtgcaacaggtcatatgaggtattgtgatcatcgctgcactaattttgtcttttattgccattttctgtttattaatttcatattgaaattaattgtgatcgtataacattatttttgttatacaccctacaatgcgttaaagttgccacattgtaaatgatgttaaagaactggggattattgacctggcgcatcattttgcacaaaaaataaccgtattatggaaagggtaaaggacgacagaggaggaaccgtgatgaccgttgacagactataccgccaccttctgcagaagcttattaacgccaatatcgatattgacgcctatctgcaactgcgaaaggccaaaggctacatgtcagtcagcgaaaatgaccatctgcgtgataacttgtttgagctttgccgtgaaatgcgtgcgcaggcgccgcgcctgcagaatgccatttcaccggaggagagggatgtccttcgcctggccggcgaatcggtcgccgccgctgcactatgcctgatgagcgggcatcatgattgtccgctatacatcgctgttaacgtagagaagctagaacgctgtctgacaggattgacctcaaatattcataaattgaataaattggcgccaatcactcatgcctgatcggctgaaacccaggggaagtgaacgcttcccctgttaaaggttatgtaaaaatcgccgcgcaaatttccccgctggctaccctttagcccagagctgacgaaaggagaatgccatgcgtccgatcccactgctgttgatattgagcgccttagcgctaccagccctgagccaggccgcggtgcgggtggaggtattgcaaaaccggctggcccagccgtggggcatggcctttctgcctgacgatcagggcatactgatcaccctgcgcggcggcgagctcaagcgctggcagccgggtaaaggtctgtcggcgccgatagccggcgtgccgcaggtatgggccaacggccagggtggcctactggacgtggcgctggccccggatttcgcccagtcgcggcgggtgtggctgagctatgcggaaagcgacgccagcggtaaggcgggcaccgcggtgggctatgggcggttgagcgaggatgccacgcagctgacgaactttaccgtggtctttcgccagcagccgaagctctccgtcggcaatcattttggcggcaggctggtgttcgacggcaaaggatatttgtttatcgggctgggcgaaaataatcagcgcgccaccgcccaggatctcagcaagctgcaggggaaagtggtccgcctgacggagaccggaggtgtaccgccggataacccttttgtcggccgggctgacgccaggccggagatctgggcttacggcatccgtaatccgcagggcatggcgatgaatccctggagcgaggcgctgtggctgaacgagcatggcccgcgcggcggagatgaaattaatattccgcaggcggggaaaaattacggctggccgctggcgacgcacggtattaactacagcggcctgcccattccggaagcaaaaggcaaaacggttccggggaccgaacctcccctgtatgtctggccggtctctcccggggtgagcgggatggccttttattcggcgccgacctttccccagtggcagcataagctgtttatcggcgcgctgaaggagacatcgctgattgtcctggcggtggacggtaatcaggtccgcgaggaggggagattactggaggcgcgcggaaaacgcatccgcgatgttcgcgtgggacccgacggctatctgtacgttttaaccgacgagtctaacggcgagctattgcggttgagtcccgaggcttagcctcaggtcaccgggatctgcactacttcgcgccaggcaggacgttggctaatctgctgataccagcgctgcagatggggccgcggttgccagctgtcgtggatcgacaacagattgtagacgaagggagcgacggcaatatcgccaaggccgaactgctcgccggagagccacggcgttttggccagttcgtcatccagcatggcgaacagcgcttcgcaggcgctgatccccgcggcgatggccgccgggtcgcgctgctccggcggcgttctcaccaggcccattaataccgggcgatgggcgggagagagggtgccgttggaccaatccatccacttttccccttgcgcgcgctgcgccggcgcggcaagccacagacggtcaacgccatactgggccgccaggtagcgaataatcgtatttgattcccacactaccaccccggtggcatcgtcctttaacagcggcaccagcccgttcgggttcatcgccagatattccgggtcatgattgagaccaaactccagcccggcgaggatctgctgataaggcagatccagctcctccagcacccagcgtactttcttcacgttggtcgagttattacgtccccacagtgtaatcattttcgctcctgagtttgtttcactgccgttgcagcgcgatcggcgatcatgttgggataaagttaaaaatccggcaagcttttttatttggctgttattaaaggtttttatgcttactcccttcagccaggggcactcctgggttacagggcccggaaagtgtttttactattttacaggagtaatatctatagggtgttacgctacgaaggaaagggcgtgaatatggtgtatcttattgataattaaagctttaaatcatgcatgcatctataaaaacgctccctctccgtctcggttaaaatctcaatgtcgcctgagggtataatttgatgctgattattgcatcgcaatcatctgaggaacacaggttaatattaataaatagaaagtcagtgaaagaattatatttttacagggatgaactgttgtttttatcgatcggatatacatctttttcatcccacccagaaaaaatagaccatgagaggcgccgactggctggaagatattctgaaaaatagcaaaaaaaacccagtgactggcactggggagtaaatttactcagggttgcatgctgttctcaagataatattcgagtctcgaagtatgggttaaccaaaggtaaccatcaacttccatacagactacatgggaaatatactgtattaaataaccaggaatccacccttacttttgtgctatttatcttacctgggtaattacggcgggggtaagtggtatataatgcaataatcagtatttgaatctatagcgttaaacgagcagagcctggtagaggactttactttccccggaaggatttgaaaaaggcggttaaaatgaatgactgataaggatggccagcatactatcgcggtgctatcaaaacatccctgcaaaacgaaatagggataaaagaagcactggcgaactgcagtctggaagagcgagtcgtagagctcgatatggcatcggacgagaagggtaggagattacccgggaagagatgttaaccttttcatcaaaccggcgtgattaataacgggcaacagaatcagagcggcccggggttttgagagcaatacttctgtaaaggccacggctgtggatgcgctgttatgaatgtatttgtaaaatttatcaccatccagagtcgccttgaaaaaaaaagcccagcgacaggctggggtgtaattacacgcataaagggatatgccattttcaacacaatatgcgaatcttaatttatggaataactgcgggtgagctacccgcttccataaagattgcaggggaaactatactgtatttaatgaccaggaatccatccttatcgatgtgctatttttcttacttgtgtaatacggaaagggaaaatagcccgataaactatcttttaccgatatgccgactaaaacaggaaagccgtctgcctgcttatccagtgggcgaataattcatatcattagcgggaggctctcccttcctgacctcaattcctgatggtggcgtatagaggggatagctgattgatatcctttatcaaggagattgcgcctccatcggcggaatgctatggcaatcgaagccctgctgaacatggcgatcaggcaggcccgatggagagaaaagtgcgggcgttgttgctaatttcctgagacgggcgtaatgaccgtctcaagcatagcccgggagttctcaactgcatttcaggcgtaaatacggcctacagaaccttcaggtttatatttaagcgtctgagacttctacagcagcaagccagatgtggttattgtgagttcggaagttgaactgggcctcatggaatgcaaccgggccgacattttgagttttgtgaagggtatcagcagtaacaaccatccccggttctcaggtgaagggggtaggggcgacgcgactggatatcactggccaggctttcgcttaccccacacggccccgccataatgtgaatctatgaccaggcaaaccacaatgaaagacacgcttgcgacgtctctttagtagcattttccccgaagagaagtgagctatgtcattgaaatttcggtgactaattggttttgaaaggcgatttttttcttgccataataaagttaacattaaggcgattacgatcaaaaaaattgttctgattaaagcacagcggcatgttattgcgtaaactttaaaaactttaccaactcgctgtttctttaaggtcatttgtacgctttactcaccggttgctgcggcgcggtcagagtggcgcggcatattttgtttggaaaggatacttgggtggctcttatgatgcatgacgctttttcccttcgcggcctcgcggcaggttgcgcgctgttatttcttgtcgcacctgcggtgcaggctgcggaacaactccccgacgccccttcaattgacgctcgcgcctggatcctgatggactatgccagcgggaaggtgctcagcgaaggcaatgccgatgaaaaactcgacccggccagtctgacgaagatcatgaccagctacgtggtagggcaggcaataaaagcgggaaaaatcaaactgaccgatatggtgaccgttgggcgcgatgcctgggcgaccggcaacccggcgctgcgcggctcatcggtgatgttcctcaagcctggcatgcaggtttccgtagaagatctgaacaaaggggtcatcattcagtccggtaacgacgccagcattgcgattgctgactacgtagcgggcagccaggacgctttcgttagcctgatgaacggctacgccaaaaaaatggggctgaccaacaccacctttatgaccgtccacggccttgacgcgccggggcagttcagcaccgcccgcgatatggcgctgctgaccaaagcgatgatccacgacgtaccggaagagtatgcggtacataaagagaaagagttcactttcaataaaattcgccagccgaaccgcaaccgcctgctgtggagcagcaacctcaacgccgatggcgtgaaaaccgggaccaccgccggggccggctataacctcgtctcctcggccactcagggtgatatgcgtttgatcgccgtggtgctggggaccaaaaccgaccgcattcgctttaacgagtcagaaaaactgctgacctggggcttccgcttctttgaaaccgtgacgccgattaaaccagatgccaccttcgttacccagcgcgtgtggtttggcgatagcaatgaagcgaaactgggggctggcgaggcgggctctatcactttgccgaagggccagctgaaaaacctgaaagccagctataccttaaatcagccgcagcttaccgcgccgctggagaaggggcaggtggtcgggactatcgactttaagctaaatgataaaaccattgaacagcgtccgctgattgtcatggagtcggtaaaagagggcggcttcttcagccggatgatcgacttcgtgctgatgaaactgcacggctggttcggcagctggttctcctgatgcctgcccgcgccctgcggggcgcgggcagcgacgcttcaatacagtagggaaatctgctgcgccttcgccagcgcgaccagctcatcatccgggcagatatcgctggcaatcacgtcaaatttcgctaacgcccccatgcgcgccggacgcactttgccaaacttgctgtggtcgaccaccagcacgtgatagcgcgcgtgacgcatcgcccagtgcttaaccggcagctcttccaggttatagcaggtcgccccctgctcgcagtcgatccccgccgccgagtaaaaggcgatatcagggctcagatggctgagggtatcctcaaggctcagcggcataaaaatcgcgttgctggcatgaaactccccaccgcacaggaccgcgcggcactggggtttttcctgcagggccagaaaggtgttcagggagtagcagacgccggtgaagggcagggcatcgtcaatggcgtcaataatccacggcgtggtggtcccgcagtcgaagaaggccatctgatgggcctccagcagcgcggccgcatggcgagcggcacggcgtttttcctcaaccagccgggttttttgatcgctgagcaggtaatgggtggcgctgcgcggctccagcacaatgtatccgccgagcagcacaaccgggccgctgtggccattgaggtcgcgacgaatggtcatttccgacaccccaagcagggaagcggcttctttcagatgcagcttatcgctgcgtttaagtgcctgaatgagctgactgatacgttcgtcacggcgagtttccatattccctctgcgctaaaatcgccctgcgggggcagggcgttagcgggattttacctgtcgcttgcgggttagtcacgcggtggccgcagcgacggcggcgtttagccgcgcacccaacctttgcggattggcaaggagaagcagagacgatacagccgctgcagctgatggtatagcgccgggccgaacgtatgccagatcagcgccgcgccaaggcagccgcacatcccggccagcagcccgccgaccatatccagcggccagtgcacgccgagatagacacgggaccaggcgatggcggcggcaatggccatcagcagggcgccggaccacaggcgatgccagaacaggaaggccagggcaaaggtaaagctgacggtgccatggtcgctggggaaggagtcgtccgccgcgtggtgcaggaagttatagcctacgccggcgacaaacggccgatcgtgcggataaagatggccgatcgtccacgacacggtcaggctgatcgtcagcgccagcatcagcttaaacaccatctgccgctgggcaggcccccacagccacaatgtcaccaccagcagaggtacgatcagaatcagatctttagcgatgaagatcgccatctcaatggcccactgcggcgaggcaggcgtcgcgttgagcagggcgaacagcgcatagttaatattttccagcatagacttccaggctcgttggtccgatagcaattaagccgcctaccctaaataaaagcggtgcggagataaaggcggcattgtcttaaagatcaggttgttatgaaatccactaccataaagtctacggctaacagcctgaaaaacgtcagtatatcgtttgtcacattgctgaaacataaacggaatatatacacaggctgaataacaggggagaggcaggacgatggcgcacggctcgtaatattgtgcggtgtcacccacaattcactatctccgcgccgggagtttcattacactttgcgcgatttttgatagataagagatttcatgcaaaattattcgctttcaggccgccgcctcggaaggcaggcgctgttgttcccgttatgtctggtgctgtacgagttttccacttatatcggcaacgatatgattcagccgggcatgttagccgtggtgcaggaatttcaggtgggcaacgaatgggtacctacctcaatgactgcctatctggcaggcggcatgtttttacagtggctgctggggccgctgtcggatcgtattggccgccgtccggtgatgttgaccggcgtagtatggttcatcgtcacctgcctggcgacgctgctggcgcagaccattgagcagtttaccctgctgcgcttcctgcaggggatcagcctgtgctttattggcgcggtgggctatgcggcgatacaggagtcctttgaggaggcggtgtgtatcaaaatcaccgccctgatggctaacgtggcgctgattgccccgctgctggggccgctggtgggcgccgcctgggtgcatgtcctgccgtgggagatgatgtttgtcctgttcgccgtgctggcggccatctcgttcttcggcctgcagcgggcgatgccggagaccgcgacgcggctgggcgaaaagctgtcggtgaaagagctgggccgcgactatcggctggtgctgaagaacctgcgcttcgtcgccggcgcgctggccaccggctttgtcagcctgccgctgctggcgtggattgcccagtcgccggtgattattatcagcggcgaacaggccaccagctatgagtacggcatgctgcaggtgccgattttcggggcgctgattgccggcaacctggtgctggcgcgcctgactgcgcgccggaccgtgcgctcgctgattatcatgggcggttggccgatcatgtttggcctgatcctctctgcggcggcgaccgtggtctcttcccacgcttatctgtggatgacggccggtctgagcttctacgccttcgggattggcctcgcgaacgccggcctggtgcgtttaaccctgttcgccagcgagatgagtaaaggcacggtctcggcggcgatgggaatgctgcagatgctgatcttcaccgtcggcatcgagctcagcaaacatgcttacgagctgggcggcaacgggctgttcagcctgtttaacctgctgggtggggtactatggctggggctgatgatttactttctgaaagataaaagcgtcggcaattcgcagcaggggtagttgttttcaacccggatgcgctcgcatccgggtcttatcaggcgaacggcgcttcgcgatccaacaccttatcaataatctgcaggacaccttcttcgttgttatgcggcgcctgatagcgggcgacggctttgacgtcttcccgggcgttggccatggcaaagccaaacccggcgtgctgcagcatttcgatatcgttgccgctgtcgccgaacgccaccacctcgtgatcctcaatgccccagcgctgctgcaaaatgcgcagcccgttggctttgtgcacacccgggataattaagtcgatgctgccgtagccggtggccaccgcggtgaccatgtcccccagcgtcgcgtgcagcttcggctgaatttccgggatcaggctgtctggcacgttgagaccaaatttgaggatggtgtcatcgagatggttaaaatcatccaccagttctaggcggtgataatacttcgccgccaccgtcttcagcgcgtcgttgtagcgattgagggtgtaggcgctgcgcttcccgcaggcgatgatttcgatattcggcaacgtctgcagatggtcgaccacggcgttgaagtggtgaaccggcagttggcagttgaagacgtcttcattgccgctcaccacccagccgccgttttccgccacgaaggcgatctgatgggcgatctccgggaaaaaggagatcagctgataatattggttgccgctggcgaccacgaagcgaatattctgttcgcgcattcgctggtactgggcgaggaagcgcggccggttataagttttggcatcgcttaaaaaggtgccgtccatatccaccgcaatcagtttgatgctcattagctgttctccataacgggttcagattgtggcttagccaccgcgcgggcgaccagcgccgccgccatcaccagacccagcaccaccatcatggcgctgcgcaggccgaagtgttcgccgaggaaacccagcagcggcggcccgacgaggaaagcgagatagccggtgatcgccaccacgctgacgcgcttgggcgcgtccggcccggtatcgctggcggcggagatggtcagcgggaagccgagcgaggcgccaatgccccacagcagcaccgagatgcccgccacccaggggttatcgacgaagatgatcaggcctatgccgagggcgcccatcactgcgctgccgcggaccaccgccacccggctgtagcgatcgataaaccagccgccggtaaagcggcccagcgtcatgccgagggtgaaaccggcataaatcagggagccggaggtggggctaaagccgtggccatccaccatcagcagcggcagccagtcgttggccgagccttcggcaaaggccatcgccaggacaatgacgccgatcagcagcagctgcgcgtcgcgccacaccggcagacctttcgcctcaccgtgggcgacttcggcggcatttttaccggtgccgtcgggaatggcgcggatagcaatggcgatgggcaggatagccaccagcgcagccgccaggatgtgcggggcggccggcagaccgaatccggtcactgccatgcccaccccggcgccgaacagggtgccaaagctgtagaagccatgcatcatcggcagcaccgttttattcatctcccgctcgatggccgcgccttcgacgttaatagcgacctctgcggagccgaagctggcgccgaagatagccagaccgaaggcgaacagcggggcggaagtgacccacagcgccaggctgagcaccagcatgccaagcacggcgaaggacatggtggtgcggatgaccttgcgggtaccaaagcgcttcaccagccccgccgagcagagaataccgctcattgaccccaccgacagaccaaacagcaccacgcccatctctgcggtggatagcgccaacagatcgcggatcgccggcgtgcgggtggcccaggaggccattaacaagccggggatgaaaaagaacataaacagcgcccatagccgaagctgcagcgctctgcgcgaggattgcgtcgtcatccgtaaacgccttaaaggagaagagtgaagacaacagtagcaagtaagtgtacatttgtacataaaccggaagaggaaaatcatggcccgtagaccaaacgatccgcagcgccgcgagcgcatcctgcaggcgacgctggataccatcgcggcgcatggcatccatgcggtgacgcaccgtaaaatcgccacctgcgcgaatgtgccgctgggatcgctgacctactatttcagcggcattgaggcgttaattgaggaggcgttcagcctgtttaccgccgagatgtcggcgcagtatcagcaaggcttcgtcggggtaacgaaccgggaacaagcctgcgatgccatcgcggatctgatcttcagcgcccaggtgaccacggcgcgcaatatggagctgatgtaccagctgtacgcgttctgcagcagtcagccggcgctgaaggcggtgatgcagaactggatgcggcgcagccagcagacgttggagcagtggttcgcccccgataccgcccgcggtctcgacgcctttattgaagggatgaccttgcactttgtcaccgaccgcgcgccgctgtcgaaggcggcaatccgcatgatggtcgggcagctggcgggggagagggcgcaggaagaggggcgctgaagcggcgtttcacccggaatggctaaacgcaggcaacaaaaaacccatcaaccttgaaccgaagtggcggggttgatgggctccacaaaatggggacatcaaagaaaagcagtggcattacttatgactgatgccctgagaaaaagttctgcctgtgacggcttttttctcaaaaaattattgtagccctggccagatgatcacgatgagcgtcccggcaagggtaagcagcacgttggcgatggcgtaggtccctgcgtagccgagcgctggaatattgctgcgcgcggtatcgctgatgatctccatcgccggggcgcaggtgcgggctcccatcatggcgccgaacagcatcgcccggttcatgcgcagcacgtaggcgccgaacaggaagcagatcaccaccggcaccaggctgacgataagccctgccgccagcatctggccgccgacggcgcccagcccgttattgatcccggccccggcgctgagaccgaccccggccataaacaccatcagaccaaactctttcaccatgttcagcgccccctgcgggatatagccgaaggttgggtggttggcgcgcaggaagccaagcatgatgccggcgaacagcaggccggcggcgttgccgatgccgaagctgaaggagctgaactggaaggtgatcatgccgatcatcaggccaacgataaagaaggcgcagaaggccagcagatcggtcacctggctgtgaatggagataaagccgatgcggtcggccacggtttttacgcggcgggcgtcgccgctgacctgcagcacgtcgcctttgttcagtacgacgttatcgtcgataggcatctcgatctggctgcgaataacccggtttaagaagcagccgtggtcggtaagcttgagttgcgccaggcggcggccgacggcgttgtggtttttgaccacaatctcttcagtgacgatgcgcatgtcgagcagatcgcggtcgaacacctctttaccgttgcggaagctcgggtcgaggcgggcgtgggcgtccgggtaacccaccagcgcaatatcgtcacccatctgcagcaccgcgtcgccgtccgggttggccagaatgccgttgcgacgaatgcgttcaatatagcagccggtctggcggtaaatacccagttcgcgcagatttttgccatccgcccaggccaccagctccgggccgacgcggtaggcgcggatcaccggcaggtagactttacgtttggaatcggtatcgaggccgcgctcgcgggcgatttgctgggcgctggtctgcagatcctgatgctgcagcttgggcatatagcgggcgccgacgatcaggctcaccagaccaaccagataggtcagggcatagccgaggctcagatggtcaagcgactgcgccagctgatcgctgggcaggccgaaatggcgcagggtgtcgcccgcgcccaccagcaccggggtggaggtcatggcgcctgccagcataccggcggtgagcccgatatcccagccgaacactttacccagcaccatggcgatcagcatcgcgctgccgaccatcaccagcgccagcatcaggtagtttttcccgtcgcggaaaaaaatagaaaaaaagttgggcccggcttctacgccaacgcaaaaaataaacagcataaagccgagattaagggcatcggtgttaatcgcgaaatgctgctggcctaataatagagaaacgactaaaacgccaatggaattaccaagttgtactgagccgagacgcagttttcccaggcatagtcctaatgcaagtacaacgaataataacaggatgtaattcccgtttaacaaatctgcgacgtttatattcacgaaagccaacttctcatttactagtaagttgttgaaggaaatggttatttggtctaaggttgctcaggcgttcgcgttgtcgcgaacctattctggcaccctgttataaccagcaaaaatataccgctagtttaatccttcctggatgcggcggctagtgacaatcgtttttaggctggtaggggagttattggcatggattgccgaaatgctttatctgactgggcgacgtggacgtgagttagaggcaacatcaggaggatacggtgaaatctgagcgtagttgggccggcattatctgtggcttcgttctgttcattgtggtgtgcttatcgttgttgttacatatgaaaggggcatttcgcgccagcggcaacccggagctgggcctgctcttctttttgctgccaggggcggcggcgagctgtctctctcccggacggcgggtgctgcgtcctttgctcggcgcgatactggcggcgccggtctgcatggtgacgatgcggctgttcttcgtgacccaccggacgttctggcaggaaatggcgtgggtgttgagcgccgtgttctggtgcgcgcttggggcattgtgctttttgtttatctgcgcctggcttgatacctggcgcagtcattcatcgagcaaataaattgactcaggcaaacaggccgagattctcttttgcccaggcttcaaaatcggtgcagccgccgatgtgtttctggtcgacgaaaatctgcggcacggtttcaaccggtttgccaacggttttttccaggtcagctttgctgatgccttcggcatgaatatccacgtagcggtagttgaaatcatcacgctcgttggtcagtttttctgccagttctttagcgcgaacgcagtaagggcagcctggacgaccaaaaataacggtaaacattgcttctctccttaaacctcagccggatggcgaatggcgcttatgatgcctgcaacgggcggggagggaaagaaggttctgccttttacttcgatggtttacggctatgtttgataaatgtcggactgtcaaaacacgtatactggcccgacggcgcggtggaattggctggcgcgccgcgtttatcaaccggagaggcgtgatgcgaaaatttgccccattgccgaaaagcatactgctggttgagctcctcgggatggggctgttaaccctcgcctggctctcccttaaccagtatgtccagctgcctgcgcccattgccagcccgaccgcggcgctggtgatgctctttgccgggatcgtgctgatgatccccgccgccatcgtcgtgatgtggcggatggcgcagatcgtggccccgcagttaacgcactctccaaagcctgaatccttgtctgacagagaaaaacgaaatgacgccgaccattgagctgctgcgcagccaccgttctatccgccacttcaccgatgcccccgtgagcgacgaacagcgcgcagagattatcgccagcgcgcaagcggcatctacctcgagttttttacagtgcacctccatcatccgtattactgacccggcgctgcgtgaacgtctggtcccgctgaccggcggccagcagcacgtcgcccaggcagcggagttttgggtcttctgcgctgactttaaccgccatctgcagatctgcccacaggcgcagctggggctggcggaacagctgctgatcggcgttgtcgatacggcgctgctggcgcaaaacgcgctgaccgccgccgagtccctcgggctagggggcgtctatatcggcgggttgcgcaacagcattgaggccgtcacagagctgctggagctgccgcagcacgtcctgccgctgttcggtctttgccttggctggccggcggataacccggatatcaagccgcggatgccggcggccatgctggtgcatgagaaccgctatcagccgctggataacgcgctgctggcggagtatgacgaacagctggcgcactattatctgtcgcgcggcagcaacgcccgccgcgatacctggagcgaccatatccggcgcactatcgtgaaagagagtcgtccgtttattcttgactatctgcataagcaggggtgggcaacgcgctgattacgtgtacactgctgctccggccaggtgatatccgccgccggccgcaggaaaggtgaaagtgtgttcgatagctgaggcccgccagagcgggtcttttcgcagaggtgcaggatgaaaattgccatattatcccgggatggaacgctttattcatgtcggcgcctgcgcgaagcagcgcaacagcgcggtcatcagatcgagatcctcgatccgctttcctgttatatgaacgtcagcccggtggcctcgtcgatccactacaaagggcgtcagctgccgcactttgatgcggtgatcccgcgcattggctcggcgatcacctactatggcaccgcggccctgcgccagtttgagctcctgggaagctatccgctgaacgaatcggtcgctattacccgcgctcgcgataagctgcgctcgctgcagctgctggcgcgccagggcatcgatctgccattgaccggcatcgctcactctccggatgacaccagcgatctgatcgccatggtgggcggcgcgccgctggtggtgaagctggtggagggcacccaggggatcggcgtggtgctggcggagacccgccaggcggcggagagcgtgatcgacgcctttcgcggactgaacgctcatattctggtgcaggaatacattgccgaagcgaaagggtgcgatatccgctgcctggtggtcggcaatgaggtggtggcggcgatcgagcggcgggcgaaagagggggatttccgctctaacctgcaccgcggcggcatggccacggtggcgcagattagcgacgaggagcgggccattgccatcaaggcaacgcaaactctcgggctggacgccgccggtgtcgatattttacgcgccgcccgcgggccgctggtgatggaggtgaatgcctcgccggggctggaaggggtggaaaccaccaccggcgtggatgtcgccggcaagatgatcgcctggatcgagcgccaggcgacgccggaattctgtttgaaaataggcggctaaccgccggatgcaagacggccatggtatgcggcgctttttttgcgtaagctatggcgtcgtttttccactgtaagaggtcacaggcactatggattcactggtcgttccaggtctggatacgctacgtcgctggctggacgaaatcggcatcagcttttttgagtgcgattcctgtcaggcattgcacctgccgcatatgcagaatttcgacggtatttttgatgccaaaattgacctggtggacaacgtggtgctcttttccgccctggcggaggtgaagccgtctgccctgctggcgctgtcggcggatctctcggccatcaacgccagctcgttaaccgtgaaggcgtttatcgacattcaggacgataatttgcccaagctggtggtttgccagtcgctgtctatcggcccaggggtgaccatggagcagttcgcctggttcttccgccaaagcgaagagcagatctcgatggtaatcctcgaagccggcgcaaatcagctgctgtacaaaggcgaagaagaagagcctgcggcggaaaacgtgcaataccattttcttcactaaacctgcctaaaattagcgcagccactaccgcagcggctgcgtattacccgcttttattctgcatttaacctttctttaaagcattattcaccgccattcaggccgttttggcttatcacgtagaccgttattgcataaaaatttgataaaaggcgtttttttacctgggctatagcctcttattctggctacagttattctggcgatgcttccagttgcgagcaaccactccgggagagatccgctctccttttctcaggcaatgaaaaaatatgcatgatttttgcatgcgtagaaatgcgtatatttgagcccgtaagttaacgggcgttgagaaggaaaagagatatgaccgcctttggtaaaaaatggttaacaggtctggttacgggtgcgctgatggccgtctctgccggttcgctcgccgccgaacaaaaaaccctgcatgtttataactggtctgattatatcgcgccggacacggtagcgaatttcgaaaaagagaccgggattaaagtggtgtatgacgtttttgattccaacgaagtgctggaaggcaaattaatggcgggtagcaccggtttcgacctggtggtgccgtcggcaagcttcctcgaacgccagctggcggcgggcgtgttccagccgctggataaaagtaagctgcccaactggaagaaccttgaccccgaagtgctgaagctggtcgccaagcatgacccggagaataaatacgccatgccttacctgtgggcgacgacgggcattggctacaacgtggataaggtgaaagccgttctcggcaaagatgcgccggtggacagctgggatctggtgctgaagccggagaacctcgaaaaactgaaaagctgcggcgtctccttcctcgacgcgccggaagagattttcgccaccgtgctgaactacctcggcaaagatccgaacagcagcaaagcggatgattacaccggcccggcgaccgatctgctgctgaagctgcggccgaacattcgctacttccactcttcgcaatatattaacgaccttgccaatggcgacatctgcgtggcgatcggctgggcaggggacgtctggcaggcggccaaccgcgcgaaagaggcgaagaacggcgtcaatgtctcctactttattccgaaggaaggcgcgctggcgttctttgacgtctttgccatgccggccgacgcgaagaataaagatgaagcctatcagttccttaactatctgatgcgtccggacgtcatcgccaaaatcagcgaccaggtgttctacgccaacggcaacaaggcttccacgccgctggtcagcgagactatccgtaacaacccggcgatttatccgccagcggatgtgttcgccaaactgttcacgctgaaggtgcaggatccgaagatagaccgcgtgcgcacccgcgcgtggaccaaagtgaagagcggcaaataattcctgacggcccgtcgaatacgggccaaatcagatctgcactcgccgggaaatagcagcgcgcccggcgagcagaagcaccaggatggtgcaaatgcactgttaagcacgaagtatggcaccggaccatatggtgatcgtttttttgccggagagcacccgattgaacgacgtaatgccccgcccacaggcgaaagcccccaaagcgctgaccccgctactggaaatccgtaacttaaccaagtcgtttgatggccagcatgcggtcgacgacgtcagtctcactatctacaaaggcgaaatttttgctctgctgggcgcgtcaggctgcgggaaatcgacgctgctacgcatgctggcgggctttgaacaaccgaccgccgggcagattatgctcgacggcgtggatctggcgcgcgtgccgccctatcagcggcctattaatatgatgttccagtcctatgccctgtttccccatatgaccgttgagcagaatattgccttcggcctgaagcaggaccgcctgcctaaggcggaaatcaccgcccgggtgcaggagatgctggccctggtacatatgcaggagtttgccaaacgtaagccgcaccaactctcaggcggccagcggcagcgcgtcgcgttggcgcgcagcctggcgaaacggcccaagctgctgctgcttgatgaaccgatgggggcgctggataaaaagctgcgcgatcgcatgcagctcgaggtggtggatattcttgagcgcgttggcgtgacctgcgtgatggtgacccacgatcaggaagaggcgatgaccatggcgggccgtatcgccatcatgaatcgcggcaagtttgtgcagattggcgaaccggaagagatttacgagcaccctaccacccgctacagcgccgagtttatcggctcggtgaacgtctttgaagggctggtgaaggagcgtctggaagacggtctggtgctaagctcgccgggactgatgcatccgctgaaggtcgaccccgacgcctcggtggtggacaacgtgccggtctgggtggcgctgcgtccggagaagatcatgctgtgcgatgaaccgccggcggacggctacaattttgccgtcggcgaggtgattcatatcgcctatctgggggatctctctatctatcatgtgcgcctgcaaagcgggcagatgatcagcgcccagctgcagaatgaacaccgccatcggaaagggacgcccacctggggcgatgaggtgcgtttatgctgggatgctgacagctgcgttgtgctgacggtgtgaggagagggcgatgaataccgttgaatccccgtcaggggcgaaaaaaccgggcggcttcgcgctgtgggcggcgcgcctgcagatggcgcatggccgcaagctggtgattgcgctgccctatctgtggctgatcctgttgtttatgctaccgttcctgatcgtgttcaagataagtcttgccgagatggcgcgggcgatccctccctacaccgagctgatggagtgggcggacggccagctgacgctgacgcttaactttgccaacttcctacagttgactgacgatccgctctattttgaagcttatctccagtcgctgcaggtggcgggtatctcgacgatctgctgcctgctgctgggctatccgctggcctgggcggtggcgcacagcaagccgtcgacgcgtaatattctgctgctgttggtgatcctcccgtcgtggacctcgtttttgatccgcgtctatgcctggatggggctgctgaagagcaacggggtgttgaataacttcctgctgtggttaggggttatcgatcagccgctggagatcctgcacaccaacctggcggtgtacatcggtatcgtgtatgcctatctgccgtttatggtgctgcctatctacaccgcgctgacccgcatcgactattcgctggtggaggcctcgctggatctcggcgcccggccgctgaagaccttcttccaggtgatcgtcccgctcaccaaaggcggcattatcgccggctccatgctggtgtttatcccggcggtcggcgagttcgtgatcccggaactgctgggcgggccggacagcatcatgattggccgcgtgctgtggcaggagttctttaacaaccgcgactggccggtcgcctcggcggtggcgattgtcatgctgctgttgctgatcgtgccgatcatgtggttccacaagcaccagcaaaaacagatgggagagcagggatgaacgacttgccggtagtacgctcgccgtggcgcattctgatcctcgtgctcgggttcaccttcctctacgccccgatgctgatgctggtgatctactcgttcaacagctcgaagctggtaacggtctgggccggatggtcgacgcgctggtatagcgaactgttccacgatgatgcgatgatgagcgcggtaggattgagcctgaccatcgccgcctgcgcggcgacggcggcggcgatcctcggtaccatcgccgcggtggtgatggtgcgctttgggcgttttcgcggctccaacggcttcgcgtttatgatcaccgcgccgctggtcatgccggacgtgatcaccggtctctcgctgctgctgctgttcgtggcgctgggacatgccatcggctggccgtcggaccgcggcatgttgaccatctggctggcgcatgtcaccttctgtaccgcctacgtggcggtggtgatctcctcgcgcctgcgcgagctggaccactccattgaagaggcggcgatggatcttggcgccgcgccgctgaaggtcttcttcgtcatcacgctgccgatgattatgccggcggtgatctccggctggctgctggccttcacgctgtcgctggatgacctggtgatcgccagctttgtctccggtcccggggccacgaccttgccgatgctggtcttctccagcgtgcgcatgggggtcaacccggagatcaacgccctggcgacgctcatcctcggcgtggtcggtattgttggttttatcgcctggtatttgatggcccgcgcagaaaagcagcgagtgcgcgatatccagcgtgcaagacaaggctgaaccacctaaaatcggtacagcagcctccggtcggcgccaccctgtggcgccgttttcatggaagacattacgttgggattgtttacgaaaactcgctcatcgcatgcccgccttaacgtccctgcgctggtgcaggtggcggcctttgctattattttgattcgtggcctggatctgctgatgatccttaatctgttgggcctgcaggggctgaacgaattcatacaccgcagcgttcagacctggaacctgacgctggtcttcctcggcagcctggcgctggtgtttatcgaaatctggtgcgccttctcgctggtgaaagggcgcaactgggcgcgctggatctatctgctgacgcagattatcgctgccggctacctgtgggcggcgtcgctgggctacgggtatccggagctgttcagcattcccggggaatcaaaacgagaaattttccactcgctggtgatgcaaaaactgccggatctgctggttctgacgctgctgttcgtgccggcgaactgccgtcgctttttccgcctgcaataacggtgatacaatccccgcccctggatttttgaaggtcaattatgcattgcgcactctacgacgccggccgctgccgctcctgtcaatggctggagcggccggtcccgcaacagctcgccgataaaatggccgatctgcgcacgctgctggcggcgatcccggtcgcagcctggggcgagccggtcagcgggccggaggcggctttccgtaacaaggctaaaatggtggtcagcggcagcgttgagcgtccgctgctggggatgctgcaccgcgatggcactccggtggacctcaccgactgcccgctctatcccgccgagtttgccccggtttttgctaccctgaagccctttatcgcccgcgccgggttaacaccttacaacgtcgcgcgcaaacgcggggagctgaaatacctgctgctgaccgccagccagcagggggagatgatgctgcgcttcgtgctgcgctcagaggccaaggtggctcagctgcgcgccgcgctgccgtggctacaggcacagctgccgcagctcagcgtgctcacggcgaatatccagccggtgcatatggcaatcatggaaggtgagcaggagatcttcttcaccgaacagcaggcgctgggggaggtctttaatggggtgccgctgtggatccgcccgcaaagcttctttcagaccaatccggcggtagccagccggctgtacgccacggcccgcgactgggtgcgcgcgctgccggtccagcatatgtgggatctgttttgcggcgttgggggatttggcctgcactgcgcgacgccgacgatgcgcctgaccggtatcgagatcgccccggaagccatcgcctgcgccagacagtcagccgcgcagctggggctcagcaatctgcattttcaggcgctggactccacgcagttcgccactcacgaagcggatgccccgcagctggtgctggttaacccgccgcgccgcggtattggcgctgaactatgcgactatttaagccgcatggcgccgccctatattatctattccagctgtaacgcccgcaccatggcgaccgatatcgctcgtcttagcggctatcgcgttgagcgggtccagctgtttgatatgttccctcacaccgcccactacgaagtgctgaccctgctggtccgcgaagtttaaacaaaatgtgaaggctttgcgccgctgaaatcgggtaagcttgaggcagcatgttttgttattggtggggggaatctaatggccaaaaccattctgctggtggaagatgacgaggatatagccacgctgctgcggctcaatcttcaggatgagggctatcagatcgtccatgaagccgacggcggccaggccctcgcccggctggagacgcaggtctgggatgcggtgatcctcgatttgatgctgcccggcgtcgatggtctggagatctgccggcgtatccgccagatgacccgctacctgccggtgattatcatcagcgctcgcaccagtgaaatgcaccgcgtgctgggcctggagatgggcgccgacgactatctggcgaagcccttttcactgctggagcttatcgcccgcgtcaaagcgctgtttcgtcgccaggaggcgatggggcagaatctgctgatggacgccgggcgcctgtcctgccatggcctgagcatcgacccgctgtcgcgcgaagtgaagctgcgcggcgagacggtggacctcacgccgcgtgaattcgacctgctgtattacttcgcccgccaccccggggaagtgttttcccgcctggcgctgctggagcaggtctggggatatcagcacgagggctatgagcataccgtcaatacccatatcaaccgcctgcgcagtaaaatcgaacgtgacccggccgagccggacatcattcttaccgtctggggaaaaggctataagttcgccccggtgacgcaagaggccgtcccgtgatccgccgcctgagcctcagccagcggctggcgctggtggtggtttccctgctgatgctatgcgcggtggcggtatgcgccgtccagttacacagcagcgcgcagtatggcaacgccatggtgcagcgtctgtcgtccgggctggctcaacagattgtcgcccgcgagccgttgctggacgcccacggcgaggtcaaccggcaaaccctgaagtcgctgtttgaccgactgatgacctttaatcccagcgtggagctctatctgctgtcgccggatggcgatctgctggccgatgcggcgccgccgggccatatccagcgccagcgtatcgacatggcgccggtgcaggcttttctcaccggcagtgcgtcgccggtgtatggcgacgatccgcgcagtcccgacggacgaaaagtcttcagcgccgccccgctgcgcgtcgacggccaactgcgcggctacctgtatatcattttgcagggggagacgtttaatcagctggcggccgacgcctggcaaaaaacgctgtggagcattgttctgtggacgctgctgctggtggccctgtttggcctgctggcaggggggctggcatggttctgggtcacccggccggtccgcctgctcaccgcccaggtggcggcgagcgaccaggacagcatcagcgccatcaaaaccctggcggcccgcaggccggagccccggcctggtaacgaggtggcggtgctcgagaaccgctttattgaccttgcccggcagattgccgatcagtgggatcggctggccgacagcgatcgccagcgccgtgaatttgtggccaatatctctcacgatttgcgcacgccgctgacttcgctgctggggtatctggaaacgctgaccctgaaggatgaatggctgaccgccgaggagcgcaggcagtatctcaccatcgccctgcgccaggggaacaaagtgcgccatctctcgcagcagctgtttgagctggcgcgactggagcatggaggcattaagccgcagcgcgagcgtttcgcgatgggggagctgatttccgacgtggcgcagaagtttgaattaactgcccgcacgcgcgaggtgaacctgcatattgatgtaccgggaccgctgccgctgattaacgccgatgtgtcgatgattgagagggtggtgaccaacctgcttgataacgcgatgcggcatactcccgtcggcggggagatccgtctggcggtctggcaggagaatcaacagcttcaggtcgaagtggcagacaacggagcgggcgtcgatgccgcgctgcgcgacgatctgttccagcggccgtcggcgttgtctacccaggcatcgcgggaggagcgcggcgggttagggttgctgattgtgaaacgaatgctggagctgcacgggggcgatatcagactggtggagtcggtaagcggggcgcggttcaggttcttcgtgccactttgagaaatcgccgggtgacggctacgccttacccggccatcgtggaagagcggtggccgggtaagcgcagcgccacccggcgaaaaaagttactccgggaaccactggttgctaattttctggtaggtaccgtcggccttaatcgctttcagcgcggcgttcagtttctccagcagcgccttgttatccgggcgcacggcaatgccgagtccggtgccgaagtattgcgggtcggtcactttcggcgtggctgcccccagctgcgggttagttttcagccattcgttgaccaccgcggtgtcgccgaacacgccgtcgatacggccatttttcaaatcgataatcgcattctggtagctgtcataggcgacggtcttcacctcaggatgcttatcctgcagatatttctggtgggtggtgccgttttccatgccgatccgtttgcctttcaggtcatcgaaagaatggaacgcatcttttttggcgatcaccagcgccgagttggcgtagtacgggtcggtgaaggccacctgcttgctccgctccggcgtaatatccattccggaaatcaccgcatcatatttcttgaacttcagcgccgggatcaggctgtcaaacgcgtggttggtaaaggtacattctgcctgcatttgtttgcacagcgcgtgggccagatcgatatcaaagccgacaatctggttatttgcgtccatcgattcaaacggcggataggttgcggagacgccaaagctgattttttccgcggcagcggcgccgaacgcgaaagaggtgagcagtgcagccagaactaactttttcatcgtggaactcccgtctgtctatcttatgattattcaccgtgtctgcggcatagagtgacaatgccatgaaatgaatttatatgcaattaaaatgattaagtatttctatcgtcataaaaaaagacggacaggtgtttgacttgtccgccttgctgtttgctttttatgcaatatgctcaggtgctagctacgtcgctcgaaggccagcgctttgcgttccaccaggcgcatcagcagcgtcagcagtccattaacgatgagatagataatcccggcggcgccgaacaccatcacgtcgtaggtgcgtccatacagcagctggccgtggcccatcacttccatcagcgtgatggtgtaggccagagaggtactcttgaaaaccagcaccacttcgttggaataggacgatagcgcacgcttaaaggcgtacggcagcaggatcgccagtgtatcctttttattcatccccagcgcgctgcaggactgccattgcccgtcggggatcgcccggatggcgccataaaacagctgagtggtgtaggcggcgctgttgagcgacagagcgatcagggcgcacagccacggctcggagataagatgccacagccacggatactcctgcagcgaagggaactgtcccgggccgtagtagatcaggaagatctgcaccagcagcggcgtaccggtaaacaaggtgatatagccgcgcactatccataccagccccggcgtcttcagggtcaggataatggtgaagatcagcgacaggatcagcgccacgataatcgacgccacggtcagcgtcaggctggtatgcagtcctttcagcagttcgggtaaatagtcgagcatcagcctggtctccgttcgaagcgcgtcgcacgctggtcaatccgcttaaggatgtattgactcaacagggtgatgacgagatagattgccgccgcaatgatataccagttaaagggttcctgagtgcgggtggcgatgcttttggtctgcagcattagatcgttgacgctgatcaggctcaccagcgcggtgtccttcagcagcaccagccactggttaccgaggccgggcagggcatggcgccacatctgcggcatcaccagacggaagaatatggccgctttcgacagccccagcgcctggccggactcccactggccctgcggaaccgctttcagcgcgccgcgcagcgtttgcgaggcgtaagcggcatacagcagcgacagggcgatcgccccgcagaggaatgggctgacgtcaaagttctcaatttgcatctgcaccgggatctgcgtgaacccgagcgggatggtgaaaccgtcagagagcgtcagcagcagctgggaagagccgaaatagataaacagcaccaccagaatttccggtagcccgcgcaggatggtcactatgccggttgcaagccaggctaccgggcgccatttcactgactccagtaccgcaaagagcatcgccaggaccaggccgatgacgagcgcgcaaacggcaaggccgacggtcatcccggcggcgcttgctaatggaaaaatttcgttcattcagtcttacttctggaaccatttgttatagatggtctggtaagtgccgtctttcttcactttttccagcgcagcgttaaatttctgctgcaggtcggtgttgccctgacgtacggcaatgcccagcccggtgccgaaataggctttgtcggtcactttatcgcccacggccgccagcttcggattgctcttcagccattcggtcaccacggcggtgtcaccaaagaccgcgtcgatacgaccgttctgcaggtccagcttcgcattctggtagctgtcgtaaggcacggtagtgatttccggatgtttatcggtgatgaatttctggtgggtggtgccgttctgcacgcccacttttttgcccttcagctgctcaatgctggtgaacttaccctgctggccgacgaacagcgccgagttgtcataatacggggtagagaacagcacctgcttttcacgctccggcgtgatgtccatcccggccatgaccgcgtcgaaacggcggaatttcagtcccgggatcaggctgtcaaaggcctggttggtgaaggtacaggtggcgtcgatctctttacacaacgcgttcgccagatcgacatcgaaaccgacgatctggttgttggcgtccaccagctcaaacggaggataagaggcctcggtggcgaaacgaatggtctgcgcggcggaagcggagaggctcatgcctgcgagcagggcggcaatcaatacttttttcatcgtcatttccccgaaaaacatcaatgtgaaagatagtttttaaacgcgtcagtttgcggatgcgtgaagcaggaggcatccccttgctcgacgatatggccattttccatatacaccacccggctggccgtcttgcgcgccacttcaacttcgtgggtgacgataacctgggtaatgccggtttcagccagctcgcggatgatgctgacgatctgagccgtgatttccgggtcgagcgccgcggtaggctcatcgaacagcagaacctgcggctccatcatcagcgcgcgggcgatagccacccgctgctgctggccgccggataaatgcagcgggtaacgatcgctgtacggcttcagacgcaggcgctccagcagcttctctgcgcgagccagcgcctgatccttgcttaaccccagtacgcggcagggggcctcgatcaggttctgctgtaccgtcaggtgcggccacaggttgtattgctgaaagaccatgccgacgttctgacgcagctcgcgaatcgctttatcggacggcgctctggtgaagtcgaattggttaccggcgatggataacgaaccggaccgcggcatctccagcaggttgagtacgcgcagcagcgagctcttcccggcaccgctggggccgagcagcaccagcgtttccccctgcgggcaatccagcgtgatgtcgaacagcgcctggtgtgcgccgtagaagcaattaatgccgtttagtttaatactcatctgggcagtctgatacgaatagctattgaggccgcaaatactacctttggcagaatagttatgcaatatttatgcgttaaaagttaaatctaaaccacgtttagctttaaagttagcacaaaatatggcctggtgggtgaggggggcgcaaatgtcggcattcctggggcgaataccgacattttaccggggttatcgtttcagcggcgtcgcttcaactccggaatcagcgtttctccagactctgtcgcagcgtcccggctggcgcatggctgttgttgccgagatagcgaacgtcatcgacggcccagcactggccttcctggatcatcagcacttcatctttccagctctgggtgccctgtttcagatcgacgcgcagcggaatattgcgcgcatcgcggttcgggatggtggaggcgctggcgaccacggcgctgtctgccggggtgctgctgctggagaacggattagcctgcagtaatttgctgttggcgggatcctggcgggcgtcattgagtaactgcgccaggccgtcgctcagataggggcgcagcgccgccggatcctgagtacgattctggatctgggtgtcgtagaatttttgcgctacgtcgtcagggccgccttcgacgcaggggccgctgcgggtgccattatctttataggccggggtgacggtcgtacaggcgctgagcgccagcgcgcaagggagaagtacagcaaaaagtttgtagcgcatgatgatttccttataagcgaactacgttttcagtttccgttaaagcatagcgtatagcgtgcggattgtacttgacgcaaagagctaagaccttgatgtggctacagccttagggcgggaaatcggcacggggatgacagaattccgtcaggcgctaaaaggcagggtagtataaaaataaacttaattttcccgtgaacaagaaatattatcccgtaaaatagggaaatggctcttgaaagataagggtaattatttcttcttatagatgcgagtggcgacgtgcatttttttatccgtattaccggaggaggggacaatgacgccccccttgttcatttgtttttttaatcagctcttcacgggcatcgttggatgcggtttgaccagtagaggaaatggcgccgattttggtatattgcgtatggactttatcaaaagctgttttgttaaaatctctgcggagacggcattggccgcttaaaacaatgctgtacctgccactaaagctgcatatttaatattcttagcccctattgtttatctcgctatcatcatgctcttctttgcattcaccaatgaatgatttcagattgaactcacactgctttttgtaagcaaaatgctgcaatttaatgacggttagttaacgctttttagcgaaaagatgacgtaattcgcagtgctgatgcttgttttttgagccggttacccatcgggagcggaccaggctattttcttcggtcgttagctgaaaatcaccctgagaggccggagctgaggggatagggcgctgacagacattcccggtaacatggtttatcatatagaaaagcaggggctgcgcccatggtcatgcaggtcaccagagagttaagatgttaacaaataagcgagagcgcgcccggcagcagcgagccgcgttgtgggccaccagagataatgtccagcgccatgcgctgtccatgagtatgccctggctggcctttgtcaatatcgcttttgcgttaatgattttcttccgcaatttgatctttacttattttgataagaggctactgacgcaccgggcggttattccttatatcgaagcggcgttgattgcggttattatcatttcggccattttagtgattattgccctcacgccgcgactggcgcagggacgatatacgttgaatatcatcaccgggctgctgctggcgctcagtctgtgctggtccctgagtaattattgttttatttttttctggaccttgccctttgcctggccgctgctggtgatattaatgactaccggcctcaccgcgctgtatcaccattggcccggcataaccgcttttatgctgccgctgtgggtgaccgccttgctggcgggaatacagctccactatcacaccgagatccgctttttgatcctctgggccatttttaccgcgattttgctgtatggccgacgtattttgcagcgctggtatgacgaagcctgggatacccaccaggagaatatgcagcttattcagcggctggaaagtatcgccaaccaggatgccttaaccggaaccgctaaccgtcgggcgctcaatgcttacctggcggcgatctggcagcaaaaaacgccgctggcgctgatgatgatcgatgtcgattattttaagcgctataacgatcgctatggccatcaggctggtgatgagtgcttatcttctgtcgcgcaggtgcttaaaatggcggtccgggcggagggcgatctggtggctcgctacggcggcgaagagtttgtcgtcgtgttgcccggggtgtccttagcgcatgccaccgctattgccgagcgcattcagcagaagatccgcgaggcaggcctaccgcacgccgcttcggcggtggcgtcggaggtcaccgtgagtatcgggatcgtcgcctccgatggcacggtcccgatagagacgctgatcgcccgggcggacagtgcgctgtatcaggcgaaaaataaaggacgtaatcaatggtcttattaacccggagacgctgccgggcaagggagaagggatgaaacggatgatgcggatcgtgctgctggcgctgctgctgaccggctgcgctggggaaaagggcattatcgatcgcgacggataccagctggacacccgtcatccggcgcaggctgcctatccgcgaataaaggtgttagtgatccactatacggctgacaattttgatgtctcgctggccacgttgaccgataaagaggtcagctcccactatttaattcctgaacagcccccgcgttatcagcataaaccgcggatctggcagctggtgccggaagaggatttagcctggcacgccggggtaagctactggcgcggcagtacgcgcattaacgatacctccattggcattgagctggagaaccgcggctggcagaagacggcgggcgtcaaaagttttaccccctttcatccggaacagattgcggctctgatcccgctggcgcgcgatatcatcgcccgctaccacatcgcgccgcagaatgtggtcgcccatgcggatatcgccccgcagcgcaaagacgatccggggccgttattcccctggcaacagctggcgcagcaggggatcggcgcctggcctgacgagcagcgggtggccttttatctgaacgggcggccggccagcgagccagtggaccccgaaatcgtactggatttgctctcgcgctatggctatcaggtgacgccggagatgacccccgcgcagaagaagcgggtgattatcgccttccagatgcacttccgtccgcagcgctgggatggggtagcggatgcgcaaaccgaagcgatagccgaggcgctgttagaaaaatatggccagggttagcggtgtagtttaccgtggtcgcgaagccaggcggcggtgcgcacgatgccctcgtcaagcgtcaccaccggctgatagcccagctcgtcctgcgcgcgggtgatatcgagcgtaaaatcaaagttaagcttggagacgccgtagtgggtaaacgcgggttctttggcggttttatcgccaaagcgctccatgctgcgggcgataatatccagcatcggatagggaactgagcggatccggcatttgataccgagctcgtcgatcaatttctgcacgatgctccgcaaggtgcgcggttcgccgttgctgatattccacgcgcgggcggagggaagatgatcgcaggccggctggctcgccagccacatcgcatgtacggcgttttcataataggtcatgtcgaccagcgcgctgccgccgcgcgggagcaggacgctgccataatgctgcatcatttgcgccagccgggggataaagactttgtcgtgcggcccaaacaggctctgcggccgcagaatggtaaaacgggtatgcgggttagcctgcgccagcaggttgatcacctcctcgctggccgccttgctgcgggcaaactcgttggcgaagcggtgtggacggaaatcttcctggatatcacgatgatggtgataatcaaaatagagcgatggcgaagagatatggacgaaattgcgcactccccatgccactgaccattcgcccagacgacgggtggcgcggacgttagcgagatcgaaagcctgctgagtgccccatggcgaggtaaagctggagcagtgccatagggtatcgataccggcgagcatcactttagcctgcgaagagaccagctcggttaaatctgccgggatgaattccgcccccattttgctcagaagcttgcccatcgcttcgttgcgcccggtcgctcgcacgctgatgcccttgttgcgcagatattccactgcgttgcggcctaatccgctggtcgcaccggtaaccagtaccttcatatcactctactgtcccagaaaagaatttcgtgcgcatttttccgtgattctcccgactatgcaatgagaatcatgaaagaataacgcttatccttcgactctgcctgagatttgttcggccagccgggcgatgcgttgcgccataccgcggaaaataaacaggtgcgccgggatcatcagcagccagtagatcaggcctggcataccgtgcgggtgccaccaggcgcgcacgtccagttcacgacgatcgcctttatcgttaatggtaaagcttaatcggcccagcccgggcgctttcataccgaatagcagggtgagctgtttttcttcctccacgataattaccttccagctgtcgaccgtatcgccggtttgcagataagcgcgctgcggccgccctttggccagccggtggccgaccagcagatccatcgcgccgcgggttttccacagcagattgccgaaaaaatacccctcttcaccgccgatttggttaacgacctgccacagggcctggcggcttgcctgagtggcgacggtgcaacctgcctgcttcggatagtagccgtactctggtcgccagcgggcgaaagcctgagcgtcgtagccccagtcgctggagtttactaactgctcttcttctttcagcgtgcggcgaaccgcctgatcgaaggggatcagcgtttgcgggatcagcgcccgcagcgcccgatcgtcagcgattagatcgtgcttcagcccctgaatcagcgccttggcgatggtcggcggcaccgaggtgatgacattgaggaaccacaccgagatccagcgcgtcggcaggggaatgggaatgagcgggcgatgtttaccgctgacggccataaagcgaatgaactgctgctgatagcttaacacctccggaccggcggcttcgaagacgcggtgcgcatcggagggatgattcagcagctcaaccaggtcaacgagcaggttttccagcgcgacaggggtagtacgcgaacgtacccagcgcggaggggttagcaccggcaggttataaaccatgtcgcgcatcacctcgaaggcggcggagccggcgccgacgataatcccggcccgcagctcggtcaccggcacgcccgactcacgcaggagatcgccggtaatctgacgagcgcgcagatggtcggactgctcctgcgccggggcctgcagcgaactgagaaatatcacctggcgcactgatgactgacgcagggcatcgcgcacatacgtcgccccccgccgctcatgggcgataaaatcaccgccttcgcccatgccgtggaccagataataaagggtatcgataccggtgagtagcgcaggcaggtcctgcggctgattgagatcgactgaccggcaggtaacgccgggcaaagcgagtttttgcaatcggtcgatatggcgtgccgccgccagcaccggatagccccgcgcgcttaatgtgcgcactaaatgctggccaatatagccgctggcgccgagcaccagaactgattgcgacacgcctgactccttagcgttgtaaaaaagcctgccagtgggcgaccacctcgctcagctgctgacggttgacatccaggtgagtgaccagacggacaacaggcgaggcgttaatcaataccccctgcgcctgcataaacttgccgagcgccggggcctgctcttcgccgacgcgaacgaacagcatgttggtatcgtgacgggtgacgtcggcgccgatagcgcgcagctgctccgccatccacgcggcgttgtcatgatcctcctgcaggcgctgcacgttatttttcagcgcgtacagcccggcggcggccaggatgcccgcctggcgcatcccgccgccgaccattttccgccagcggacggcgcggcgaatgtacgcctcgctgccgagcagcagcgagcctaccggagcgccaagcccctttgacaggcagatggtcaaggagtcgcagtattgggcgatatcgcgtacctcgcagccgtaggccaccacggcgttaaagatgcgcgcgccgtcgacgtgcagcgccagattgcgctggcgggtaaacgcccaggcttcctgcagatactcgcgcggcagcaccttaccgttatgggtgttttccaggctcagcaggcgggtgggggcaaaatggatatcgtcgggtttgattttcgccgccactttatccagaggcagcgaaccatccgccgcggcgtcgatcggctgcggctgaatactgccgaggaccgccgcgccgccggcttcgtacagatagttatgcgccccctggccgacgatatactcttcgccgcgctggcaatggctgagcaggccaacgaggttggcctgggtgccggtgggtagaaatagcgccgcttctttgccggccaggtcggcggcatagcgctgcagttcattgacggtagggtcgtcgccatacacatcgtccccgaccggggcggccatcatggcctccagcatggcgcgcccgggacgggtaacggtatcactgcgtaaatcgatcacggcttttccttggtctggttcaacgtattgcttctgttttacctgagccagttggttttcgccagttcgatgacctcatcgccgcgcccgctgatgatcgcccgcagcatatacaggctaaagcctttggcctgctccagcttgatctgcggcgggatcgccagttcctctttggcgacgacgacgtcgaccagcaccggaccgtcggtgcggaaggcggtctgcagcgcttcatccacctcggaggctttttcaacgcgtatacctttgatgccgcaggcctcggcgatgcgggcgaagttggtatcgtggagctccgtaccgtcggtgagatagcccccggccttcatttccatcgccacgaagcccagcacgctgttgttaaagatgacaatcttcaccggcagcttcatctgcgccagcgacagaaaatcgcccatcagcatgctgaacccgccgtcgccgcacatggccactacctgccgctccggcgcagtggccttggcgccgatggcctgcggcatggcgttggccattgagccgtggttgaacgagcccagcaggcggcgtttaccattcattttgagatagcgtgccgcccagacggtcggggtgccgacatcgcaggtgaaaatggcatcttcatcggcaaaatgactgatctgctgcgccagatattgcgggtgaatggctttatcgctgggtttagccagatcgtcgagcccttttcgcgcgtcgcgatagtgctccagcgccttatcgaggaagtggcgatcggttttctcttccagcagcggcagcagcgccttcagcgtcgatttaatatcgcccaccagcgccatgtcgaccttactgtgtgcgccgatgctgccggggttgatgtcgatctggataattttcgcgtcggttgggtagaaggcgcgataggggaactgggtgcccagcaggatcagggtatcggcgttcatcatggtgtggaagccagaagagaagccaatcagcccggtcatgcccacatcgtacgggttgtcgtactccacgtgctctttgccgcgcagggcgtggacgatgggggctttaattttggctgcgaactccaccagttcctggtgggcgccggcgcaaccgctgccgcacatgagcgcgatattgctggagtagcgaataagctgcgccagcttgcgcagctcttcttccgccggggtgaccgtcggcagcggcgcatgataccagtggctgctggcgctttccggggcggccttcagcgccacatcgccgggtagcaccaccaccgagacgccgcggttaatcactgccttacgcatcgccactgccagcacctgcgggatctgctccggcgtggagaccagttcgcagtaatggctgcactcgcggaacagctcctgaggatgggtttcctgaaaatagccgctgccgatttcgctggatgggatgtgggcggcgatggccagcaccgggacatggttgcgatgacaatcaaacaaaccgttaatcaggtgcaggttgcccggtccgcaggagccggcgcagaccgccagctcgccggtcagctgcgcttccgcgccagcggcgaaagcggcgacctcttcgtgccgggtgggcatccagtcgatggtgcccatgcggttaaggctatcgctcaatccattgagggaatctccggtgacgccccagatacgtttcacgccggcctgttccagcgttttggcaatgtatgccgccacggtctgcttcatgatctccatctcctttttttgataacgccttcaagcttagatgaaactgaccgcaatgtaaccgattacccctgattttttgctggttttattcctctccggctgcgcatactcaggaagtacacaggatgcaaaacaggatgcacatcaaatggttaaaggattgttaaacacagtaaatcgcaggctgtcgcatgatgacgccggtaaactcttgttacgacttgccgtcggcggcttaatgcttttccatggaatccataagctgatagatggtgtggatggcattagcgggatgctggcggcgcagggattgcccgggtttatcgcctacggtgtgctggtgggggaagtggtcgctccctgcttgttaattatcggcgtcctgacccgcccggcggcgttggtgctggcgttcaccatggtggtggcgtggctgatggtcggcttagataagacgtttgcgcttgatgcggtgggagcgtgggccattgagaatctggtctatttctttgttggcgcactggcgattgcgctactcggcgcggggcgttattcgctggccggtcagtcggcctggcggtaaaaatgcctcattcgtcctggggcgtaaagtcgatactgttggcgatttgcaattttttcagtccgggaaagcgtttatctcatgtcgcctgagcgtttattgtcgccagggattttcccggaggcggcgcattgcgccttctccgggctaccaaatcgcacagcgctgtagccccggtaagcggtagcgccaccggggattttgacctcaggcgagaaccagatcgctctgcggatgacaggagcaggccagcacatagccgtcggcgatttcggcgtcggtcagcgtcatggtgctggtgacgctgtacttcccggaaaccactttggttttgcagcagccgcagacgccggcgcggcaggcgacggtcaccggcactttattgctctccagcgcgtcgagcagcgtggtgcccaccggcgcgtaaaactcgcgcgccggctgcagtttagtaaatttcagcccgctggtggcggcctcagccaccggggtgaagaatttttccttaaagaagcgggtgacgcccagggcggcaacatcctgctcgaccttctccatataaggcgccgggccgcaggtcatcacggtgcggctggctaaatccggcacgctctgcagcagctcccgggtcagacggccggcgacaaaatcgtgcgtcgcattgtgctccgctaccagggtgaccgggtagttgcgccactcttcggcaaagattacatcttccggcgaacgcacgttataaatcccctgtacgtcggcctgcggtcgatacttagccagccagcggcgcatcgccatgatcggtgtcacgccgcaaccggcggccagcagcaggaatttatcttccgctttatcgtcgcaggtaaactcgcccatcgcatcggacagccaaaggtaatcgccgcgtttgacctcgcgggtcaaccactgcgaacccgtaccctcgtcaatacggcgaacggtcagcgtaatgtattcgctgacccccggcgtcgaggagagggtataggcgcgcagcgtttccgccgagttacgcacgctaaccagagcgtactggccagcgcggtacggatagtaatcgtggcacagcagcgaaagggtccacacgtccggggtttcctggtgaatgtggtgaacctgcatccgccacgggcactgggaggttggcatagtcatcagggactccttaagcgctcagcagctgctgcatatcttgttccacggtggtcacggaacgcagaccaaacttctcattgaggaccgccagcagatccggggtgaagaaaccaggcgccgtcggaccggtgacgatgtttttcacacccagcgacagcagcgtcagcaggatgacgatcgctttctgttcgaaccaggagagcaccagcgacagcggcagatcgttgatgccacagcctagtttctccgccagcgtgaccgccagaataatcgccgagtaagcgtcattacactgcccggcgtcgaccaggcgcggcagcccttcgatatcgccaaagtccagtttgttgaagcggtatttaccacaggccagggtcaggatcaggcagtcatccggcacgctggtggcgaaatcggtgaagtagttacgctccccgcgggcgccgtcgcagccgccgacgaggaagatatggcgcagtttttcacgactgaccagatcgatcagcgtatccgccgcgccaagcagggtctgacggccaaagccgacggtgatcagatgcgggatttcgctgtacgggaagcccgccatctgctgcgcctgggcaatgaccggggagaagtcttcgccttccagatggttcacacccggccagccgacgatgctgcgagtccagatgcggtcgtcgtaggcgccgacggtcgggtcgatgatgcagttagaggtcatcacgatggggcccgggaagcgggcgaactccacctgctggttttgccagccgctgccgtagttgccaatcagatgtttgaatttacgcagctccggatagccgtgagccggcagcatttcgccatgagtatagacgttgacgccggtgccttccgtctgctccagcaggttatacagatccttcagatcgtggccggagatcaggatgcacttcccttcggtggctttaacgttgacctgagtcggcgtcggatggccgtatttggtcgtttcaccggcgtcgaggatgctcatcactttgaagttcatctggccgatttccatcgaacattcgagcagcgcattcatatccgcaggccaggtgcccagccatgccatgattttatggtactgggcatagatagcgttgtcgtactggccgagcacgtgggcgtgctccatataggccgccgcacccttcagaccgtacaggcacagcaggcgcagacctagaatattctcgccgatggcggctttatctttattcggggtatagtccgccgcctgacgctgcaggtcgcccagatcgtcgctgaccagctgcaggtcggcgaccgggctgtcgaccgcggcgctggcatcgatcgccaggcattgcgctttcagcgcctcacgcagggcaattgcctggcgggcgtagccgacgatgcgcggggaatcgaagttaacgttagtcagggtggagaagaaggcgcggggggcaaagctgtcgacctgatgatcgataatgccatattcgcgcgctttaagcgcccaggcggacaggccttgcagtgacgcaatcagcagatcctgcaggtccgaggtttccgctgttttaccgcacatcccctgcgcgtaagagcagccgttgccggctggggtacgaatggtttgttcacattgcacacaaaacatggtcacacctttaaagttatatttgatatacatgtttaaggttatgccgcgcggcaacgggtgaaaaggtatttctaagacaacttaaagggagattgatttagcgcaaatttggcggcaggagggctgccgccaacgggtgctcaggcggtaaaaaaggcgatcaggatcgggaccagcaaactaagcagaaaaccgtgcacgatggcggcagggacgatttcgacgccgccggaacgctgcagtaccggtaaggtgaagtccatcgaggtggcgccgcacagccccagcgccgtggagcggctgcggcgaataaggcccggaattaacatgatggccagcagctcgcgacagagatcgttaaagaacgccgcgctaccgatgaccgggccaaaggattcggtgagtaaaataccggagagcgaataccagccgaaaccgctggccattgccagaccggtctttaacggcagaccgagaataaaggcgttaagtatcccgccgagtaatgaactggccgtaaccaccacggcgacgatcattccccggcggttaaggactatttgtcgcagactcattccattattgcgtaattggataccaacgaggaacaggagaaagatcaacgtatattcgctggcttctgtcgcgtgctgtaaaaaaggcagtctggtcagaccgagcagaaaaccgagcacgaccacaccgcacagctgcagcgattccagggccatggccaggcgcgagggtaatttctcctgacgatgctgactgcgccatggcattttactttccagccacagcagtgcggcgatattacacagtaaaatgataaccacgctcaccgcggcgtaatgcaatattgccagcaggttgctggccagattgtcgaggaacgccaggctgatacccataaaaaaaaggattacatagacaatccagctgagcatgcggtttatcagctttagcgcggaggagtgacgaagaggcagtaaatagccgacgaccagcggcaacagaataataaagagtcccgaaaacatgaacgatgcagcccttgcatgatgagaatagcgcccatgacactacccaaatcaccgggccgagtaaagctgtcgccagaaagaaaaagcccggagacccgggctttgaaaagcgttaatcgcgtttttccagcagggtgcgatacagcacgccgccgaggatcccgccgacgattggcatgacccagaacagccacagctgctgcagcgcccagccgccctggaaaattgccaccgcggtgctgcgcgccgggttgaccgaggtgttggtgactggaatgctgatcaaatggatgagggtcagcgccaggccgatggcgatgggggcaaagcccgccggcgcatgtttatcggtcgcgccatgaataaccagcaggaagccgcaggtcaggacaatttcaatgacgatagccgacagcatagagaagccgcccggggagtgttcgccatagccgttggaggcgaagccgctggcggcggcatcaaagccggctttaccgctggcaaccacgtacagcaccgccgcggcaataattccgccgaccacctgagcgataatatagccaatgacctcttttgccggaaaacggccgccggcccacaggcctaaggtgaccgccgggttgaaatgccccccggaaatatggccgaccgcaaacgccatggttaataccgttaagccaaatgccagcgcgacgccggcaaaaccaatacccagctcggggaaagccgcggcgagcacggcgctaccgcagccgccaaatacaagccagaaggtgccgaagcattcggctgctaattttctgaacataaccacctcaattaaattgtttacgcgcacgagcggaccgtgccggtctttatttatcgtgataagggatgacgataaaaataaagcggcgttattctagagataatcgccatcccggagccagttaaatatattgatattatttgatttagggcaaggtgagtggattccttttgccagtttagcctttcctttatccatggaagattatcaatagtgtagatcataacgcctgaaataaaactattttgtttgatgaataatcaacagccggtaataggcgataagtgagtaattttatgaatatatttaatccgctgaatatgagccacggatgcgattaagcagagtgtcatcttgcctccgccctcgctatactgttgattactgaaggagagtggtggtgtagcggaggggatatgcttcttgagcgcgtagaaatcgtcggttttcgcggtatcaatcgtttgtcgttgatgctggagcaaaataacgtcctgatcggggagaacgcgtgggggaagtccagtctgcttgatgcgctgaccctgcttttgtcgccggagttcgatctttatcactttgttcgcgatgatttctggtttcccccgggcgacatccaggggcgcgaacaccatttgcatattatcctgaccttccgcgaaacggagccaggccgccatcgggtccggcgtttccgtccgcttcagcgctgctgggtgccttgcgatgacgggtatcaccgggtgttctatcgcctggagggcgagctcgccgaagatgacagcgtgatgaccctgcggagctttatcgatggtgaaggcgaagcgttggtgctggaggagattgatgagctggcccgacacctggtgcgtttgatgccggtgctgcgcctgcgcgatgcgcgctttatgcgccgcatccataacgggacggtaccgcactcgccgcagatagagatcaccgcccgtcagctggattttctctcccgcgaactggtcagccatccgcaaaatttatcggacggtcagatccgtcaggggctatcggccatggtgcaactgcttgagcattactttgccgagcaaagcagcgctcagacgcggcatcgcctgatgcggcggcgctcccatgatgaacagcgcagttggcgttatcgggatattatcaaccggatgatcgacaagcccggcgggcgcagccatcgggtgatcctgctggggctgtttgccacccttctgcaggcgaaagggacggtgcgcctcgatcgcgacgcgcgaccgctgctgttgattgaagatcccgagacccgtctgcatccgatcatgctttccgtcgcctggcacctgctgaatttgttgccgctgcagcgtgtgaccaccaccaactccggagagctgctgtccctgacgccggtagagcaggtctgccggctggtgcgtgagtcgacgcgggtatcggcgtggcggttggggccgggcggaatgaatgccgaagagagccggcgcattgcttttcacatccgcttcaatcgcgcctcatcgctcttcgcccgctgctggttgctggtggagggagagacggaaacctgggttatcaacgaactggcccggcagtgcggtcatcattttgatgctgaaggggttaaggtgatcgaattcgcccagtccggcctgaagccattgatcaagtttgcccgccggatggggatccagtggcacgtgctggtggacggcgatgaggcggggaaaaaatatgccgcgacggtacgaggtctgcttaataacgatcgcgagctggagcgcgaccatctgaccagtctgccggcgctggatatggaacactttatgtatcgtcagggatttgatgacgtttatcatcgggtggcgcagatcccggataatgtcccgatgaatatgcggcgggtgatcaccaaagccatccatcgctcatccaagccggacctggcgattgaggtggcgatggaggccggccgccgtggcgtggacgctgtgccgacgctgctgaagaaaatgttctcacgggtgctgtggctagcccgcggtcgtgccgattaatctcaccgccgtcgtcatttacggcggcacaaagctctccggcagctaaacaaaacctcattgacgcgaaaaatgggtgtcctgttgccaacgggtttcgatagaatcaccgcctggagcggcagggaaacagcaggaatcggaatatgaaagtgaagggaaaacgcaggaccgtctggtggctgttggcgatcgttgtgctggggctggctatctggggatggcggatcctcaatgcgccgctgccgaactaccagacgctggtagttcgcaaaggggatctccagcagagcgtgctggccaccggcaaactggatgccctgcgaaaagttgacgtcggcgcccaggtcagcggacagctgaaaacgctgcacgtcaatattggcgataaggttaaaaaggatcagttgctgggggttatcgatccggagcaggcgcaaaaccagattaaagaggtggaagcgacgctcatggagctgcgcgcccagctcaatcaggcgcgcgcggagagcaaactggcgcaagtgactctggcccgtcagcagcagctggcgcagcgtcagctggtctcgcggcaggaccttgataccgcggccaccgatttggcggtgaaacaggcgcagatcggcactattgaagcgcaaataaagcgtaaccaggcgacgctcgatacggcgaagaccaacctcgattacacgcggatcctggcgccgatggccggcgaagtgacgcaaattaccaccctgcagggacagacagtgatcgccgcccagcaggcgcctaacattctgacgctggcggatctcagcaccatgctggttaaagcgcaggtctctgaggcggatgtcatccacctcagaccggggcaaaaggcgtggtttaccgtgctgggcgacccgcttacccgttatgaaggtaaactgaaagacattctgccgacgccggaaaaagtgaatgacgccatcttctattatgcccgcttcgaggtaccgaacccgcaggggatcctgcgcctcgacatgaccgcgcaggtgcacattcagctggctgaggtgaagaacgtgattactatcccgctgagcgccctgggcgacgcggtaggcgataaccgctaccacgttcgactgttgcgcaccggtgaggtcaaagagcgtgaggttatcattggcgcccgcaatgataccgacgtcgcagtggtgcaaggtctggaagagggcgacgaagtgatcgtcggcgagagcgcgagcggggcggcaaaatgacggcgctgcttgagctgcgagatatacgtcgcagctatccttccggcgacggcagcgttgaggtcctgaaggggatcaccctcagcatccatgcgggtgagatggtggcgatcgtcggggcctccggctcgggaaaatcgacgctgatgaatatccttggctgcctcgacaaacccaccagcggcacctatcgggtagcgggaaccgatatcgcgcagctggatggcgatgcgctggcccgtctgcggcgggaacactttggctttatctttcaacgctaccatttgctgtcccatctgaccgccgcgcagaatgtcgaagtgccggcggtgtatgccggcagtgaacggcgcgcgcgcctggcgcgcgctcatgagctgctggtgcggctggggctgggcgagcgcgccgactatcaaccgtcacagttgtccggcggtcagcagcagcgggtcagtatcgcccgcgccctgatgaatggcggggaggtgatcctcgctgatgaaccgaccggcgcgctggacagccattccggcgaagaggtaatggcgatcctgcaccagctaaaagcgcaggggcatacggtcatcattgtgacccacgatccgcaggtcgccgctcaggcggagcggatcgtcgagatccgcgatggcgagatcgtccgcaacccgcccgccagccgccagggcggcggactgcgcgcccgtccgcaggcggagccttcggcgtggcgtcagtttaccagcggctttcgcgaagcgctggtgatggcctggcgagcgatggcggcgaataaaatgcgtaccctgctgaccatgcttgggattattatcggtattgcctcggtggtgtcgatcgtggtggtgggggatgccgccaagcagatggtgctggcagatattcgcgccatcggcaccaataccattgatgtatatcctggtaaggattttggcgacgacgacccgcgctatcagcaggcgctgaagtatgacgatttgctggcgatccagaagcagccgtgggtgcgctccgccacgccggcggtttcaaaaagcctgcgcctgcgcgccaacaatattgacgttgccgccagcgcggagggtgtcggtccacagtattttaatgtctacggcatgacctttagcgaaggcaataccttcaatgaactgcagctcaacagtcgggcacaggtggtagtgctcgacagcaatacccgtcggcagctgtttcccaataaagcgaaagtggtgggagaggtgattctggtgggcaatatgccggccacggtgattggcgttgcggatgaaaagcagtcgatgttcggcagcagcaaaattctccgcgtctggttgccctacaccaccatggcgggaagagtaatgggccagtcgtggctgaactccatcactgtgcgcgttcatgaaggctacgacagtgaaaccgcagagaaacagctgctgcgtctgctggagctgcggcatggtaaaaaagatgtattcacctggaatatggacagcgtcttgaaaaccgccgaaaggaccacacataccttacagctgttcctgacattggtggcggtgattgccctggtggtcggcgggattggcgtaatgaatattatgctggtgtcggtgaccgaacgaacccgggagatcggcatccgcatggcggttggcgcccgggccagcgatgtgctgcagcagtttcttattgaagcggtgctggtttgcctggtcggtggcgcgctgggcgtagcattgtcgctgatgatcgcctttattttacagctgtttctccccggctgggagattggtttttctccgctggcgctgctgacggcgtttctctgttcgacgctgaccggggtgctgtttggttggctgcctgcgcgcaacgcggcgcggctcgatccggtggatgccctggcgcgagaataggcggggcgagaaataaaaatgccagtcagaaggactggcattttattagcaggatgtacacaatgaagcaaaagagttatgcagccgtttccgcttccacagggacgatcacgctggcgtgattgccttttggcccctggtgaacatcaaaccgaacggcttgtccggcttttagcgttctgtaaccatccatctggatggtggagtaatgggcgaaaatgtcttcgccgccgccctcagggcagataaaaccgaaccctttggcattgttgaaccacttaacagtacccatttccatacttcgacatccttcgtaaatctttattagtaagatggaatgaaccggtggtggagtgacgagttgttcaattgctcgccaactctcgccactacaatttagagaaatacgaaaacgcgtcaagcgattgaggagggggaacggcgaaaaatgcgtcaaaatttgaagcagttaacgctattgccggggaatgtgacagccgtcgcggatagaagcgatagatgatagttatctatgatctattgtagatttgtgatgagcataacctctggtcatcgacaggcctccgcctgttggcaacagcaaccgatgatgaacactgacgatgagtaagagagattggctggacttcgagcacctggttgacgacgaagttcgtgatgcgattaaaccgccatctatgtataaagtgatattggtcaatgatgactacactccgatggagtttgttattgacgtgttacaaaaattcttttcttatgatgttgaacgtgcaacgcaactgatgctcacggttcactatgaaggtaaggcgatttgtggcgtgtttaccgcggaagtggcggagaccaaagtcgctatggtgaatcagtacgcgagggagaacgagcatccattgctgtgtacgctggaaaaagcctgaatacaggcatgaaaattgggggaggtgcctatgctcaatcaagaactggaactcagtttaaatatggctttcgccagagcgcgcgagcaccgtcatgagtttatgaccgtcgagcacttgctgctggctctgctaagcaacccctcggcccgtgaggccctggaagcgtgttcagtggacctggtggcattgcgtcaggaacttgaagccttcatcgaacaaaccacacccgttctgccagccacggaagaagagcgcgacacccagccgacgctaagcttccagcgtgtgctgcagcgcgccgtcttccacgtacaatcttctggccgcagcgaagtgaccggcgccaacgtgctggtggcgattttcagcgagcaggagtcgcaggccgcctacctgctgcgtaaacatgaagtgagccgtcttgatgtggtgaacttcatttctcatggtacacgcaaagacgagccgagccagtcttccgataacagcggaagccagcctggcaatgaagagcaagccggcggggaggaacgtatggaaaacttcaccaccaacctcaatcagcttgctcgcgtcggcggcattgatcctctgatcggccgtgaaaaagagctggagcgcgcgattcaggtcctgtgccgtcggcggaaaaataacccgctgctggtgggggaatccggcgtcggtaaaaccgcgatcgccgaaggccttgcctggcgtattgtgcagggcgatgtgccggaagtgatggccgactgcactatctactcgctcgacattggctctttgctggcagggaccaaatatcgtggcgattttgaaaaacgcttcaaagcgttgctcaaacagctggagcaggataccaacagcatcctgtttattgatgaaatccacaccattatcggtgcgggggcggcgtctggcggccaggtcgatgcggctaacctgatcaaaccgctgctttccagcggcaagatccgggtgatcggctccaccacttaccaggagttcagcaacatctttgaaaaagatcgtgcgctggcccgccgtttccagaagatcgatattaccgaaccgtcggtggaagagacggtccagattatcaacggcctgaagccgaagtacgaagcgcaccatgatgtgcgttataccgccaaagcggtgcgtgcggcggtagaactggcggtgaaatacattaacgatcgtcatctgccggataaggcgattgacgtcattgacgaagcgggcgcgcgggcgcgcttaatgccggtcagcaagcgtaagaaaacggttaacgtggcggatatcgaatcagtggtggcgcgcattgcgcggatccctgagaagagcgtctcccgcagcgatcgcgacacgctgaaaaacctgggcgaccgtctgaaaatgctggtctttggacaggataaagccatcgaggcgctgaccgaggctattaaaatggcgcgcgccgggctgggccatgagcacaagccggtgggatcgttcctgttcgccgggccgaccggggtcgggaaaaccgaagtgaccgtccagctggcgaaggcgttagggattgagctgctgcgctttgacatgtccgaatatatggaacgtcataccgtcagccgtttgatcggggcgcctccgggctacgtcggcttcgatcagggcgggctgctgaccgatgcggtgattaaacatccgcacgcggtattgctgcttgatgagatcgaaaaagcgcatccggacgtgttcaacctgctgctgcaggtgatggataacgggacgctgaccgataataacggccgtaaagcggacttccgcaacgtggtgctggtgatgaccaccaacgccggggtgcgggaaaccgagcgtaaatcgattggccttattcagcaggacaacagtccggatgcgatggatgagatcaaaaagatctttacgccggagttccgtaaccgcctcgacaacatcatctggttcgatcatttgtctaccacggtgatccatcaggttgtcgacaagtttatcgtcgagctgcaggtccagctggaccagaaaggcgtctccctggaagtgagtcaggaagcgcgcgactggctggcgacgaaaggctacgatcgggcgatgggggcacgtccaatgggacgcgtcattcaggacaacctgaaaaaaccgctggcgaacgaactgctgtttggctcgctggtcgacggtggtcaggtcactgtctctctggacagcgacaaaaatacgctgacttacgacttccagagcgcgccgaagcacaaaccggaagcggcccactaaggcgatatcttcaatgtaaaaaaaccggccaggggccggtttttttttgctgacggcagatgacggcagaaatgaaaagaccgggaattatcccggccttcagcatctgacgccttaggggcgaaaacaatcagcgactacggaagacaatgcggcctttgctcaggtcgtacggggtcagctcaacagtcactttgtcgcccgtcagaatgcggatgtagtttttacgcattttaccggagatatgcgcggttaccacgtgaccgttttccagttctacgcggaacatagtgttaggcaacgtttcaagtacggtgccctgcatttcaatattgtcttctttggccatctagtcctctggggtatcactaccgtagttttgaaccggcaagataatgccgaagttcatcatgtaagtaaagttttacgtatctaccctgaatcattcaccttgccgcaaggcgcatagtcagcgcagcggctacggaaatatgacgggtatgaatcgccgaagtagttttggcgcattgcccgggacacacacggccatgccgcgtgacaggcgcaaacgtaaaggggagtgacagaacgatgggcgttatctgactcttattattcccaaacggcggcggggcaacaggcagaagctactctaccgcgcaattataccatcctgacgcaaaatgtgctgaaaacattttattatccgccaggaaatagcacccgcggcacccaaaatcgctcgggcagtcggtagccgcgtaataccgacagatagtccagataatcgcggcggggaatatccactgcgcctaatgacgcggtatggttgttcagtacctggcagtcaattaatttaccgccgctgtgcgcaaagtcctggcaaaataccagcagcgcgggtttggaggcattttctgcccggctaaacatcgattcgccgcaaaacagcgctccctgcgctacgccgtacattcctcccaccagggtattctcctgccagacttcaatggagtgggcatgacccagctcatgcagctggtgataggcgcgaacgatactgctggttatccaggtgccttcgtcacgatcgctggcgcagccctcaatcacttcgccaaaggcgtggttgagcgtgacccggtagggcgaacgctgatgaaagcgcttcatgctgcggctgagatggaattgctctggccaaagtaccgcccgggggtcgggcgaccaccagaggatcgggtcgccaggggaaaaccagggaaaaataccacgctgataggccatcagcagccgcgcggggctcagatcgccgccgagcgccagcaggccattaggttctcgcaaggcgccttccggagaggggaaggcgatagagtgccgggagagctgaaccagacgcattttaacctcaatacgcatcagcaaaaattagataatagaatagcctacagacgctgtttaaactggaagtaccggccctgtttagcgagcagctccgcgtgactaccttgctcaattatctggccgttgtccatgactattatctgattaaaacccgccaggccccgcaggcgatgggttaccatcagcacggttttgtcgcgcatgacatccgccagcagatgcaggatctggctttcggtggccgcatccagaccttctgtcggttcatcgagcagcatcagcggcgcatcgtggagcagcgcgcgggcaatggccagtcggcgcagttcgccgccggagagctgacgcccgccttcgcctagccagccgttaagaccgccatcttgcagcagtttttcgaggcccaccttctcaagggtagcgctgagatgagcgtcatccgcttcaggcgccgccagcagcaggttgtcgcgcagggtggcgctgaacaggtgcacgcgctgcggcactacgctcattgcctgccgcagagtggcttcgctgaggccggagagcggctgattgttgagcagaatctctccctgtgacgggtcccaggcgcgggtaagcaactgcaacagcgtcgattttccgcagccggtccggccaagaatggcgatgtgctctccggcggcaatctgcagggaaatattctccagggcaggggagggctgctgaggatagcggaaggtgacctcctgaagcgttagggccacctgcgctggcggactggcttcatcttcgacaaaggtgacctccggctgctggtcggtaatctgcgagatccgccgcgcggaggcgatcacctggcctaaatgctggaaagcgccagtaaccggcgccagggcttcaaaagccgccagcgcgcagaatacgaatagcgcgatcagcgccccgggctgactattgccgccgacgccgtctgaggccagccagagcatggccaccacggcgatgccaccgattaacagcattaccgcctgcgaaagcgcggtcagctcggcctggcgccgctgtgcatcctgccagctcagctcggtcttttccatttgtgcgcggtagcggtcgctggcgttaaataccatcagctccgcctgaccctgcagccaggcggtgagctgttggcgatactggccgcgcagctgcgtcatactttcgccggctggcttacctgcgcgatagaacagcggcggcataaccagcagggtcgccagcatgataccgccgagcgtcagcgcgagggtgacgtcgagcagacttaatccgcaggtgacgaccacaatcaccaccagcgcgccgaccagcggcgaaatgacccgcaggtagagatgatccagggtgtcaacgtcggctaccacccggttgagcagctcaccctggcgaaagcgcgccagccccgccggagagagggggagcagtttgctgaaggtgaaaacgcgcaggtgctgcagcacgcgaaaggtagcgtcgtggctgaccaggcgctcaaagtagcgcccggcggtacggataattgccgcgccgcgaacgcccgcggcaggcagcatatagttaaaactgtagatcccggcgacgcccaccaccgctgaggcggagaggaaccagccggagagcgtcagcaggccgatgctggccagcagggtcacaatggccagcacgacgccaagcagcagcatccatttatggcgtttatagagcgccagatagggtaaaagtgcacgcatttaaatctcctcctgacgatgggccagcagcgccgagaagaccccaccagcacgggccagcgtggcgtagtcgccttgttcgataatctgtccgtcctgcatcacccagacgtcgtcccagtcggccagcccctcgagctggtgggtgaccagcagcgtggtttgctcactggaggcgtgggtcagggcctgcatgactcgctgttcgctatgggcgtcaaggctggcggcaggttcatccagcagcagcaggcggcacggcaccaacagcgcgcgggcgaccgcgatacgctgcgcctggcctaccgacagacgccccgcctgatcgcctacggcggtatggatcccctgcggcagcagggcgataaactcgctgacccaggccttgtccagcgccagccgaagctgtgcttcgctagcttcgggccacgccagcagcacgttttcccgcagcgtggcggcaggcaactgcggattctgtcctacccagctcagcaggcggcgccagcgctcagcgtccagctcgcgcagctctacgccgttgaccatcagcgacccctcatagggcagaaagccgagcagtgtattcagcaaagagcttttcccggatccgctctggccgaccagcaccacgcgagcgccggcgggcagcgcaaaattaagcggccccgccagaactttaccttccggagatttgatcaccaggtcgcgcgcttccacgctaatcagatcgttgtcatttaacgttttctcgccacgctctacctgggtcagcggcgtttccataaacgttttcaggctgtctgcggcgcccacggcctgagctttggcatggtagaaggtacccaggtcacgtaacggctggaaaaattccggggcgaggatcagcgtcagaaatcccgccatcagcgtgacgcccgcgccatagtggccgaagttcagctcgccaaggtaagaaaagccaaaatacaccgctaccagcgcaatggagagggaggtgaaaaactccagaaccccggaggagaggaaggccagacgcaggacttccatggtgcgttggcgaaaatcctgcgaggcgtcgcgaatattatcggtttcagcctgaccgcgatgaaaaatacgcagggtttccatgccgcgtaggcggtcgaggaagtggccgctgaggcgggccagcgcctggaagttacgccggttggcgtcggcggcgcccatcccgaccagcgccatgaaaagcgggatcagcggggcggtgccgagaaggattagcgcggcggcccagttaatcggaaaaatagtaataacgatcagcagcggtacgcaggccgccagcgtcatctggggcaggtagcgggcataatagtcgtgcatgtcgtcgatttgctcaagaataagcgttgcccagctgccggccggtttgccctggatccacgccgggcctgcctgctggaggcggtcaagaacctggcggcgaatttcatagcgaatatgctgcccggcctgaaaaccgacccgctcacgcagccagaccacccaggcgcgtagtacaaagatcagcaccagcagcgtgagcggcagcagcagggcggtcgctggaatattctccatcaccatccggtgcaggatccgcgccaggaaccaggcctgcgccacgatcagcagaccgctcgccacgccaagcaggcgggaaaacatcaaccagcgacgggagataatgctttgctgttttaaccagcgggttaactcttgttgacgggttttattcattgcgcgctttgcaggtgtcgttatcggagtattgggcacggcaatgttacatcgcagcaaaaataaaggcgacttttcgtcgccttctttacctttgttactgacttgtaaagattatttgcaagcgtcagccaaaccgtcgaggtaacgctccgcatccagcgccgccatgcagccggtgcccgcagaagtgatggcctgacgatagatatggtccatgacatcgccggcggcgaacacgcccgggatgctggtctgggtcgcgttgccgtggataccggactgcactttgatgtagccgttctccagctccagctggccttcaaagatggcggtgttcgggctgtggccgatggcgacaaataaaccagccacttccagggactcgacattgtcgctgtttttggtatcgcgcaggcgcaggccgctgacgcccatctggtcgccggtcacctcttcgagggtacgatcggtatgcagcacgatgttgccgcttgccactttatccatcaggcgtttgatgaggattttttccgcacggaaggaatcgcgacggtggatcaggtgtacctcagaggcgatattcgacagatacagagcctcttccactgcggtgttgccgccgccgatcaccgccactttctggttgcgatagaagaatccgtcgcaggtagcgcacgcggaaacgccgcggcctttgaaggcttcttcggaaggcaggcccaggtaacgggcggaagcgccggtggcgatgatcagcgcgtcacaggtgtactcgccgctgtcgcctgtcagacggaacgggcggttttgcaaatcgacgcggctgatatggtcgaaaatgatctcggtttcaaattttgcggcatgctcgtgcatgcgctccatcagcagcggaccggtgagatcgttcggatcgcctggccagttttccacttccgtcgtggtggtcagctgaccgcctttttccatcccggtgatcagcaccggctgcaggttggcgcgtgcggcatagaccgccgcggtgtatcccgcaggtccagaaccaaggataagcagtttactgtgtttggctgtgcccatgagatccccataataattggcatacattgggctgggattgtagggaatttgttgtcgtaaaaaaagagcacagcgattttgttaacgatgtgtgcaatagaagctgccaatgaattggtgattttcccggcaaggaatataactatttctactgtcggtgggacaattataagacgaaaaaatgagaatcaaccagggcggatgatgaatatctggcatcttgtactaaaaatcgatgttttgctttgacaatcacctgtgcttttgcgaaaacattcaaggaagaagaaaagcagtatttagcgtgcggcgaattttcatgcacgcaaatgccatttttatccgggttaacgaaatctacgcatggtgtggacagacgccatgcgtgatgtcggtgactgccgtcaggcaacgggcttctcacgtacccctgggttacccaatgtcgtacgggtgataacaggatgggctctggcagtgaaggctcagagccggaacaggagtagggaaggaatacagagagacaataataatggtagatagcaagaagcgccctggcaaagatctcgaccgcattgatcgtaacatcctgaatgaattgcaaaaagatgggcgaatttctaacgtcgagctttctaaacgggtgggactttctccgacgccttgccttgagcgtgttcgtcgtcttgaaagacagggttttattcagggctatacggcgctgctcaacccgcattatctggatgcatcacttctggtatttgttgagattactctgaatcgtggcgcaccggatgtgtttgagcaatttaacgccgcagtgcaaaaacttgaagaaattcaagagtgtcatctggtttccggtgatttcgactatctgttgaaaacccgtgtaccggatatgtcagcgtatcgtaaattactgggcgagaccttgctgcgcctgccgggcgttaacgacacccgtacctacgtggtaatggaagaagtcaagcaaagtaatcgtctggttattaagacgcgctaacacggaacaggtgcaaactcgacgtagtttgattacactcctgttaatccatacagcaacagtgccggggagacccggcgctgttgtccgttttagcagcaggcaggaaacagcctgatacctggagagcctttcttgagccaggaatacaccgaagacaaagaagtcaaactaaccaaactcagcagcgggcgccgactccttgaggcgatgctcatcctttgctccctcttcgccatctggctgatggcggcactactgagctttaacccctcggaccccagctggtcgcaaacggcatggcatgagcctattcataatttaggcggcgcccccggcgcgtggcttgccgataccctctttttcatttttggcgtcatggcctacaccatcccggtgatcatcatcggcggatgctggtttgcctggcggcatcaggaaaacgacgaatacattgattattttgccgtttcccttcgcctcatcggtgcgttagccctgatcctgacctcctgtggtctggcggcgattaacgccgatgatatctggtacttcgcctccggcggggtgatcggcagcctgctgagcaccacgctgcaacccctgctgcacagcagcggcggcaccatcgccctgttgtgtatctgggcggccgggctgacgctgttcaccggctggtcgtgggtcagcattgcggaaaagctgggcggcggcatcctgtccgttctcacctttgccagcaaccgtacccgtcgggatgatacctgggtcgatgaaggcgaatacgaagacgacgaggaagagtacgacgacgaagaggcggccaggccgcaggaatcgcgtcgcgcccgtatcttacgcagcgcgctggcgcggcgtaagcgtctggccgagaagtttaccaaccctatggggcgtaaaaccgacgctgcgcttttctccggcaaacggatggatgacggcgaagaggtggtgcaatacagcgccagcggggcgcctgttgccgccgacgatgtactgttttccggcgccagcgccgcgcgtcccgcagaggatgatgtgctgttctccggcgccagcgccgtgcgcccgggcgatttcgacccttacgatccgttgttgaatggccacagtatcgctgagccggtaagcgcagcggcggcggctactgccgcgccgcaggcgtgggcagaatcaccggtgggccatcacggcgctgcgccagcttatcagccggaagccagctatccgccgcagcaggcctatcagcctgaacccgctccgttccagcaggctgcttatcagccgccagcggggcaaaccgcaccgcaggcgtatcagcctgagccagcgccgtatcaacagccggtttacgatccgcgtgccggtcaacctgcgccgcaggcctatcagcctgagccagcgccgtatcagcagccggcttacgatccgtatgccggtcaacctgcgccgcaggcctatcagcctgagccagcgccgtatcagcagccaacttacgatccctatgccggtcagcctgcgcctcagacctatcagcagccggcttacgatccgaatgccggtcagcccgcgccgcagacctaccagcagccggcttacgacccgcatgccggccagcccgcgccgcagccgtatcagccggagccagcggcgtatcagccgcaaagcgcgccagttcccccaccggagccagagcccgaggtcgtgcaggaggaagtgaaacgtccgccgctctattatttcgaggaagtggaagagaagcgggcgcgcgaacgcgagctgttggcctcctggtatcagccaattcctgagccggaaagtccgattgccactaaaccgctgacgccgccgaccactgcgtccaaaccgccagtggagacaaccgtagtctctgcggtagcggctggggtgcatcaggctaccgccgccagcggcggcgcggcggcagcaacctcgtccactgccgcatccgctgcggctacgccattgttcagcccggcgtccagcggcccacgggttcaggtgaaagagggcatcggtccaaaactaccgcggcccaatcgcgtgcgtgttcctacgcgtcgggaactggcctcctacggcatcaagctaccgtcgcagcgggaggcggaacagcgcgcgcggcaggcggagcgcgatccgcattatgatgatgagctgctctcggatgaggaagcggatgctatggagcaggatgaactggctcgccagttcgccgccacccagcatcagcgctacggtcatcgctgggaagacgataacgcgactgatgacgatgaggccgacgccgcggcagaagcggagctggcgcgtcagtttgccgctactcagcagcagcggtacgctaccgagcagccgccgggcgccaacccgttctcgccggcagattatgaattctcgccgatgaaaacgttggtcaatgacggcccgagcgaaccgctgtttacgcccacgccggaagtccagccgcagcagccggcccagcgctatcaacaaccggcggcagctccgcagcagggttatcaacctgcgcagcatcagccgatacaccatcagcctgtgccgccgcagccgcaatcctatccgactgcgtcgcagcccgtacagccgcaacaaccggttgccccgcaggggcatcagcctgccgcccctgcgccgcaggagagcctgatccacccgctgctgatgcgcaatggcgataggcgaacactgcaaaagccgaccacgccactgccgtcgctggatctgcttaccccgccgccgagtgaagtcgagccggtggatacctttgctctcgagcagatggcacgcctggtggaagcgcgactcgccgatttccgcattaaagcggatgtggtgaactactcaccggggccggtgatcacccgcttcgaactgaatctggcgcctggcgttaaggccgcacggatctctaacctgtcacgggacctggcgcgatcgctgtcaacggtcgccgtgcgcgtggtggaggtgatcccgggcaaaccgtatgtcgggcttgagctgccgaataaaaaacgccagaccgtctacctgcgtgaagtgctcgacaacgccaagttccgtgataacccatctccgctcaccgtggtgctgggtaaagacatcgctggcgatccggtagtagccgatctggcgaaaatgccgcatctgctggtggccggtaccaccggttccggtaagtctgttggcgtcaacgccatgatcctcagcatgctctacaaggcgcagccggaagatgtgcgtttcattatgatcgacccgaaaatgctcgagctgtcggtctacgaaggaattccgcacctgctgacggaagtagtcaccgacatgaaagacgccgccaatgcgctgcgctggagcgtcaatgagatggagcgccgctacaagctgatgtcggcgctgggcgtgcgtaacctcgcgggctacaacgagaagatcgccgaagccgcgcgcatgggacgtccgatcccggatccgtactggaagcctggcgacagcatggacgccgtacatccggtgctggaaaaactgccgtacatcgtggtgctggtggatgaattcgccgatctgatgatgaccgtcggcaaaaaggtggaagagctgatcgctcgcctggcgcagaaagcgcgcgcggcggggatccacctggtgctggcgacacagcgtccgtcggtagatgttattaccggcctgattaaggccaacatcccgacgcgcatcgcctttaccgtgtcgagtaaaattgactcacgtaccattctcgatcagggcggcgcggaatcgctgctgggtatgggggatatgctttactccgggccgaactctaccacgccggtgcgtgtccacggggcgtttgtgcgcgaccaggaagtccacgccgtggttcaggactggaaagcccgcggtcgcccgcaatatgtggatggcattacctccgacagcgaaagcgaaggcggcggtggcggcttcgacggcggggaagagctggatccgttgttcgatcaggcagtcaactttgtgaccgagaagcgcaaagcgtcgatttccggggttcagcgtcagttccgcatcggctataaccgtgccgcgcgtattatcgaacagatggaagcgcagggtatcgtcagcgagcagggccataacggtaaccgcgaagtgctggcgccgccgccctttgaatgagtgcaaagttgggtaaataagcgcaaaatcagccaattcttctgtcccgccgccgccggcggtcctacagtaggggcagaagaggctcccgcgtcgggagtgacgcacattaaggaagaacaatgaaaaaactcgcaatcacctgtgcattactgtctggtatggtcgtcagccaggtctgggcagatgcggccagcgacttaaaaagccgtcttgataaagtgagcagcttccatgccagcttcacgcaaaaagtcaccgacggtagcggtaacgccgtgcaggacgggcagggagacctgtgggtgaaacgcccgaacctgtttaactggcatatgacccagccggatgagagcgtcctcgtttcggatggtaaaacgctgtggttctataacccgttcgtcgagcaggccacggcgacctggctgaaagacgccaccagcaacacgccgtttatgctgattgcccgcaaccagtccagcgactggcagcaatataatatcaagcaaaatggcgatgattttgtgctgacgccaaaaagcggcagcggcaacctcaagcagttcacgatcaacgtcggtcgggacggcactatccatcagttcagcgccgtcgagcaggatgatcagcgcagcagctatcagctgaaatcgcagcagaacggcgccgtcgacgcagctaagttcacctttacgccgccgaaaggggtgacggtggacgatcaacgtaagtagaggcgaaagtgagcaatctgtcgctcgatttttccgacaacgcgtttcaacctctggccgctcgcatgcggccagaaaatttagcgcagtatattggccagcagcacctgctggcgccgggtaaacccctgccgcgggccattgaggccgggcacctgcattcgatgatcctctgggggccgccgggtaccggcaagaccactctggcggaagtgattgcccgctacgccagcgccgatgtcgaacggatctcagcggtaacctccggggtgaaagagattcgcgaggctattgagcgcgcgcggcagaatcgcaacgccggccggcggaccatcctgtttgttgacgaagtgcatcgctttaataaaagccagcaggatgcctttctgccgcatattgaagacggtaccattacttttattggcgcgaccaccgaaaacccctcctttgagcttaactcggcgctgctctcccgcgctcgcgtctacttactgaaatcgctcaccaccgacgatatcgagcgggtgcttgaccaggcgatgaacgataaaacccgcggctacggcggccaggatatcgttttgccggatgagacccgcagggccattgccgagctagtgaatggcgacgcgcggcgagcgctgaataccctggaaatgatggccgatatggccgaaagcgatgactcgggcaagcgggtgctgatggcggaactgctgaccgagatcgccggcgagcgaagcgcgcgctttgataataaaggcgaccggttctacgactgtcgcttatacccatctgacgctgccgacgcgcgatcgcgggtagatctcggtggtcgccgtggcagtaaaaaaacaagagacacggcagacaaagataacggaggcacgacaaggcacgacgcgagagtgatg

SEQ ID NO: 149 - DNA, 67071 bp, Unknown
  source: /note="Description of Unknown: MKP2_2161_1 Mutant Bacteria sequence"
gcctcaacatcgctgagacgttcccggaaggccggggcagcccgcatggatgcgggctgagggccgtgttttgcacggacgctgcctcggcccgacccgaagcctgcagggataagtcgaaggcaccgcgcagcggcgatgttgctggccggagcccgggggtacagggggcggcggcgactggccgccccctgtgcgctccctgcgccatgaatgacataacgcagacaattaaccgggagcgcaaactacgctgaagccaccgataacataaacaacaacactgcagtgcttcccctcaccctggccctctcccgaagggagagggaactgtccggctggcgtttaggcccgtgcaagcgcagcgccgccgggcaataatcaggcacggtacccgtgatgttgccgggtggcggctgcgccttacccggcctacaggatccattcacaggctcacaccccgtaggcccggcaagcgcagcgccgccgggcaagatatcaggcacggtatccttgatttcgccgggtggcggctgcgccttacccggcctacaggatccactcgcaggctcacaccccgtaggcccgtgcaagcgcgccgccgggcaacagtatccggcccccgcccctacttcgccaggctggcaaagcgagcaaagaccgcatcaaaaatcgccagcccttgcgccacctgctcagcagtaatggtgcacggcgggaccacatgaatgcggttctccaccacaaaggccagcagcccggcttcggtcagggcccctttgatcgcagccatgtcggcggcggtcagcggcgttttttgttcacggctgctcaccagctccagcgcctggaacaggccgcgaccgcgcacctcgccgataatggcgtgcttctccgccagcgcctcgagaccggggcgcagcacctcgttgccgatagaggccgcgttctcaaccaccttctcctctttcatcgcgtcgatggtggcgacaatcgccgccatcgccagcggatggccggagtaggtcagccccccggcaaagaagtggtcgtcaaagtagcgggcaatcggctcgctaatcagcaccccgcccgccggcacgtagccggcgttaacccccttggcaaaggtcaccagatccggcaccacgccatcctgctcgaaggcgaaccagctgccggtacggccaaagccggccatcacctcatcgaggatcagcacgatgccaaactcgtcggccagggcgcgcacgccctgcatatagcctgccggcggcacgaggatcccggcggtgccggggatggactccagcaggatcgccgcgatggccgtcggcccctcgcattcaatgatccgccgcagatgcgccagcgcgcgctggcactcctcttcctcagtcgcggcgttgaactcgctgcggtaaaggtaggggttgaagaagtgaacgtggccgcgggagaactcattcggcacccggcgccagtcgccggtagcggcgatcgcgctgccggtgttgccatgataggaacgataggccgacagcaccttgtcgcgcccggtatagagacgcgccatgcgaatcgcgttctcattggcatccgccccggcgttagtgaagaacaccttactgaagcccgccggcgccaggtcgacgatgcgcttcgctgcttcgccgcgggcaaggttggcggtggcgggcgcgatggtgaccaaggtttccagctgcgccttcatggccgccagtacccgggggtgctgatagccaatgttgacgttcaccagctggctgctgaaatcgagccaggtgttcccctcataatcccatagctcgcagccttgcgccccggcgatgaccagcgggttgagattgccctgcatcgaccatgaatgaaacacataggcgcgatctaattgccgaacttcgtcattgcttaccgcgacctcgttgtgaattgccagcttcataccctgccctctctcatgtcgtagtggttggcttcatcattggccttggccgcgcaaatcggatagagccagtgcgcgcataacgatgtgacacggtgtcacatccccgcccgtcgtctggctctgtgccttgtcgtccggcgtttttatagtgaagggacaaccgcacaggagaatgagatggcaacgagcaacgtagtgtttatcaccggggcgacctcgggttttggcgaagcggcagcgcaggtgtttgccgacgcgggctggtcgctggtgctgagcgggcgccgctatccgcgactgaaggccttgcaggacagactcgccgccagggtgccggtgcatattattgagcttgacgttcgtgacagcgaggcggtggctgccgccgtggcgtcgctgcccgccgatttcgccgatatcaccaccctgatcaacaacgccgggctggcgctgtcgccactgccggcgcaggaggtggcgctggaggactggaaaacgatgatcgacaccaacgtcactggtctggtgacgatgacccacgccctgctgccgacgctgatccgccatggcgccggggcgagcattatcaatatcggctcgatcgccgggcagtggccctatcccggcagccatgtgtatggcgccagcaaggcgtttgtgaagcagttcagctataacctgcgctgcgatctgcttggcaccggcgtgcgggtcaccgatctggcgccggggattgccgagaccgaatttaccctggtgcgaaccaaaggcgaccaggcggcatcggataagctctatcgcggcaccacgccgctgagcgcgcgcgatatcgccgagcagatgttttatatcgccacgctgccggcgcatatgaacattaaccgggtggaggtgatgccggtgcgtcaggcgtggcagccgttcgctatcgaccgggattaagcgaaacccgacgcatcccctgtcggcgataccggcaggggatgcaggccggactaacggctgctttgcagaaactgcctgacgcgttcggagtcaggctgagtgaagaacttctccggcggcgccttctcaatcagcagtcccttctccagaaacaccacctcattggacacctggcgggcaaaatccatctcgtgggtcaccaccaccatggtgtagccctcggcggcaagggctttcattacccccaacacctcattaaccagctccgggtccagcgccgacgtcggttcatcgaagagaataacttccggcgacatcgccagcgaacgggcgatcgctacccgctgcttctgtccgccggagagagtgatcgggtagacatcggctttgtgcgccatgccgactttctccagctgctgcatggccatggcgttcgcctcgtctcgtttcatgcccttaacgcgcagcagcgcctcgctgacgttctgctgcacggtcaggtgcggccacaggttaaaactctgaaagaccatccccacccgctcgcggattttggccagctggcggtgcgacatcgcccggccgcgctgttcatcaatccccagccgctgaccgccgatatgaatttcaccgcggtccggctgttccagccagttcatacagcgcagcagggtggattttcccgacccggacgagccgagaatactcaccacggtccccttctccaccgtcaggttaatatcccgcaggacttccacattatcgaactgtttggagacgtttttgacgcttacggcaatagactcaggcatggctcattcctcttttggctccccaggcggtcaggcgcttaatcagcagctccagcagaatgctgatcgcccagtaaagcccaatggcgacgataaaggcgttaaacggaataaaataggtcgcctggacgctgttggcggcggcggtgatctcctgaacggtaataatgctcaggaaagcggtgtccttcaggcaaataatcagctgattgccgatcagcggtaaggcggaagagacgatattgggtaaaataatccgccgaaaaatggcatagcgagaaaagccctgagcaatcgccgcttcaatatatccgccggaaaatacccgccgctggctgcgtaatatttcaaagaaataggcgccatgataaataatcagggccagtaaaccggcggtccacggctccatgctaataccgagctgcggcagtccgtaatacagaagataagcgaggatcaaaaaagggatcgcgcgcatcaggctgacgaaaccaataataatccggttaatcactttcttttgatattcgctaaaataacacagcgcaataccgataatcagcgccgccagggcggcggtaataaacagttcgagggtcgcgaataacccggcaataaagctatcgcgaaccgaccagataacgccccactgattcataatgcctcccgttcctagcgcgccagacgcctggctttacgttccgcgataccctgcagcttcaacaaacagccgatgatcgccacatacagcaggccggcggcgaggatcggcgacagcggctcgtaggtgaccgaggagatacggttggtgacccgggtgagatccaccacgccaatcacggcgatcgccgggcttcctttgatcaaaaaggacatctcattgaccagcgccggcaggctctcgatccacatctgcggcagcatgatgtagcggaagtaggtccagcggcgcatccctaccgactccgccgcctcccgctgttcgcgcggaaaggtgcggaaggcattgcgccagatctcagcgttaaacgccgacgtgttaagcgtcagcgccacgatggcggccacgttcttgtcgaggttaatgcccatcgtgggcagggaaaggaacagaaatagcaccagcgtcaccagcggcgtcgcgcgggccagactgatatagaccaccagcagctggtcgatcaccggcaggcgcagcatccgtaccagggcgatcagcaggccagccaccaccccgaaggcgatagcgatggccgaaatccagagggtcgtccatgcgccttcgattaataactgccaggaaattgcatccatgaggccctccttctcaacaacaggcggcggtcgcccgccgcggaatattacagtccggcgagtttgtgaaactgttccgggctggtgatcgcctcggtcggcaggttgtcataggtttcgccgaaccattttttctgcagctcggcgagcttgccggtctccttcatgtggttcataaacctggtcatataggccagcagctgcggcgagtttttcgggatcggccacgccatataccccggtccggagacggccagccctttggcgaagaccttcggtttggctttcgccaggtcgtttaccgagatcaccacgttaatcacgtaatccagtcgcttgttcgccaggtcggcgtaggcttccggataggagggatactccaccaccggccccagcttgccgccggtcttctccagcatcgccttcagctccggcaaacgcgccagcagcgcgctcccggcctgtaaccccacttttttgccgctgagatcggcaatggtatttagcgaggtatcgccagcgcgtttgacgaaatagtgctgcgcggaggcccacggtggggtgaaatcaaagaccttcagccgctcatcggtaataaccgccccggttaaggccatatcgtattgcccggtggagacagccgctaataatccggtccacggtaatatgctctggtcgacatggaatttggcgtacttacgtaattcctcaagcatatctttgttaaagccatcggcctggccattattcataaagttaaatggcgcataatcatcttccgtcgccactttcaaggtgccggatttttctatttccggaagatcggccgcgacggcgtgataagaaaaagcgaccgttaatacagcgctcagacacattgatgccaatgattttttcattatttcacccctgatggattggccagacgggttcattccagaacgcgaaaaggtttctgcaaaatagtggccggggacgttccggtccacggcggctgaatacgtttttaatgtgggagcgtttttcaattccgtatagagccagatgggccgcatcgctgtgtcagatggcggcagggtggtatggaatttgctgagcgtaacgggtggtcgcaatgcgttattgccagaggagccccgtatgatccgtcacctgttacacgttgattttcagcctggccgcggtttgcaggaacaggtgcgagagacgctggtgaatgccattctcagcgggatcttcgccgccgacaccccgctgccctcctgtcgccagttggccagccagcttcgcgtctcgcgcaacaccaccgcgctggtgtttgaaagtctggtcaacgagggctacctgattagccgcccacgcagcggttactacctgcatcccgactatcatgaagcttcgcctgccgccgtcgagagtgcaccgcagcgcgaagcggctgcaccacgctggggcgaccggctgcagatgacccccagccagcaggagtcgatcctcaaaccggcgggctggatgcactaccgctacccgtttatctacggccagcccgatacccggcaagtcccgctggccacctggcgctcggcggcgaactggctgcacggcggggtgcgcgacccggcgtgggtcatcgaccatattgaccaggatgtgccgatgctgatcgagcagatccgcacccgggtgctgcccaagcgcggcattgtcgccgcgccggatgaaattctcatcacccttggctcgcaaaatgccctctacctgctgacccgactgctgctctcttccaccacccgcattggcgtcgaaaacccctgcttccgcgaagccatcaacacctttctgctcgccgacgccgaggtggtgccgcacccggtggatgaagaggggatcgtgcttaatgagcgtccctgcgattactactatgtcactccaggtcatcaggtgcccaccggggtgaccatgagcagtgcgcggcgtcgccagttgctggagcatgccgcccgccatgacgcggtcattattgaagatgattatgactcggagagtaactttaccctcaacccgctgccggcgctgaaggccagcgatcgcagcggccgggtggtgtatgtcagcagcctgtcaaaagcgctgtcaccggggctgcggttggggtttatggtcgccgacccggacctgatcgacgaggcgcgcgccctgcgccggctggtctatcgccatccgccgaccaacattcagtaccagatggcccacttccttgcccagggccattatgaaacccatctgcggcgctaccactttgactccgcccagcgctgggagcgtctgcacgccgccctgcagcgctatctgccgtcgtgtcgcgcgctggcgggaagcgaacatgctaacgccttctggctgcagaccccggcgcagatcaacacccagcagctcacctggcgcgccgcccacgccggcgtgctgattgagcccggggcgcgccattttcttaacgccgcgccgccggataactattttcgcatgggattccacgccattaaccccgacgccatcgcccagggggtggaggtcctgcgcggccagctggagcagatgggttagcggtattgttcatactcaacggcgtcgcgcacgctgagcagcgccgggcgcaggctgtcgaaaggcaccgatccgagcgcaatgcgcagcgcctgcgggatcgtggcggagacgcagaacggctcggcggtcgataccgaaatgcggcgttccatcagcgcattcgccagccgatcggcccggctctcttcacccagcggcagccagacgaagtacgaatcgggatgactgacgacgggaagcccgcaaagtacctcgcgggccacctgctgtcgctgtcgcgcatcctggcgtttctgcgtttcaaagcgcgccaccgtgccatcttcaatccaggcgcagatcagcgaacttatcagcgtcggcgtattccacgtcgtggcccggatggcgcgctcaatctccgggcgatagcgcggcggagaaatcaccacccccacgcgcagtccggtggcgatattttttgaaaatccggtgacatacaccgttctttccggcgcatagctgaccaccggcggcggcggatggctcaccagccgggcataggcggcatcttcaataatcagcagatcgtgctggcgcgcgagatcggccagcgcctgtcgctgcccggtgttgagcacccagcccagcggattgtgcagcgtcggcatggtatacaccgcccgcacccgccgctgctggcacagcgtctgaagcgcctgcaggtccggtccctccggtcgacaggggatcgccgccagctccagatgatacagcgccgccagaaccttgaagcccgaataggtcagcgcatccaccgccaccacatcccccggtcgtaacagccccatgacggtcaccgccagcccgtgctgtgcgccgttgacgatcaggacattttccgcgtccggcgcaaagggctggcaggtcaaatggcgggcgataatgtcccgctcggcgagccgccctgcatgaggctgatagcgcagatgcgagtcaatatcgcccgccatcgccagctgcctgagcgcctcgcgcagcgcatcgccctgctccggcagcgaagggtagttgaaattaagatccacgacatcggcggcgaccacctgctgatcgaccccgtgccccggaggcagcgagaggtcgcgcacgaaggtgccgcggccggtttcgccgctgaccaaccccatctcttccagttcacggtagacgcgcgtggcggtggccagcgagaggcgttctccggcggcaagggtacggtgcgtcggcagacggctgccggcgggcagctgcccgctgcggatcgcctgcgcatatcggtcgacaacggctttatatcgggctttcatcgtgaaatgtatctatgacaataatttgattgtattagattggccacattaccatcgccgctgacgatgctcaagcgggcgcagcccaatcagataacgcgaggttaacgtggtagattcagcaatggataaatcggcgcccggtccctggtccggatgggttcatggtttactgggggtgatcattttcagcggttcgctgcccgcgacgcggctggcggtgcaggatatggatccgttgttattgacctttctgcgcgcctctatcgccgggctgcttgccatcgcgctgctggtgggctttcgccagaaacgcccgcgcctggcgcagcttgtgtccctgatcatcgtctcatccggggtggtgctcggctttccgctactcacggcgctggccctgcagcgcatcacctcggcgcattcgattgtgtttattggcctgctgccgctgatgaccgccctctttggcgtactgcgcggcggcgaacgcccgcggcgggctttctggatcttttcgctgctgggcagcctgctggtggtgggattcgccctgacgcaaaatgcggcggcctcactcagcggcgatctgctgatgctggcggcggttatcgtctgcggcctcggctatgcggaaggggcgaagctgacgcgggagctcggcggctggcaggtgatctgctgggcgctggtgattgccctgccgttgatgctccccgcctcgctgctggttcagcccgcctcctggcatgccatctcggcctcctcctgggtcgcgctcggctatgtgtcgctgttcagcatgctgatcggcttcatcttctggtacaaagggctggccgcgggcgggatcgccgccgtcggccagctccagctattgcagccgttcttcggactaggcctgtcggcggcgctgttgcacgaaaccgtcagccccttgatgctggcggtcacgctgggcgtggtgctgtgcgtggtgggctcgcgcaaatttggccgccagcgggttggcgcagggagcccgagccgtgattgaccgccccgtcatccgccgtcccgggtcgcggcggcgtaaccgccttacccgggctatagcatgataaacggctggaggtcgcgtcgccggggcggacgaccgtctacaccggccgcgcgtactgaagcatcacctgcagcagcacgttggcgccggcggcgacgtgctccggcgaggcatactcaatttcgttatggctgatcccgtccttgcaggggataaaaatcatcccggtgggcgccaggtagctcatatacactgcgtcatgcccggcgccggagacgatcggccgcgccggatagcccagccgctgcgcggcatcggcaatggcctgctggcattcggcatcgaacggcgccgccggatagtggcttacctgcttcagggccacctgcagaccgctctcccgctcaacctccgcgataaacgcccgcagctggcgatccatctcgtccaccagcgcatcgctgagattgcgcatatcaatggagaaggtgacctccccgggcaccacgttgcggctgttgggccacacctgcacgctaccgaccgtgccgcgtccctcttcgctgcgcccggcaatggccaccacttcctgcataatgcgggtcgccacctgcagggcatcctgacgcaggcgcatcggcgtgggtccggcgtgcgaggcctggccggtgaccacgcagtcgtaccagcggatccccagcacgccctgcacgataccgatggttttcgcttcatcttcgagaatcggcccctgctcaatgtgcgcctcaaaataggcgccgatgggatggtcccccggggtctgctcgccaatatagccgatctgcgccagcgcctcgccgacgctgatgccctctttatccgtgacggcccaggtctcctccagcgggaagacgccggcaaagaccccggagcccatcatcaccggcacaaagcgcgacccctcttcgttggtccagaacaccacctcaatcggcgcctcggtggcaatctgcagatcgttgagcgtgcgcaccacctccagcgccgccagcacgccgtagttgccgtcaaatttgccgccggtgggctgagtgtcgatatggctgccggagacgatgggcggcaggccggggttgcggccttcccggcgcataaatacattgcctattttatcgatggtgacgctcatcccggcctcccgtgcccagcctattaccttgtcccgcccctggcggtcgaggtcggtgagggtcagacggcggcagccgcccttcggcgtggcgccgatctgcgcgagatccattaacgacgcccacaggcggtcgccattgatgcgccagccggtggtgtcggtcgcgggggtaaaaagtacatcactgctcatggtagtctcctgacatcaaggtcgccgccagcgtaaccggcggtgggaatgcgctatcaacgcctggtcttcatcctgtatggttttttgccgccgatcagacggccagggcctgggcgttagcgtcaatcgccagcgcgcgccagcggtggcaactcaccgcgtggcgctccgcgacggattccgtcggcggcagactctgctcacagaccgggcgacggtgcgggcagcgctcggcaaaggcgcagccgggcggcaagcgagccagatccggcggcgcgccgggaatgcagtgcagggcatcacctttcttaagcccctctttcggccgactgcccagcagcacctgggtataaggatggcgcgggtggcgcaggatctcgctcatcgacgcttcctcgacgatccgcccggcgtacatcaccgccacccggtcggcgatctccaccgcggcgccgatatcgtgggtcacaaacacgatcgacagcccgcgctgcttttgctgctcgcgcagcaggatcaggatctggatttgcaccgtggcgtcgagggcggtggtcggctcatccgccagcagcagcttcgggttacaggagagcgcaagggcgatcatcgcccgctggcgcattccgccggacatctcgtgcgggtaagcatccagccgccgctcggggctgggaatgcgcacctggctcagggcctccagcgccctgtcccgggccgcctggcgcgacagcccttcgtggcggcgcaacccttcaataatctgctgcccgacggtgtagaccggatcgaaggccagcagcggctcctgaaaaatcatcgcgcagcgtccgccgcgatagcgccgcagctggctggcgctcatcgtcagcacctcgtcatcccccacctgcagggtgccggagagctcactgctccctggcgggtgcaggcgcatcagcgcccgcagggtcacgctcttgccggaacccgactcgccaatcagcgccatcacctcccccttttgtacctcaaaggagactccattgaccgcgttgatggtctgcccgtcgcggcgaaagacgacccgcaggtcgcgcacatggacaaaggcgttatccgacatggctgacctccttaagggggatgctttgatgccagggcgaggccggctgcgccatcaggcaggcgctctggtgcccctccccgaccgcctccagccgcggtttcacctcggcgcagaccgccttcgcatgcgggcagcgggtgtgaaagcggcagccgctcggcggcgcgatggggctggggggatcgccgcttagcggcgaggtcagggtgcggttttccgggtccatggagggcatcgagcttaacagcgcccgggtataggggtgggcggaggcggtaaacagctgctccgccgggccaatctccaccacttcgccaaggtacatgacgaggatccgatccgacagccagcgaaccacgtgtagatcgtggctgatgaacacgtaggtcagctcgagagtccgtttcagctcctgcagcagctgcagcacctgggcttccaccgatttatccagcgccgacacagcctcatcgaggatcaccagccgcggcttcatcgccagcgcgcgggcgatattcacccgctgccgctggccgccggagagcgcatgcgggtagcggtcggcaaagcgcgccggctcaaggccaacgtgcgccagcagatagctggcatattcgctggcctctctggcgctgacgccgtggacgcgctggccgaaggcgatgctctcctccatggtcaggcgcggattgagcgaagcatagctatcctggaaaaccatctgcacctggcgacggtaggctttcagcggcagacgtgacgagccgaccccctgtccgtcgaagatcagttcgccgctgtcctgggtgagcaactgcatcagcagccgggcggtggtcgatttgccgcagcccgactcgccgaccacccccagggtttcgcctttcatcaccgtgaagctgatatcgtccaccgcctgcaccacctcccggcctttgccgccgcgaaagtacttcagcaggtgattgaccttcagcagcggctgcgccggcccgccaaggtcgatattgataaagggttgcatcgcttactccttaatcgccattgccgcacgcaggcggtccgcgaggatattgaacgaaatggaggtgataaaaatcatcaggcccggcagggcggccacccacggctgggtatagattgccgtgcgcagcgtattgagcatcagcccccactcgggctccggcggccgcacgccgaggccgagaaacgacaggccggaggcgaggatcatgcacaccgaaatcagcccggtggagaagacgaagatcggcccgagcacgttgcccaacacctggacgcggataatggtcaacgcgctggcgccagtggcccgggcggcgtcgatatagtccatatgccgcacctgggcggtcacgctctcggcaatccgcgccacctgcgggacaaacacgagggtcagcgacaacagcgcattgccgatgcccgcccccaacgctcccgacagcgcaatcgccagcaggacggagggaaaggcatagaacacatccacggtgcgcataatcacggtattggttttgccgcccgtatagccggcgataatcccgatggccccgccgataaaaaaggcgaacaccaccgggacaattcccataaacagcgacagtcgggtgccaaggatcagccgcgacagcatgtcgcgtcccagctcatccgagcccagcgggaagccgtcgctgccgatgggtttcaggcgcaggaacatcgacgtttgatagggatctttgacgataagccacggaccgaacagcgccagggccagcagcaggaggatcaccacgcccaccaccaccccgccggggtcgcgcagtaggcggcgcagcacgccgcgccagtaaccttgccgggtagcgtgggccgctgcggccgggaccgctttcgtcgttgccgtatccaccatggtcagctcctcttaatacgcggatcgagggtggtctgcagaatatccaccagcaggttgagcagcacgaaaaacagcgccagcacccagatggtgccctgcagcaggggcaggtcgcgctgaaaaatggcggtattgagcagcaatccggttcccggccaggagaaaacggtctccacaaggatcgagccgcccatcagatagcccacctgcagccccatcaccgccagcgcggtgggcgcggcatttttcatgacatggacaaagatgcgcgactcgttgagcccgcgggcgcgcaggccaacgataaactcctggctgaggatatcggccacctgcgagcgcacggtgcgggcgataatcccggtcgggatcaccgacagggtgagggccggcagcagcatgaactgcaggtgcgcccagtcccattgccagcccacctcgcctatcggcccgccgccggtggccggcagcagcgcgaacttgacgctgcagaggatcaccagcagcatccccagccagtagtgcggcacgctgacgccaaacaccgacaataccgaggccagacggtcaatgacgctgttgcgaaaatagccagcgacaaagccgaacaggctgccgaggacaaaaccgatcgccgtcgccagcagcgccaggcgcagagagtaagccaccgcggtcatcacttcgtctatcaccgggcggccggtggcgaccgacataccaaggtcgccgtgcagcgcccgccacagccagtggataaactgcaggggcagcggcttatcaaagccgtaagcctgcattaatgtctgacgcagcgcctccgaggcgtccggcggcatcaccgacaccagcgggtcgcccggggcgatctgcaccagcatgaaacagatcaccgccacccccagcatggtggggatagccagcagaatgcggtatagcagcgtattgatcatcggtcgcccctttcgcgattactcttttttgctcaccaggctgaggtcgataaaccagctctgcggttgcaccaccccggtcaccgcaggggaaatcgcacgcggcccgacgtcgtgggcgacaaacaggaatggcacctgatccaccagcgcggcgtgcaactcaccggccgctttgttcatctccgccggggtaaaggcgtgcttgacggcggcggccagcttctccgtctccggcgtggaaaagtaaccccagttggtcgccaccggcggaaacgctttggccgtcgagaagcggatcaggccaaagtaaggatcgttaaccgcggcgctgacgttgatcgcatcgatccctttcgccgaggggtcccgggcgcccaggcgccagttggtaaacagggtgttccattccaccactttgatatccacattgaagaagcagctcttcaggctctgctggatatactcgttcatcggcaagggctgcatctgcccggagccggaggccgaggtagccaccgtgacgcgcagcggtttgctggcattgtatccggcctcggtcattagctggcgggcggcgtccgggtcatattttatctggaaggtgggtttgccatgccacgggctgtcagcctcgtagaccccagtggcctcggtcatgtagccgccgaggtagctcttcagctcggcacggttcagacacaagttggccgctttgcgcacgcggatgtcctgccacggcgatcctttttcaaaggagaactgccagggccacagatgcggctgggtgttggcgtagaggtgaaaaccctgagacttgatctgatcgatggcgtccggcgccggggcttcaatccagtccacctgcttcgacaacagcgccgcggtacgggcgttggcctccggcaaggggatcagcaccactttatccacccggggaatgcgatctttgttccagtagtcggggtttttatcgaggatcagctgctgacgcggcaccagcttctccagtttgaacgggccgctacccaccgcgtgggcggcgaaggcggtccacgcctgtttgctgcgcgcggcgctatctctcacgctggccggcaccgcgtcatactgcttctgccacgccgtcggcgagacgataaacaggttggtgatgttgtacggcagcagcgcatccggttccgaggtggtcagcgccacggtgtggtcgtcaattttctctgcgccggtgagggtcggcatgcgcgacagggtgttgccgatctgacccggggcgtactgcggcgccgctttattcagcaccttatccacgttccagacgatggcgtcggcgttcacctccgtcccatcatgaaacttcacccccggacgcagggtgaaaatccagcggctggtgttctgcggatcgatgtgccactcggtcgccagccccggcaccagaccgctgggcttttcaccttgcgacagatcccactccaccagcgcgtcgtacagcgggatgccggtaaagcggttgccctcatagccttgatccggctggccaagggttaacggaatatccgcggcggtcatggcgatccgcagcgtggaggcgttggcaggtaaggcggcgcccgccagggccagtgcgccgctcaccgccacggcgagacgaccggcacgcgaaaataacgtctttttgtgcatcacatgatccctgttaaataaagtgtcacggattaacaggcaaaatgcgtaccagctcttacgcggacgaaaataggccaaaaccgaccggtaaaataagaatgacttatattatcaccatgataattatgggaaaataattgcatcttattccgccgcaccgccagcgggaaatatgttgcagaattgcaccagccgctatatggcaaatttcaaataatcactctgcgtcactttttattcatcccccgtccaccgccgccgcgtattctccgtcgggatcaatcccttctatacttcagggaacacatcgaccgggagagactatgcctttagccgattttcaccgctccgatccttttaccctcggtatcgaactggagctgcaggtggtgaacccgccgggttacgatctcagccaggatgcctcgacgctgattgccgacgtccagcatcagttgaccgtgggagaagccaaacatgacatcaccgagcgcatgctggagatcgccaccggggtgtgccgcgacatcagccatgcgcaaatccagctcagcgccatccagcaggcggtccagcgcgcggcgctgcgccatcatctgcagatctgcggcgggggttcccacccctttcatgcctggcagcgccagcaaatcagcgataacccgcgctatgtcaaaaccgtcgagcattttggctatctggcacagcaggcgacggtctttggccagcatgtgcacgtcggctgccagagcggtgacgacgccatctatctgctgcatggcctatcgcgctttgtaccgcacttcatcgcccttaacgccgcctcaccgtggtttgacagtaccgacagccgcttcgcctgttcacgcctaaaccgcttctcctcctatcccgacaacggtccgatgccgtgggtggccgactggcaggggtttcgtcgcctgttccgccagctgagctacaccagcatgatcgacagcatgaaggatctgcactgggatattcgccccagcccgcagtttggtaccgtcgaggtgcgggtgatggacacccccctgacccttgcccaggcgatccacatcgccggctttattcagaccctggcctgctggctgttgacggagcgcccttttaagcaccagcctgatgattatctgctgtacccctttaaccgctatcaggcctgccgctacgggctggacgggaccctcaccgacgtgcgcagcggagagcagcgcagcatccgccaggagatcctgcagctcgccgaccggctggcccctttcgcccatcagctgaaggcgacggcagcgctggaggcggtggttcgccaggcgaaatcgccgcacagcgaggcgcagcagatgcgcgactttatcgccaacggcggttcgctttccgggctggtgcaaaaacactgtgagatttgggcggcataaggcagcgaggcgggtatactcggcgcagactatagaaaggactgcccatgttattacgttgcctgctccctctggcgctgctgcccctggccgccgtcgccagcgccgcctgtaccctcaccgacccgacgctgaccctgcagagctatcgggtggatgcgcagaaagagcgcattgcgatgtactggcaggatcggcacggcaaagcctggggttccctgcgttcgctgctggcgggtatcgatggcgacggccgggtgcagatggcgatgaacggcggcatttacgataaggcctacgcgccgctggggctgtatatcgaagacggcaaacggctgacgccggtcaaccgctccgccggcggcgggaacttctttatccgccccggcggcgtattcctggtggaaaacggccgggcgaaaatcgtgccgctgccggcgtacaaaccctctcccgccatccgctatgcggtgcagtccggcccgatgctgattgaaaatggcgtcatcaactggcgactgaagccctccgccagttcgcgcaagctgcgcaacggggttggtatcgataagcagggccgggtggtgtttatgctcagcgatcgcgagaccaacttttacgattttgcctgctatgcgcagtcaaagcttggcgtgcggcagatgctttatctcgacggcaccctgtcgaagatgtaccgcaaaggcggcagcgtgccgtggcagtatcatccgttcgtgaccatgataacggtggagagaaaatagcgggcgcgtttgggggcagccattccagccaggagagtgaataaattaacgacaggccgggcaaggtattgccgccgtgcccgatgtccttgcccggtgacgctgcgcttaccgggcctacagagtctgttcgctatggtgtggctcctgaaatctacgggcgtgcagcagggctgattcccgctgaaatcggcgaaccgaaggtcggcagataaggcggggctcacgcccaaacgcaacgtgaacgcaaaacccaccctcaccctacccctctcccaaagggagaggggaccgcccggtagtcgttgcagcctggagtatccccgttaccgaccggtagcgccgcgcttacccccgccgatgcgcccactcgcgcatacgttgaaacagtacatacagcgacgggataaacaggatgccaaccatcgtcgccaccagcatcccgctgaataccgtggtgccgatgatccgccggctctgcgccccggcgccggtggcgagcatcatcggcatgatgccgataataaacgacaccgcggtcatcattaccgcgcggaagcggcgggtagccccctcgcgcgcagcgtcgactatcgacagcccctcctcgcgccggctgcgggcgaactcaacgatcagaatcgcattcttcgccgccagggcgatcagcagcaccagccctatctgaacatacacatcgttggcatagcccgcggtccacagccagagcagcgctccgccgatggcgaacagcaccgagagcatgacgctcgccggcagcgtccagctctcatactgcgccaccaggaacagccacgccatcgccaccgccgccagcacgatccacaccgcctgattgccggtctgctgctcctgccaggagatcccgctccaggcatagtcatatcccggcggtagatgggcctgcaaaatctgccccatggccgccatcgccgtgcggctgctgaccccctcggccgctgaaccgctcaccgacacggacgggaactgattgtactgctgaataaacggcgcccccaccgtcggcgtaatggtgaccagattgctcagccgcacccgctcgccgtcgcggctgcggacgtacagctcgctaatctgctcagcccgctcgcgccactgcatctcattttgcatcaccacatgatagacacgattgttacggctgaaatcgccggcgcgcgtgccgccgaacgccgtctgcaggctgctgaagatctgcgccaccggcacatccagcagcgccgcccggtcgcggtcaaccgtcagggtcagctgcggcacgttgctgctccaggtggtaaacacccggctcagctgcgaatgctggttcgccagctggaggatctcccgcgtcacctgctccagctccgccgacgactgaccggcctgcgccaggatgcgcagatcaaaccccgaggcattgcccaggcccggcagggtcggcggtgcgaaggtcatgatcgtcgcctccggtagcgacagcagctggcgctgaatatccgccatcaccgcatccagcggcggccgctgatgccagtccttgagcattaccgagataaacccgccgttagaggcgctggtgccgttgagaatgttgaacccggacacctgaatcacatcctccaccgccgggttagccatcagcagcttgcgcgcctgggtcatcaccgcttcggtacgctccagcgacgccgcctccggcagctgcacgctggcaaacaggtaaccctgatcttcctgcggcaggaagcctttcggcatcgaggtgaagctgaacgccaccagcgcgcctgccgccaccgtcgccgccagcgccagccagggacggcggttcatccagcctaccagccggccatagccgtcgcgggtgccgtcgagaagacggttaaacgcccgccacaccgccgctggccgggcaggacgcgggcgcagcagcagcgcgcagagggccggcgtcagggttagcgccaccaggctcgacagggccaccgcggtggagagcgttacggcaaactgccggtacagctcgccgacgatccccgggagcagcgccaccggcacaaacaccgccagcagcaccagggtcgtggcgatcaccggcccggcgatctgccgcagcgcctgggcggtggcctgcaggcgatccagcccttccgccattttggtttccacattctccaccaccacaatggcgtcatccaccaccatcgtcagggcgagaatgatcgcgaacaggctgagggtgttggcgctgtagcccagcagatagagcaccgcaaaggtgccgatcagtgacaccgggatcgccagcactacgatcagcgtcgcccgccagctctgcaaaaatagcgacaccaccacgaccaccgccagcagggtcagcgccagcgagacgccgatctctttgatcgtcgccgccacaaagcgggtggtatcgaacttcacctcccaggtgagatccgccggaaagcgagtgtgcaggcggttaagctccgcacgcactgcgctggcgacctgcagggcgttggcggtgggcgtcggatagatccccagataggccgacgctttaccgttcagctgggcgccggagctgtagctgcgggcgcccagctcaatggtcgccacgtcggcgaggcgcaccagctgcccctgcgcgccgcggcggaggataatctcgccaaagctggccgcctcgttcagacgccccagcccgttgatggtcagcgtctgctgctggccgttaaataccggcggggtgcccacctgccccgccgcgccctgtacattttgctcgcgcagcgcctgggcgacatcatccgtggtgatgttgagcgcgttcatgcggtccgggcgcagccagatacgcatgctgtaatcccgggcgccaaacatctggacctcgccgacgccgggcaggcgggccagcgcctcgcgcacctgggtgctggcgtagttgctgacaaacagcggcgacagcgtgcccagcggcgagtagaggcttacccccataagcagattgctggcgcgcttgcgcacctggacgccattctgctgcacctccgccgggagctgcgccagcgcctgcgccacccggttttgcacgtcgatcgccgccaggtcggcatcggtgcccgccgcgaaggttatgctcaggcggtacgtcccctcatccgagctggtggactccatatacagcatatgatcgacgccgttgagctgggtctccagcggggcggcgatggcttccgccacgtctgacgcgctggcgcccggccagctggcgctgacgttcaccaccgggggggtgatcgccgggtactgctccaccgggatcagcttcagcgacaccgcgccgacaaaggtcagcagcagcgcgatcaccatggcaaatcgcggacgacggataaaaaaggtcagcatcccttctccttagctagttcagcacctgcaccgcggcgccttcgcgcaaccgctgcgcgccgtcggtgatcacctgctcgcccgcctgcagccctttctcgaccgcaaactgctgcccctgctgccccgcgagggtcagacgacgctgcccggcggtgtggtccggcttcagcacccagctgaaaaagccctgcggatcctgctgcacggcggcggccgggaccatcactcgcgacggcagttcctgcggacggaacaggatcgtcacgctgccgcccggcagcagacggtgctgcggattggcaaactcggcccgcaccgctacgctgccggtgcgggcgtcgatccggttatcgatagaggtcaacaccccgtcgcgccgtttaccatcaacctcaatctgcgccagccacgcctgcttcagagcgtggatatcggcgtgctggccggttttgctgaaaaacgcggcttcgtcgagggcgaacgagacccgcaccggatccaactgcacaatgtccaccagcacgccgctggacgaattgaccagcgtcccgacgtgaaaggcgctatggcccacgcgaccggtcaccggcgccgcaatctgagtgtagctgagcacaatctgctgggcctcgacgcgggctttggcctgctgtacggcagcggcggcgacgtcgcgctgcatccgggccgtatcgacgtcgttgcggctgatggagtgattgttgataagccgctcgtagcgagtgagcaactgctgcgactgacgtaatgaggcttcggcgcttttcagctcggcctgcgccagagccagcgccgcgcggggctgcgcgtcgtcgagggtaaacagcaggtcgccttcggtaacatactgcccgtcctggaagtggcgctgaacaatcaccccttcggcgcgcgcgcgaatgtcgacggcgcggatcgcctcgacccgcccggggatagcgcgttcttcagcatgaggagccagttcaaccgtggcgacgcggaccggcaccgccggcgcggcggtcgccgtcagggcgccgccgaccagaccgcaggccagcagagcaaagcggaaggttttaatcatagaggatccttgcgacagtaacgcgcgcctgcagcgaggcgcgcgagattgttcaggccgttttgcggaaccggcgcgtcagacgcttctcgacttccaccaccaggaacatggcgacgccgatgaccagagtgacaaaccagtagcgcagcggcagcgcttccgtaccaaacatgctctgcatcagcgggacatagataatgaccagctgcatcagcagcaggacgccggtcaccagccagatgcctttgttgcgcagcagacccatgctcagggagaagctgtcgctgctgcggcagttgatcatgtagacccactgcgccgtcaccagcatctgcagcagcacggtgcggataaactccggactgtggccgcgcggcgccagccaggcctcaaggataaaggcggcaatcgcgatcatcgacccgacgaaagccactcgccacacggcgaaaccatccatcacatgctggccggttttacgcggcggacggttcatcacgttgcgctctgcggcctcaaaggccaggccgaaggagagcgtcgccgacgtcgccatgttcatccacaggatcagcaccggggtcagcggaataatgttccccgccagcagggcgatgatgatcagcagcccctgcgccaggttggtcggcatgatgaagaggatggtcttcttcaggttgtcatagacccgacggccctcttttaccgagctggcgatggtggcgaagttatcatcggtcaacaccatgtcggccgcctctttggtgacttcggtgcctttgatacccatggcgatacccacgtcggcctggcgcagcgccggcgcgtcgttaacgccgtcgccggtcatgccgaccacttcgccgttatcctgcagggctttaaccaggcgcagcttatgctccgggctggtacgggcaaagatgtcgtactccaccgccgccttcgccagcgccgcatcgtccatgtgctccagctggtagccggtcatggcctggctgcggttggtgatccccagcatctggccgatgctcatcgccgtctgcgggtggtcgccggtgatcattttcacgcggatgccggcggtctggcaggcgtggatggcgtcaatggcttccggacgcgggggatccatcatcccggcgatgccgaggaaaatcagtccctcctgcaggtcctcatggttgagggtggtggcatcaaggctggccggcttacaggccgccgccaccatccgcagtccctgacgggcgaagcgcgccatctcctcttcccagtactgcgcctcgaacggcaccgcgccgtggcggctcatctgctcgcggcacatggcgaagataacgtccggcgcaccggtgatcagcacccgggcatcgccatcgatgtgctgcagggtcgacatatatttgtactgcgagtcaaaggggatcttggccaccagacgggcctccaccgccgggagctgcgctttcgccgccagcactttaagcgccccttcggtcggcccgccggtgatcccccacagaccgcgctcatcctgggtaagctggctgtcgttacacaggtcgatggtgcgcagccaggtctccagcacggtgccgggctgaacctgcacgggctcatcgctcccctcgaggaagatccgcccctgcggctcgtagctgtcgccttccacccgatagcagcagtcggcggtgatgatcgctttgacggtcatttcgttcatcgtcagggtgccggttttatccgagcagaccacggtcatggcgccgagggtttccacggtcggcagcttacgaataatcgcccgcttgcgcgccatcgtctgcacgccgagcgacagaataatcgagatgatcgccggcagtccttccggtaccgcggctaccgccaggctaatcagcgacagcagcagctcgcccatcgggatatcccgcagcgcgaggctgaagataaacagcgccaccatcatggcgagaataatggcgaaaatcgctttgccgagcttatccatctgcaccagcagcggggtacggtgcttctcaatacccgccatcatctggttgatatggccgagttcggtctgcgcgccggtggcggtcaccacgccgacgccgccgccggcgctgacggtggtcccggaaaagaccatgttcacccggtcgcccagcggcagatcgccctccagcgcgtcggtgattttatccaccaccgtcgactcgccggtgaggatcgcctcttccacccgcaggttgtgggtttcaatcaggcgcatatccgccggcacgcggtcgccggcgcgcaggataacgatatcccccggaaccaggtcgcgcgtcgggatagtctcatgcttgccgttacgctggacgcgggcatcgctggagagcatgttgcggatcccctgcagcgatttttcggcgttgctctcctggatatgaccgatcagggcgttaatcaccgtcacgccgaggatcaccaaggtatcgacccagtgccccatgatggcggtcagcgccgcggcggccagcagcacgtaaatcagtacgtcgttaaagtgggcgagaaagcgcagccagcccggtttgcctttcttttccggcagcgcgttcggcccacaggtattcaggcgctcggcggcgtctgcggaacttaacccagcggcctggcttttggtctgcgccagcactgcgtcaacggtctgctgccagacctgccgtggcgcggtgtcgcccgagggcgtcgtaaactttgggttattcatcttggtcaatttacattttccttataaattccgtgagtcggaaagcctgaaatcattcctggccaatgaagtaaaagagggcaaaaatgccgataaaaatgtgaaccaatacaagtctaaatttttcgcaaaataaaaattttgtgataagttaattccacaaaccaactattacagaatattaataaaccaaaactaaacgaggtaaaatatgtttggaatctaccgcgggcgccgactggcgctgtacatcgcgctagccattatcattgctacgctggtgggatatagcacttacagttttgtaaaagcgctggcataataatgacgttaatttacacccggctgcaattaacttaattacaaattatttcagattaattaacatgagagcgaaaggcaggcgataatatttaaaatagtcgtgttatagcgagtaaaaaaacaaagcatattgcgttaagcattattttaccggacaatatgtttttttaactgatgattaacatgacatgaaacatccactggaaacgctgctctccgccgccgggatcttactgctggccctgctctcctgtctgctgttgcccgcgccttcgctgggcctgacgctggcgcaaaagctggttgagacattccatatgatggatctcaaccagctctatacggtgctgttttgtctgtggttcttagcgctgggcgccattgagtatctggtgctgcgctgggtgtggcgtcgctggttttccctcgagcggtaaaccaggagaggcgcgcctcagtgggcgcgactgtggttctctttgcggtaggcgcccggcggctgattgaaggtccgggtgaagacgcgggtaaaggtctgttgcgaatcgaagccatacttcaggcagatatcgtagacccgctgatcggtgtcgcgcaaatcgcgggcggccagcagcagcttcctttcgcgaatatagcgccccaggctctcccctttgtactgtaaaaacagccgttgcagatgccatttcgaatacccggcatggcgagcgatatcatcaatacgcagcggttgatgcaggttatcatcaatccactcgacgatagtatcaatcacctgagcggaaatcgtcatatgctctctcctctgatactgcactggcgcttagcgccaccaggcgttaaatgattgcgtcttatcggcgacccacaccggctcgccctgcacaggcgtcagcagacgccaggcccttccttcgctggcagccgccagccgttgatacggttcatcccagctgtgtttcgccaaaacgaatcgtcctgcatgcccaggcagcaccgcgcgagcgcgcagatcgtcggcagcctgagccgtttcatccggcatcatgtggatatatttccagtcctggtcatactgcccgttctccatgatcgccagatcgaccggaccgaactcatcgcctatcgctttaaagtgcggcccatacccgctgtcgccgctgtaataaatcttttgctgccgggtaacgaacagaaaactggcccacagcgtctggttacgcttcagcccgcggccggaaaagtgccgcgccggcagcacgtggacggtgagctcgtcgctggccggtaccgcctgctgccagtccgcttcggtaatcagcgccccgtccattccccagtagcgcagatgcgatccgacccccagcggcgtaatgacccgcttaattttcggcagtaaggcgcgaatggtggcgtaatccagatggtcgtagtgatcgtgggagatgatcagcagatcgatctccggcatcccttccgcccgccacggatagtcgccggggaaggctttattgataaaggagaacggcgccgcgtaatcgctgaacaccgggtcgatcaggatgcgttttcccgccagctgcaggtaccaggaggagtggccgagccagaccatcacgtcctgcccgaggggcagcgtcgccagatcggtcttcaccagcggcagcggttgcgcgggacgggcgttttcccgtttggtcatcaggaaatcccaccacgccgccagcatatttttctgcccggtgaaccctggcgtgggcaattggttatggaactggccgtcccggtagtggggagacgcttccacctggctaagctgtgctccctgcggcgccttaccaaaaccggcattaagaacaaacggcaatgtcgttgctgctgcgagtaacatgatggcgaccacgctgaaagtgacacggttcatatcctgaccagacaaaagcccccatcccggaggctttatgatataacttgattatgagtgagtacgcactcattattaggaaagcgatgaaagtcgtcaagacgattttcaatttttgcgttccgccgttgcagcgacctggtcagacgtgccaagatcggcggtttgtttaaacctgcgtgaggaaaaaagtagtggctcgtccaaagagtgaagataaaaagcaagcgttactggaagctgccaccgcggctttcgcccagtccggcatagccgcctcgacgtcggccatcgcccgcagcgccggtgtggccgagggaacgctgtttcgctatttcgccaccaaggatgagttgctcaacgagctgtacctcgcgattaagctgcgcctggtgcgcacaatgatcgccgggctggatccggacgagaagcgcccgaaagagaacgcgcgcaatatctggaacagctatatcgactggggcgtgcgcaacccgatggagcacaaagcgatccgccggatggcgctcagcgagcgcatcaccgacgaaacccgccgccaggtaaaagagagctttccggagctcaacgaaatgtgccagctgtcggtgaaagagatattcctcagcgaggcgtaccgcgcctttggcgacgccctgtttctgtcgctggcggaaaccaccatcgaattcgccagccacgatccgcagcgcgcccgggagattatcgccctcggctttgaagccatgtggcacgccctgcatgaggcggacgcctaatgacgccggaaacactgcatccctgcgctcaccgtatcgccctgagctacccgtttaccgaacactgctggccctttgggccagagtacgacgtgtttaaggtcgacggccgcatctttatgatcaccatgactattcgcgggcgggcgctggttaatctcaaggccgagccgcagaagtcgctgctgaatcagcaaatttatcgcagtatcgaacccggctaccatatgaacaagaaacactggatcacggtggtgccaggagaggatatcagcgaggatctgctggccgagctgattgacgattcgtggcatcaggtggtgaacaagctgagtaaaaaggcgcagcagcgcctgcgtccgcgctgattttcagccaaatgcgataagtgttatcgcatttttcacccttatcattttgcgatcttcgctgtactcttcctctcctgaacgcaccggtaaggtgctgtaaactgtgaggaagagttatggatatcgtatcggtcgctttgaagcgctattccaccaaggcctttgacgccacgaaaaagctgactgccggggaagcggaacagctgaaaacgctgctgcagtacagcccgtctagcaccaactcccagccgtggcactttattgtcgccagcaccgatgaagggaaagctcgcgtggcgaaagccgccagcggcacctacgtgttcaacgaacgtaaaattctcgacgcctcgcacgtggtggtgttctgcgcgaaaaccgcgatggacgacgcctggctgcagcgcgtggtggatcaggaagaggccgatggccgtttcgccaccccggacgcaaaagccgctaaccacaagggtcgcaccttctttgccgatatgcaccgcaaagagctgaaagatgacgatcagtggatggcgaaacaggtgtatctcaacgtcggcaatttcctgctgggcgtagcggcgatgggtctcgacgccgtgccgattgaaggggtcgattttgcgatcctcgatgaggaatttgacctgaaagcccagggctacaccagcctggtggtagtcccggtcggccaccatagcgtagaagatttcaacgctaccctgccgaagtcgcgtctgccgcagtcgacgaccattaccgagatttaattcccttctgccgggaacgcccgggccatggcgcagcagcgtctcgcccgggacttttttcatccactctttcccccctctttttctgccgtttgtgccaagtttctggcgctcataagcccgcttgtgccaggaataacgactttagtgtgaaccagacgatttaattaattgataaataatattttttatttctggcacgccctttgctcttaacagataccgctatctggatgaaggagaaaccgggtgaaacatatctatgtggccagccacggccattttgctcgcggactggtgaacagtttgtcgctgctgattggcgacgaacacggcgttatcccggtctgtgcctatgacgaagatatggtgaccaccgaacagctggagcaaaccctggagcatctcatcgtccaggcgaatggtgatgaagtggtgatcttcaccgacctgcttggcggcagtatcaacaatagcgccgtgagcgtcttgatgcgacatcgcaacgttttcgtggtcgccggcatcaatctgactctgctgctggagtttctgctgtgcgaagaagccactaccgaggccgcgattatctacgccaccagcgcggcgcgtgaatccattgttttcatcaatcctctaataacacaaccatcctctgacccacagggagaatctcatgattaaactcgtgcgcattgattatcggctgctgcacggccaggtggtttttgcctggacccgagcgctggatatcgaccatatcatcgtcgccaacgccaaagccgcggcggatgccttcattacgatgtcgcttaacctggcaaagccagcgggcgtcacgctggacatcgccaccgttgaacaggcggcggaaaagcttaacagcggcaagttggatcataaaaaagtcatggtggtcctgggcaatactgcggaaaccctcgcgctagtggaaaaagtcccaggaattagcgcaattaattacggcggtctgccacagaaggaaggggcaagacaattcggcaaggccatctatctgaccgaagaggaaatcgcccatagcagagtgctaaaagaaaaaggtattcggctggagatgcgtcaggtacccgcccactcggctgaactccttaacgaccaactttaacttcggaggtcactatgttgctcaccgcaacgttactcggactgatcgctgccctggggatacttgatggtcgcctgcttggggtatcaatgatcgatcgaccgctggtgatgtgcgccctcaccggtctggtctgcggtaatttacatgaggggattctgattggcgctacgctggagcttattttcctcggcaacgtcgccatcggcgccgcgcacccgccagatatcgtgaccggttccgtattggccaccgcgttttcgatcatgtccggtcgtggtccagaggctgcgctcaccatcgccatccctgtctcaatgctggcgcagacgctgggaatcctggtgcgcgtggtgaacgcccgctttggtcatctggcggaccgctatgcggcacagggtaatacccgaatgatcggcctgatgcacctcgccggtccgacgctactctattttttaaacggatttctaccggtattttttgccattctgcttggttcttcggcggtaagctggttcctggaggccattccgccggtgataaccaatggattgatcgtcgccagtaagatcctgccagcgctcggcttcgccctgctgatcagcatgatgctcagcagcaaactgatgccgtacctcggtctgggatttctgatagcggcatataccaaactggatatcatcgccatcgcgctgttcgctgtggtgttggcatttatcatcagccagttccttaatcttaagcagcaggagagctaatcatgagcgaaatgacgcaaactgtgactggcgctacccagccgcaaagcgatgatgcaagccgcatcaccgcccgcgatttacgcagcgtgttctggcgctcctttacgctacagggctcctggaactacgagcgccagcagcatatgggctatgccttcgcaatgtcgccagccctgaagcgcatctatcaggacccaacggagctggggcgcgccctgcagcgtcatctggtgctgtttaacaccacgccccatctctcgacctttatcttcggcctgtcgattgccatggaagaagagaaccagcgtaaccccgaatttaatgaggagtcgataaacgcgattaaaaccagcctgatggggccgctggcgggcatcggcgactccatattctggggatcattaaaggttatcgccgccgggatgggtatctatttcgcccagcagggcagcctgctgggaccgatactggcgctgttagtttataacctgccgcatcttttgtgccgctggtatggcctgaagctcggctaccgggcgggtacgacctggctgatgagaatttaccaaagcggccttatggaccgggtgacctatatcgcatcaattgttggcctcatggtcgtcggcgcgatgaccgccagcatgatagatatcaccaccccgctcagctttaccgccgggcagaccaccatgaaggcgcaggagtttattgacaaaatacttccttcgctgctgccgctgcttttcacccttgggatgtacaagttgatccgcaagggagtcaatattaactggatcctgctaggaaccgtcgcgtttggcatggcggccagcgcgctaggcctgctttaagaagaggaatatcacccatgcacgtagaagactatatgaatgaaacacccgcctgtctgctcgctatgctgacgcagacgcgggaagatctatggcaggcggcaaaagcgctaacggagcgcggcgtcacgcgtattatcctgaccggctccggtacctcttatcacggcgcgctgaccgcccgctcgtttatgcagcagtggtgcgggctacccgttgatgtctactggccttttctgctggatgattcggcgctgaccctcagcgacaaagcgctggtcatcggcatttctcagggaggcggcagcctctctaccctcgccgcaatggaacgcgcccgggcagccgggcatcttaccgcttccatggccggggaagcgccagccgttatcgaccgggcggcagatttggtcttaacagtaccctgtggagaagagcgggctggcgccaaaaccaaagggtatcactgcaccatacttaatctgatgctgctggggcttgctgtcgccagtcgccagcggcgcctgagcgatgaggagcgcaaggcgctactcgtccgcatggataccacgtttaatcatttgcctacgctcattgaggcctcgcaggcgtgggttctcaatcatgcccgaccgcttatcgacagcgcggacattcgcctgaccggtccggcaaggctgtttggcaccgttcaggaaggtgcgctaaagatgcttgaaacgctacgctgtccggttgccggttacgaatttgaggagttcatccacgggatctataacgccttcgacgagcgctctaccctgatcatgctcgatccgtttcccgatgagcgtcaggatcgcctggcggaaatacttggcggctggactcagcatatttatcgcattggtccacaagtcgaaaataacggcaaaaatatgcccttcgcatttattaacgatcccgactttgcggtctttgaatatattattccgttacaaatggtttgtgcccgactgccgccagtgaagggcatcgatcccgcaataccgaaggatccgcatttccaccagaaaatgaaaagtaaacaactcaattaattgacgcatagtaaaagttatccgcgtttcagcggaggacccgttacatcccaaggagaccaatatgtctatagctcatcaaaacgcacatactattattcgcgatattttatctaagcagcacattgagcgcgtatggtttgttggctgcggtggttcattaaccggtttctggccggggaaatattttctcgattgtgaagctaaaaagctggccgtcggctatgttaccagtaatgaatttgtccatgcgacgccgaacgcgttaggtaaaaacagcgtagtgatcctcgcctcgcagcagggcaacaccgctgaaacggtggaagccgcccgcatcgcgcgtcagaaaggcgccgccactattggactggtatatacccccggcacgccgctgtgcgaacacagcgattacactattgaatacggctgggcgcgctatcccgaaaccgtcgatccgacgcagcaaaaagcggcatacagcatgtggctggcgctggaagtgcttgcgcaaactgagggatacgtccattacgatgagatggtcagcgcctttgccagttttgaatccgtggtacgcggcgctcagcagcaggttcaggcggatgcgcgccattttgccgaagcctggaagaccgaaaaggtcatctacatgatgggcagcggcccctcattcggcgccgcgcatcaggaatccatctgtattctgttggagatgcagtggattaactccgccagcatccacagcggcgagtatttccacggcccctttgagattaccgaaacgggaacgccgtttattttattaaaaagcagcggccgcacccgcccgctggatgatcgcgcgatccgctttatcgaacgttaccagggaaaactgcagattattgacgtggaaaaggtgggaatcgacgcactgcacgccagcgtgcgcgaatatttctgcggcctgctgcacaactgcgtactggatgtttacaacctggcgctggccaccgctcgcaaccacccgctgaccacccgccgctatatgtggaaagtcgaatattgattcgctaaccgcctgccagccccggcgtaattctccggggctgcgttgaggattaccagctaaaatcttcaatacgtaattcaaaaatatcgtgaatatagccaatttccgctaccggtagcgccacgttatagagtattttcaggcgctggaacgagtgattcaccatggcaataaattcaccatgctggcgggtaaattgctcaagatctttataatggctaatttcattacgcattaccagacgctcaatcatacagctgagatgcacatataaactgataattaagttattattaaaatgaaaaccaagcgtattttgccactcagcgataatggtttcgatatggcccatggtttttccagcattcagtatcgtcagagagttgacaacgttatgcagtgaaaactcacgaaccatatttttattaatcagcgcaatttgcttttcattaagatagccgcttaagagctgactcagatgtcgatgcccctgctcgccaagtagttcctcaatgccaacccaaggcactccggccagctgcgggtcgtgggtacccacgaccgcaataacttcatactggtggagcaacgataccgccgtacgactgttttttaagcgcgtatactcgcaggcgatgatgttaatatcaaaatcgttgagcaggctcttctccatcagatttttaaatttaaatgcggtaccgatacctgtaatacaggtcaccagcagcacacgctcttttttttctgcgggccagaacacatcccaacgcgactgattaagcggcacgatctcttcggcgatttgttcgatgttttttcccaacgcgatctcgctggcaacgttcagcgccatgcgggtcgtgacgttatccaccactaccagcgggccgttaatcaccgacaaaagcgcatcggcaatctccttggtgtagcccatatcaataagcaccatcacacccgcacgcgtgtccgtatgctggagataatcaaccacggcgcgactgacatcgttaaacgccacctccatcggcatatccatggcctggtagatcttctcgccaatcaggcggttggcaacgccggcaatgctgctggcggtcgaataaccgtgggcgattatcagcgctttcacttttccgccgctggtcgcatcgatagcattactgacaatggcggtaatcgccagacggtcaagcgtatcgatgagcagatcgtatttattattgacgacatccagtagtttctccgcgatgcgttgcgccagccccgccgaggagtccagccagcgctgcatcaccagacgcacgggctcagcaacgctgcgcggcgccagagggaggctggtgaggtagcggccggtaagataagcgaattcgacatttagctgaaggtcataattgacagcgattgctttgcccacatcttcaataaagcgcagccgtttgtcctgcagagagaccgtactctcctgattcatcagcgcatcaagatagagcgtcacgttctgataaataagcttttcaaaggtccgcacgctaatattatcctgagccaactcctcgcacaggctacaaatattttccgttagccgttggtattcatggtgacgaccagaaaaaagaggctgcgcgtcgccatcgcggtaaatcataacccgctcgctattttgctgaagggtaaaaggcgcatccgccagtaatcggtcgggcagcaaacccgcttttatatgtaaaagaccgctatcacgttcgccaaatgtccaggcgctggcgcaaatattgcgaatcaaattttccagcccaccgacatttccttcaagcgtttcacgcattagctggctgacgatttcgccatccagctccagatcgtggttcaaacgctgggcttcacggcggaaaaagtggtggataaacgccagccgctcgaattggccgcgttcagcgatcggcagaatttttacaatcaccggaatacggcgaataaaggtcgccaggaagtgtttttccagatcctcggttgaagcaaaaattagccgcaccgtggcgctgcgctcgtcggcgctctcccccagccggcgccagctaccgttatccataaaatgaaacaacttttcctggccttcgggcggcagccgatgaacctcatcgataaacaacaccccgccgttgctggtctcgataagaccaggaacggccttatcggcgccggtaaaggcccccttcgcatgaccaaataacttcgaggtcagtagttctggattattcgcgtactcggcgcagttaaatacggtaaaaggcgcatcggcaggtaaaataccttcatctattgcgtagtgccagagctggcgagctagaaaacttttcccggtgccagtagggccccgcagcagcagcggcagacctgcgccagggtagctgatggcagccttgcactggcgcaatgcttcctgcaggctgccctgcgcgccaatcagctgcgccagactatcctgacgatccgcgcacagcgcctgaatggaggcgtattcgccgtgccgaaccgccaggcggtgatgatcgcgcagaacggtaacgggtaaaaacagcaccgggcgaccgttcactttgaccacccgctgctcgcgatggagattattcagatgatggctgatgatgctgcgtttttgcttcaagctatcggcgatggccatagcgttaaactcgcccagcgcttccgccgtcagcgctcgcccggcgatccgttgttctagttggcgaaaaatcgactccttattcatctcgctcccctgtcaaaagcgtaaaattcgcttatacgacaattcgcgcaggacgtcgctgccgccagccacacttctttaaaaacgcttaatttttcatggcttaacgttccccgcatgccagatgcgctcggcatagcggccaatcaccgccagcgagacggcaaggatcaggaaaaacagcactttgtgcatcccgttccagaaaaactcaaagaaacgggtatagagattgatcgccaggaaggttagtccgaagccgcgcagcattccgtcatcggttttcaggctgataaaaatgcagacgccggccgctacggcaaacagcagcccccacggcaggagtcgcgcctggctcacctggtaccagttgtctgcgtcgtaattgccgaaaatcgacatgatccacagcgcaataaacaggtacgtgaggcccatcgccttgctgacggtaaacagctgccgctggcgaagcagggattgcgcgccgtagcagagcgccagcagcgcgccgccgaacaggacgaagcgaatcgggtagttcatgcccagccagtaggcgccccaccccgagacgtagccggtttccgcgccgaaccagttgcccagcgccagcagaaaaaagagccacaccagcccggagcgggcaatatagccgatggcgccgtaaatcacgcatccggccagaaacagcggtgcgatatggccgctgccgttatccagccgttcgccaagctgccatagcgccacggcggtaaagacgacgcccagaaacaaaatcgcctcggtgctgtagtgccactgcgtctcccgccgctggcgacgaaaaccccagccgtagcaggcgactgccagcagcgcaggcagcaggatccgcatcagcgccgagtggctgaacaggctcagcagccacgccaccagctcgctgtcggcgaacagactgcccagggaaatcagcacgcaggccagcgcggtccagaaggcatagcggctcaggcgccgccagtcgaagggggagacgcgcatcgtttgcgccagccgctggctgtccgaggggattaactccccgctggcctgccaggcattcagcgcgcgctgaataatgcgctgctcttttcgggttacgttcataggcattccttgggactgatgacaaacctgttttcgctaatatgctcgcctttctgccgggcagcggctgtcgccctccccggcctacttaaccatttatatatcagattgttactccttaccgtaagcccgcgtaagcgcagcgccgccgagcatgatatcaggcacggagccgctttattgccgggtggcggctggcgccttacccggcctacggtccgcagcagccagccgttaacttacccactagtgcgactgaaactgccgctgttgcggcctcaacatcgctgagacgttcccggaaggccggggcagcccgcatggatgcgggctgagggccgtgttttgcacggacgctgcctcggcccgacccgaagcctgcagggataagtcgaaggcaccacgcagcggcgatgttgctggccggagcccgggggtacagggggcggcggcgactggccgccccctgtgcgctccctgcgccgtaagagacataacgcagaagactaaccgggagcgcaatgtgcgctgaagccacagataacataaaagacttcccggcagggctttgccttcccccctactcccggagggagagggaaccgtccagcagcgccgaccgggcaatacccgaagatggcacattgccagccatctgattccctgtgattaatgttggtccagccacgccagcgcctgctcgcccgcctcgtccatcggcaggtagaccagcaggcgcgagccgttgcgcggcgccgaataccagtacatctgctgcaggctgaatcgcccgagctgcgggtggttaaaatgtttaatctggttttccacgccgcgcacctcgtagcgctgatgccacagcgcttcaaactccgacgaggcggcgaaaaagcgcgccagtttgttttcccacgccggatcgccgcggtgctcggccatcgcggcgcggaaataggagacgaaggtcggcagcacatcgcgattttcgatccggctgcgccaggtctcatgggtcagatagagataaatgcagttgcgatcttcttccgggagggtggcgaaatcgatgcccatcaggcggcagaagctgtcgttccacgccacaatatcaaagttcggtttctgaatgctggccggctgcggcatcaggctgtccagcatccggcgggtccctgggctgatgccttcgcacaccgtcacctgggtggcttccggcggggtcagcccggcgagcacgaacagatgccgggtctccagcggactgcactgcagggcattcgccacccccaccagcaccgcctccgacggattcacctcccgcccctgctccagccaggtgtaccaggtaacgccgacgtcggcgagcatcgccacctcttcccggcgcagacccggcgtgcgccggcggcccacccggggcaaccccaggcgctgcggatcgaggctttcacggcgggcgcgcagaaaggcccccagctgtttgcgtcgatcgtccggcacggcgatcgtcgactcccgttgcggcatcgtggtcatcacccctccagcatagtagtgccaataccagtatagacaggaactggtacccgtttaatttatcggtaatgctacgtcggtctgctgaatgacgcaatggagaatcccatgaatacgtctgctgtttcacccggccgcgccggtctgttgctgctgctgagcggccagatgctgccgcttattgatacctcgatcaccaatgtggcgctggacgccatcacccacaccctggcggccagcgccacgcagctggagcttatcgtcgcgctgtacggcgtcgcctttgccgtctgcctggcgatgggcagtaagcttggcgataactatggccgccggcgcctgtttatgtggggcgtcgccctctttggcatcgcttccctgctgtgcgggatggcgaacagcatcggcgccctgctggcggcccgccccctgcagggcgccggggcggcgctgattgtgccgcagatcctcgcgaccctgcacgtcaccctcaaaggccccgcccacgcccgggccatcagcctgtatggcgggatcggcgggatcgcctttatcgtcggtcagatgggcggcggctggctggtgtcggcggacatcgccgggctgggctggcgcaacgccttttttatcaatgtgccgatctgcctgctggtgctggctctgagccgccgctatgtgccggaaacccgtcgcgagacgccgtcgcggattgactggcagggcacgctgtacctcgcgctgatcctctgctgcctgctgttcccgatggccctcggtccggagctgcactggccgctgtggctgcagctgatgctggtggcggtcctgccgctgctgttcgccatgcgtcagagcgccctgcgccagcagcagcgtggcgaccatcctctgctgccgccgcgtctgctgcagttgaccagcatccgcttcgggatggccatcgccctgctgtttttcagcgcctggtccggctttatgttctgcatggcgctgaccatgcaggaggggctggggatggcgccgtggcagtccggcaatagctttatcgccctcggcgtggcctattttatttcggcgctgtatgccccgcggcttatcgcccgctacagaatggggcggatcctgctgaccggtctgacggtgcagatcgccggtctcctgctgctgtgcgccaccttctcccgcttcggcgtcgccaccaacgccctgacgctggtccccgccacggcgctgatcggctatggccaggcgctgatcgtcaacagcttttatcggattggcatgcgcgatatcagcgccagcgacgccggggccgggagcgcaatcctcagcaccctgcagcaggcgaccctcggtctcggaccggctatccttggttcgctgttcctggcgctggcccgtcgcggcggcggaaactatccgcaggcgctgattgattttctgctggtcgaggtggccatgatgctgttgctgggggcgatagcgctgtggctgcgccatcatctcaaccgacagccggcgacggtggcctcgtaataccggcggcggtaatttgcataatagctatccagcggtcatcatacccgctggatattcaggagacgttatgcaggaattaatatcgcaaattgccgccttaggaatcgaaataacccccacccgctcgctgatgattatcttcggcattatcttgttcaccgccgtggtcgtgcatctgatattgcacaaagtggtcctgcgcgcatttgaaaaacgggcgctggccagcagccatctgtggctgcaaatcatcacgcagaataaactctttcaccgactggcctttaccctgcaggggatcatcgtcaacgtccaggcggtgctgtggctgcaaaaaggcagcgaggccgcggaaatattaaccaccgtggcccagctgtgggtgatgatatatgccatgctgtccttcttctcgctgctggatgtcattttaaaactggcgcagaaatttcccgccgcctcacagttgccgctgaagggcatattccagggaattaagctggtgacggcgattattatcggcattctgattatttcgctactgataggccagtcgccagcgatcctgattagcgggctcggcgcgatggccgcggtgctgatgctggtgtttaaagatccgatcctcggtctggtggccggtattcagctctcggccaacgatatgctcaagcttggcgactggctggagatgccaaagtacggcgccgacggcgcggtgatcgatatcggcctcaccacggtcaaggtgcgcaactgggataataccatcaccaccattccgacctggtcgctggtctctgactcgtttaaaaactggagcggcatgtcggcctccggcggccgccgcatcaaacgcagccttaacatcgacaccaccagcattcatttcctcgatgaacaggagcagcagcgcctgatccgggcgaagttacttaaaccctatatggattcacgccacgaagagataagcgcctggaaccagcagtacgccggggagcaatcgatcctcaatgagcggcggatgaccaacgtcggcaccttccgcgcctatctgcaggagtatttacgccatcatccgcgcatccgccaggatatgaccctgatggtgcgccagctggcgccggatgccaacggcttgccgatcgagatctactgcttcaccaacaccgtggtatgggcggaatatgaggggatccaggcggatattttcgaccatgtcttcgccgtggtggatgagtttggcttacgcattcatcaaacgcccaccggcaacgatattcgcgcgctgaccggcgccttctcccgctgatcctcagacgctggcgcggtctatcacgcgccagtccatcatcacccgctcgacggcagcgtcgggatcgtcgatgcgtttcatcagtagagacaccgccgtacggccgatcgcccgggagggctgttcgacggtggtcagctgcggggagaccacttccgccagctcggtgccatcgaagccgatcaccgcgatatcctccggcacccgcagtccggcctgggcgatagcccgcagcgccccggcggcgagggagtccgaaacggcaaacaccgcatcgggcttctcgtcttgcgacagcagttgctccatcgcccgtttaccggccgccgcgctaagatcctgcgcgtaggtcacctgctgatacgccagaccgtgcacgtgcagcacgcttttatagccgcgctcgcgcagacgggcatagcgatagctgaggtcgtgattaatgagcgcgatgcgtcggcggccgctatcggccaaccgggataccgccccctgagccgcctcaacgtcgttaatcccgacgcaggagatgctgccggtgtcggcatactccgcgcactgcacccagggcgcgtcgccaatcatggtggtcagttccggcaggctggagagcgcgttcatggtaataatgccgtcgaccattttgccggagagcagctgcaggcccgaggtcgagcgggccagatccgacccggagttacacagcagaatgcgatagccattcttctccgcctcttcttctatccccttcaccacctcggcgcaaaaggggttagcgatattggagaccatcaccaggatcatattgctgcgggcggttcgcagctgacgcgccagcaggttcggctgatagttgctctctttgatcgcctgcagtacgcgctcacggtttttggcttttaccgtatcgctgttgttcagcacccgcgacaccgtggccaccgagacgccggccagacgagcaattttctgaatagacataaaccctgcacttcctgcgatagaggtggatcctgcaggctatcataaatgacctctgattggcctgccagcctggcgcgaaagcgtagctcagcgagacggtgtcccgggaaactattaataatcagggcttctctcccgccccgttaacgcgcatccttttgccgtttcatattctcattagcgcaggaggcgcaacagaccgcctgcgccccattttttcttttatgattaaggatgatatccccatgaggctctccaccgcggttctcgccctcagctgtgccctggcaacgatcaccggctgcacctcgtccaaatcgtcaccggaacgccatgcctacgccttcgtcgcccaccgctccgattttgtcggcggcaacttcaccgtcaaccgccaggaaaattaccgtttaaacctgccgacctttacggcgatgtatgcccgcggacagcaggataaagccgctggcatgagcgaaagtgatgcccgccgcaccgcggaagccatcaaacagcaggcggcgcagggcacccgcaccgagcacgccttcaccggcaatgccagcgacaaatgggataatgcgatggaaaataaagatgccgtcctgttcggcaacgagctctccggtgcctatctcgacggctatcttggggtgaaataatcctgcgccccgcctgcgctcagcgttcgacgctgacccagcgctgttcctgatggcttttgacgatcgcctcgatgatgtacatcacatcggcgccgtcgtcgaaagcggcgaagcgccggaccccggccgccggcatcttcccggcgcgcaccgcctgataaaaatgccccatcatatttttaaaggcgtccggccagccctcaatatggccgccggggtaatgggcgctgtcagcgatttccggccgcagcaggctcgggtcatcgctgagcaggcgatccggctgctcgcggtggccgatccacagccgctggggcacttcctgatcccaggccagagaacagaggctgccgttaatctccaccgccagacggtttttccgcccggcgctcacctgagagaccataaagctgcctttgctgccatcgtcaaaacgcaacagcaccgagccaaagtcctcggtatcgacaggccgcgtttcatatgcctgcgcctcgtgaacggcgctgaaggtcgctttgccattgaccggcgctttacgcgttggccagacgatagacagatccgccatcacctcgacaatccgccgaccggtcataaactgcacggtatcgcaccagtgggtgccgatgtcggccaccgtccgcgacgcgccgccctgcgccgaatcgacccgccagttgtagtcggtctccagcagcatccagtcctgcagatagctgccgtgggccgcgaagattctgccgacctcgccatggcggatcatcgccgccgcctgctggaccatagcgaactggcgatagacgaagctgacgccatgcaccacgccggcccgggcggcaagcgccaccagctcccgcgcctcccccgccgtcatacacagcggtttttcggagaagacgtgcagcccggcggcgaggatctgccgattaatctgggcatgtagatggttgggcgtacagttatgcaccacctgcagccccggatgggccagcagcgcctccacgctgtcgtaggcatgggcaatgttcagcgctcgcgccttgcgctgcgccgcctcaaggcggctgtcgcacagcgccaccacctcgacatctcccagccgccgcagcgcctccagatgcgccgggccaataaaccctgccccgataatcgcgacctgaatcatgttattccctcccgccggcggcaaagtcatcgaaggcccgtccggcaacgggaatgatatggcggcggataaactcgctgccctcgcgcgcgccggtctcactatccttcaggcagcactcccactccagcaccgcccagccggcaaaatcatattcggtcagcttactgaacacccctttgaagtcgatctgcccgtcgccgggagagcggaaacgcccggcccgctgctgccagggctggtatccaccgtagacgccattgcgcccgttgcggcgaaattcggcgtccttgacgtgaaacgctttaatacgcgcatgatagatatcgatataggtcaggtagtccatctgctgcagatgcaggtggctcgggtcatagagcatattgcagcgcggatggttatccaccagcgcaagaaaacgctcaaaggtcacgccatcgtgcaggtcttcgccggggtggatctcatagcagacatcgaccccctgctcgtcgaagaggtccagcagcggccgccagcgccgggccagctcggcaaaggcctcatccagaagcggctgattgtgcggcggccacggataaaaaaagggccatgccagcgccccggaaaaggtcgcgtgcgcctgcagccccaggcggccagaggctaccgccgcctggcgcactttctccaccgcccagcgctggcgcgcctgcggatcgccatgcagcgccgccggggcaaaggcatcaaacgccgcgtcatacgctggatgcaccgccaccagctgcccttcaaggtgagtggacagctcgctgatcaccagcccatgctccgccaggatgccgctgacctcgtcgcagtaggtctggctcgccgccgcccgctcgacatcaaaaatcgccgggtggttgcaggggatctgcaatgccttgtaccccaggccggcggcccactgcgctatccccgccagggtgttgaacggcgcctgcggcccgataaactgcgccagaaaaatgcccggtcccttaatcgttttcataccccctcctgaaaaattagtgcggctctttcccgttgtactggaaagagaaaaggaaaagcagcgcgataaccgcggcggccaccgccgggatccaccagaaggtcacccaggcctgaggcacgctctggccggccaccagatggttatacagcgcgccggagatctgcgagcccagcagcatgccgatcccgtaggtgaacatcacaatcatgctctgcgcctggccttttaccttctcgcccgccacgcggtcggtgtagataaagccaacgacaaagaaaaagtcatagcacacgccgtgcagcaaaatgcccagatagagcaggaagcgcccctcctcgctgactccgagagcgaaaaaggcgtagcggacgaaccacgccgccatgccgatgagcagcatgtatttcaccccgaggcgacggaacagcaacgggatcaccagcataaagacgatctctgacatctgaccgaacgacatcgcggtgctgacatctttgacgccggcatccgccagatacgacgcggtataggcgtaataggtgcctaacggcacggaaattaaggtggcgcagagggagaaaatcaggaaatggcgggttttcagcagcgcgaaggcgtccgcgcacagcaggtcgcgaaactgaaccggcatgcctttggccggcgccggggtgtgcggcagcgtcaggctgtagagcgccagcgcgaccgaacagagcgccgccagcgtgaagatgccggtggtatcagagataccggtcaccccgatgcagatcccggcgataatccagccgatggtgccgaacacgcggaccaccgggaaggtattatcgacattggccaggctgtggaaggcgatattgttggtcagcgccagggtcggcatatagcacagcgtatagccgaacagcaggccaatcagcagggcgccgttctgcgccaccagcgcctgcgggacaaaccacaggatcgccgccccggccaggtgcatcaccgccatcaccttctgcgaggcgaaaaagcgatccaccagcatccccagcacaaagggagacaagattgaggcgatcggcccggcggagaacgcatcgccgatcagcaatgacatctcatagcgggtcatcaccagccccagggtcaccgaccagctgccccagataaaaaactgcataaacatcattaacgacagccgcggcaccagaaaacggtggctcacgcgaacactttcccgaccttctgttgttgtgaccatgttgctcgccctcagaaaagtaatcgattacaaaaccactcaaaacaaaagtaatcgattacaaaaagaagatcgccaggcaaatgcgccgcctgcgaagaggatcacaataaaaaggcaggcagccccgccggacggcggggcatctcgcttacgccgggcggcgcagcagttggaaggcgataaacaggaacaggatccacaccggcagcaggatcgccgacagacgcatgccgtcgatagtgcacatcagcgccaggatcagcccaaggaaagcaatgcagaagtagttgctggcgggcgccagcagcgctttgaacttcgattcgcgccctttgcggcgctgggcggcgcggaacttcaggtgcgccatacagatcatgatccagttcagcagcaacgtcgccaccaccagggccatcagcagccccagcgcttcatgcggcagcaggtagttcagcaccaccaccagcgaagtgataattccggagagcagcagggagttcaccggcacgccgcgcttgctgacgcgggcgagaaatttcggcgcattaccctgcaccgacaggccgaacagcatccggctgttggagtacacgccgctgttatacaccgacagcgaggccaccagaatgacgaagttcagcgcggaggccaccaggttgctgtccagattatggaaaatcatcacaaacgggctgctgtcggatttgatctccacccacgggtagagcgccagcagcaccaccagcgaaccgatatagaacagcaggatacgatagaccacctgattgaccgctttgggaatgctcttttccgggttttgcgcttcggcggcggtgatgccgataagctccagcccgccgaaggagaacatgatcaccgccagcgacagaataagtccgtgccagccggtggcgaggaagccgccgtgtttccacagattgtcgaacccggctttgctgccgccgtggccgccgaacagcatccacaggccgaaggcaatcatgccgataatcgccagcaccttgatcagcgcgaaccagaactccgcttcgccatacaagcgtacgttgaccaggttgacggcgttaataatgatgaagaaagccgccgcccaaacccaagtgggcacgtcgggaagccagtactgcatatagatcccggcggcggtcagctccgccatccctaccagcacgaacatcacccagtagttccagccggagagaaagccggcgaacggcccccagtacttataggcaaagtgggcaaaggaaccggatactggctcttccaccaccatttcgcccagctggcgcatgatcagaaaagcgacaatcccggccacggcgtagcccagtaagaccgccgggccggccatttgaatcgcgggaccaatgccgagaaacaggccggtgccaatcgcgccgccaagggcgataagttgaatctgtcggttctgtaaaccgcgatgaagcgtcgggccgctctcttctacggcatccgacgacgttgacgcgtctttcacgtcgttcccctgtgtgtttttgcgaaggggcaccttttatcacttaggggggattgtcgcaagttgcgtggggcgagcgtcagccgcccgccccgctttttttagcgtcagaagtcgtagctcattgagacgcggacggtacgcggatcgccttcgaacaggtaagtaccggtatcgtcaatgccagaccagtacttctcgttggtcacgttggtcaccccgacgcgccagatcatttcgttctggtcggcgttcagacgcatacgatagcgcaggcctaaatccagggtggtgtagctatccagcttcttggtattggccgcatcggcatactgcgagccgctatgattgacgcgcgcggtggcggtcaggccttccaccggcttgatgtcatattcggcgccgagtaccgcgtagaagttagccaccccgatggcatctttaccgtcggttgcgccttcagcggttttagtctgtttggcatccagccagacggtactggcgttaagacgcagtcccagcatcggctcgccaaagacgttcatctctacgccgcggttacgctgctcgccatcgaggccgtaattgccagcggtatcggaaatggcgttcggttttttgatttcaaacagcgccagcgatcctccgatcgtaccgtagtcgatcttgacgcccacttcgtcctgcttcgagtgcgcgatcccggtactctgcccggcattggccgccgtcgtcggcgccacagagcccggctgcagcgcttcggtatggttagcatacagcgacagctgctcccacggcttgtacaccaggccaaacgtcggcatccagcggctttgggtataacgcgaagaggtatcttccagcccggtggcgttgctgtagttgcgcacaaccactttctgatgacgagcggcggcggtaaacagcactttatcgttaaagaagccgagggtatcactcagcagccagccctgcgtacggctgcgcgaggtgaccagcggatcgtggtagttgccgccaaaataggcgttatccggcatcgccacatcatggttgtcaaagatattagtggtcgggtttctggccgacatccgccaggcggtcgcatcggtatgcacctgcgccgcatagccgaggttcaccttatgcgaaatcgcgccggtattgaaatcgccgcgtaccccgcccatgccgctgatcgcgtcgataatgcggttagtatccaggcggcccaccgtcgcatcgccgtttttattcagaagcttcggcgcgctgtaggtaccaatttcatgcgaatgctggccgccgagggcgctgtataccgtccagctatcggtcaggtcatattctgccttcgccatgccgaactcgctttcaatatcgctatagccccacttctggctgtagtttttgctgttgtccggcagcgccggaacgaaatccacgccgctgatattgacgcccatcgtaccgccgtggaacgttttcttctgatagccgaaatcgagcgaggagcgtaaacggtcgccgcggtaatcaagccccagcgaagccagcgtggtacggcgtttatcattatcgatagcgccttcaccctcgcggtgcaccaggttgacccgggcgccgaactggttgttgtcgccgaaacggcgccccaggtcgagggtgccgcccacctgagaatcagaggtatagtcgacgccaacgcgtgcggtcggcagatcttccgcccgcttcggctcgaggttaatcatcccgccgacgccgctgctggccgcgccgttaagcaggctgttagcccctttgaaaatttcaacgcgctccagcatctgggtgtccatcacctgacgcggcaccacgcccgccaggccgcccatcgtcatgtcatcgccatcgagcttaaacccgcggattcgataggtctcggcgaaattgccgtagccctgtacggcctgcacgccagcgtcgttactgacgacatcggcgatagttttcgcctgctgatcctgaatcagcttcgaggtatagccgatgacgttaaacgggacgtccatcgctttttgttcgccaagcatccccagacggccgccgtgggcgatctggccatcgaggaatgccggaaccaccaggtcgccgccggatttaaaatcgctggtttcgttagcctcgacgatgagggtctcttcgccaggctgcttcgcggcggcagcgtccgcggccatcgccgtttgactggcggcgccgatggctaaggccagcagcgttttacgcagcgggaaggatgaatagtgcgtggtgtgcataatttgccccatggatgaggataaatgaatcaaagggcccgtcgccggacccgttatttttattgcgcgttcaggtcgatacgtacgacgctgtccgggcctttagtggagtggtctttattgaagggctgtttgacggtgacaaacagcgtctgaccatcggcggaaagcagcaggctgttgggattggccggcagcgcccagcttttcttcagcgtgtagcggctggcgtcaaggctgatgaccttgccggattcacgctgtgaaatataaatttcgtggcgtttcttattgaactgcaccgccagcgaatcgccgacgtcgagctgtttaagcagcttgccgctgtggatatccagcaccagagtggttttcgctttcgagttgtcggtcacgaacagacggccggtgtcgctatcgtcggccatattaagcagcagcgccggcttgtcgcccagcggcttccagcgctgttcaatgcgttggttacgcgggttgatcaccagaatttccccgctgccgttagcggcgtacacgcgaccggtttgcgcggagtagtgcaggccggtcatccacttaccggtatttttaatccgcgttttcagcttcagggtagtggcgtcaaccacccagatttgcgccgggtcggcgaccgcgccaacgtagagagtattattcagcaacagcagctgacgggccccataagggcgacctttttcattgcgctcgctgaacagcaggcggttttttaccttgccggtggcggtgtcgatagcgctgatgccgccgtccagcgaattgctgacatacagcgttttaccctccgcagagagctgtaaagcgaagtttttcagatcggtatgcgtcaggccgatggtattgagggtgtgcggatccagtgtgtagaccgccccaccctgcacatttttaaagccttcggcgctggcgacgtacagcgcatcaccctgcgggcttaacgccatctcgtacagcccttccgctagctggcgctgcagcggttgcgccacgttagggactggcgagtcgacaaccggttgggaaacggcagaggaatgaggcgtcgcgcagccgcttaacgccgcgctgatggccagcgtcaacgccggaagtgtgtatttcattggatcaaccctataaaaaatcaatgacccgatggacgcgcagcggccgatattgtgtgtttccagcctgctgtctttacgtcaccctacgccttcgcgactcttagtgaacgactcactggcgcagctcgaaccttgccaaaattacgaatgaaaaagagaatgagaaccatactcattatctaatgtcaaacaagtcctggcgggcaaaaaagataatctgctgattttttttacggcaatggcggattaggaggggaagaaaggatccgtgacgggaaaagcgtcccggaagcgatgccgtgcaccgcccgggttgcgggccagaaggcacacaatgtgttgcctatctggcgcaaagcgacacatgacagcgctatgtcgctgaacggcgattaatatcgcaccatcaccgacttcagctccgtataatcatcgataaacgcgctgccgaattcgcgcccgatgcccgagcccttcatgccgccgaacggtaccgccgggtcgaggaaggtatgcatattgacccatacgatgccggcctcaatcgcctccgagtagcgtagcgcctgacgaatattatccgaccagacgctggccgccaggccatacggtgaggcattcatccgcgccagcgcctcttcttcactgcgatagccgataaaactgcacaccggaccgaaggtctcctcccgcatcagggtgctctcttcgctgcgcactttgaccgcggtcggctgcaggaaatagccctcccccggcagcgcttcgccgccgcagacgatggtatcgccctcgtcgcgggcggtctgaatgagccgcaaaactttgtcatactgctggcggttggccagcggccccatcagcgtccgttcatccagcggcgaccccggcgcaaaagcgctgagcttgtctttcagcagcgccagtaccgcatccagttttccctgcggcagataaaaacgttccgcagcggcgcaaatctgcccctggttcaggtagccagcttcaataatgccgttgaccatcgcctccggcgtcaggtcatcgaggaacagcgcggcgtttttcccccccagctcaagggtcacccgtttacctgacgcactggccgactgctgaactttttcaccggtggccaccgagccggtgaagctcaccttggcgcaggccggatgcgtaatcagccgctgggcaatctcgccgccggcgccgttgaccacgttaatcaccccatccgggatacccaccgcttttgccagctccgccacgcgcagcagcgtcagcggcgtatattcgctcggcttgaggacgatggtgcagccgcagaccagggccgccgccagcttccagatggcaatcatgatggagaagttccacggcacgatgccaaccaccaccccaagcggctggcggcgggtaaaggcggtatatttctccccggccatcgatggcagcgagacatccagcgtttcaccggtgactttccccgcccagccggcgaagtagcgcaggaacgccaccgactggtccagctcgagcatccgcgccagcgtgatagttttgccggaacagagactttccagctgcgccagcgcttcgcgatgctctgccagcgtgtccgccagcttcagcagcagcgcgccgcgcgccagcgtcggcatctcgcgccactgactaaacgcctggcgggcgctctccatagcgcgatccgcctggtcactatccgccgcggtgacctcggcaatcgcccgcccggtcgccgggttgatcaccgcgaacggcgcgccgcggcccgcctcacgttgaccggcaataaactgcccgtgcggctggcgtaagaaagcggtcacttccgccagtaaggttatctcgctcatcgtcagcacccgtttttcagcaaagttaacccatcacagcacggcttcccgccgcagcctatcgttctaaagaacgtcattcttccggacgatattcaacgcccgcgcggcgtgctgtgatgagggtcttgagccaggcaagaccacagggtaacgcgatgaacatcaagatcgatgcgctgaactactacggcgcgacgaagaaatatcacctccatttcccggcgctacgggaagatattgaagccgatgtggtaattatcggcggcggcttctctggcattaacaccgcccttgagctggcggaacaggggatcaccaacgtggtggtgctggaggcgcgccatctcggctacggcggcaccgggcgcaacggcggccaggtgatggccggtatcggccacgatatcgaagcggtaaaaaagcacgtcggcaaagaggggctggagacgctgtttaaaatcgccaacctcggcgcgggcatcattcgcgaacgcatccgcaaatacaacatcgacgccgatttcgtgcccggctacggctatctcgcctataaccagcgacagcttaaaacgctgcgccagtgggagaaggagtttaaagccgctaccccggatgaagagatcgaactgtataccggaaaagaggtgcagcaggtggtgggctccgaggtctactgcggcgcgctgaaacatatgggcggcggccagatccattcactcaatatgctgctcggttcggcgcaggccgcccactcgctgggggtgaagattttcgaatcctcaccggtagtggaagtgaattacggcaaacaggtacaagtgcgcaccgcgatgggcagcgtcaaagccgccaaactgctgtgggcctgcgacagtttcctcaacaatatggagccggagatctacaacaagacgctggtcacttactcctaccaggtgtcgaccgagccgctctccgatgaactgatcgagcgcatcagcccgctacgcggcgccttcagcgatattcgcccggtaattaactactaccgcgtcacccgggaaaaccgcctgctgttcggcagcgccacccgctttgtggagtatacgccgaacgatttcgccgcctggaatcgcaccttgctggcggaggtcttcccctatctcagggatgtgaagatcgattttgcgtggggcgggccgatggcctgtagcgccaatctgttcccgcagatcggcaccctacgcgatcacaacaacgtcttttacgtccaggggtactccggcttcggcgtcaccccgtcgcacatcgtgtgcaaaatcctcgccgaagggatcaacggcggttccgaccgctatcgcctgctgagcagcatcccccacgcgaccatccacggtcgtgacagcctgcgtctgttattagtcacggccggaaaactgatgcatcaaaccgccggtttctggaaaggccggagttaaccaggagaacgctatgcacgcttttaaacttaaacacccggtacctgatctgcagccgatcggcagcgtcagcctgctcggcgcgacgccgaccgccggcgacccgcaggtagcgggcgcgatgatctacggcgagccgcaggacgcctttacctgcggactgttttcgtccactgaggggagctttaccatgacctatccgtttaccgagcacgccaccgtgctggagggcgaagtggagctgaccgtcgccggcggcgagccgcagcgctttgcgccgggcgacagctggtttgttaaacagggcaccgaagtggagtggaaaattctgacgccgcgctttgtgaagcactacctggcgaacgtcgagacccgctaacaaactgataatgcccggcggcgcattacgccttctccgggctaccaaatcgcgcagcgctgtagccccggtaagcggcagcgccaccggggggtttgaggccgccaacaccggcagtttcagtcagcatggtgaataaattaaaggcaggccgcacggaccgtaggccggataaggcgcagccgccatccggcagaaacaggcgcaacgtggcaagacggatggccccggttttcggggtcatattgtttatccgccgcgacattcatcgactgcgtcacagaatcatgcgccgccctccaccttccggacgatattcgttgagcaggatgcccgcctaaattatgactatccgggagtggcgctggctattccctgccctaccccattattgtgcagaggttgactatgtttagtaacagactcgccagccatcttgagcgcggcgtcgtcggcttcccgaccaccctcgccagctccgtcgggctgatcatggccagcccggtgatcctgacggtcaccagcggcttcggcatgggcggtgataccttcgcgctggcggtgctgctggcctttattatgatgcaggcgcaggtcaccacctttgccgaggcggcgacgctcattcccaccaccggttcggtgtacgactatatctcctgcggcatgggccgcttcttcgctatcaccggcgcgctgtgcgcctacttgatcgtccatatcttcgccgggacggcggagacgatcctggcgggcattatggcgctggtgaacttcgagtcgattaacgcccagatggccgctcaccagaatacctggatggtgggcgtcggcatggtggtgattttcggcttgctcaacgccatcggcgtggaaatcttcggcaaggtcgaagtgatgctgaccttcggcatgtggaccacgctgaccattttcggcctgtgcggcatttttatggcgccggtgactcatctttccggctggttcggcacgccgctgaacgttagcgatatcaacggcctgttcggctatatcggcatggcgatgtttatgttcgtcggttgcgaactggtgacgccgatggcgccggagatcaaacaggcccaccgcaccataccgcgggcgatggcgctgggcctgctgggggtcgccagctgcatgtttatctacggcgcggcgatcaaccgccaggtggagaataccgtgctcgacgcggccaacaacgtccatctgctggatacaccgatggcgatcccggccttcgccgaacgggtgatgggccacgccggccagtactggctgggggtcgggctactgttggccggctgcgccaccatcaatacgctgatggccgccgtgccgcgtattatctacggcatggcgctggacggcgcgctgccccgtttcctgacctggctgcatccgcgctttaagacgccggtgatcgccattgccatcggggtggcgatcccctgcctgcacgcctggtatctgaacggcgatctggaccgcatcgtgccgctgatcctcgccgcggtctgcgcctggggcgtcgcctatctgctggttactctgtcggtggtgatgctgcgcattcgccgcccggacctgccgcgcgcctaccgctcgccgtggttcccgctgccgcagattatctccagcgtcgggatcatcatcgctatcgtcaatatcacgccgcccgggatggacagccgccaggtgctggtgccgttcggcataatgctcggcctgaccgccgcttacgccctgttctggacggtgtgcgtgcagcgcgtcaatccgttcaagccgctggtagtggaagaggtggtggagcgcgccatcaacaattatgaaaaacagacccgcggggagatgacgccagatgtcctccgtcccctggtttgaaacgccgttaatgaacgcggtgcagcgcgatctggcgggctggcccagtgaaaagctgagcgaacgcagcgcgctgctgcgcttgaacgacgccaccgccgtcaccttcagcgtgcgtcagaagcggctgtttatggccagcattcacagctgcgagtttgtcgtcgaggggccggtgacccggcccgctcgcggcaagatccgcgcccaccaatccggctggctaaaacgcctgccaatccgctttatcggcagtaaagagagcgcggaactcgctggctatctcaacggttttcctaatctccagcagaccttaagcgagctggactaccgccgcttttcgttgacctttgacgatagcggctggcgctgcggcattgaaccctgggccgccagcgaagtggtctgtaaaatgccgccgctgcgccgttatctgcggctggaagcccagcagcggatgctgctgctcagcgtgctggcgatgattaatcaggcggtaagtcagtggatgcgcggtgaaatcgcagaagagaaagcattgacttccccgccatcaccgcggggaagctgaggtggtttatagcaaaccaaactgctgcgccagccgatcgatggcctggcgctggaactgcgcgaacgtggcgcgcggctgctgctgttgaataaattccagcagcggatcctggacctcagtgcggatgccgctcagggcttccatcaccgccaggccgcagaacggcacgtaggattcggcgtagccgccctcgtgcaccatcaccagtttcccgccgcacaggcgatccgccgcctgctggacctgttcggtcatcgcccggaagctatcgctgtgcagctgcatccgcgctaatggatccatggcgttggcgtcatagccgcaggcgataataatcagctccggctcaaaacgcgccagcgccggaataacgatagtttccagcgcatagcgccagctgtcatcccccgccccggccaacagcggaatattgatgttgtaaccttcgcccgcgcccacgccgcgatcgtcctcgccggcgtagcccggcgggaagcagccgtcctgatgcaaggagatagtcagtacatcgtcgcgctgcaggtagatatgctgggtgccgttgccgtggtgaacatcccagtcaatgatcgccaccttgcccagccccagctgcgctttcgctcgctcgacggcaatgggaatattggcgaggaaacaaaatcccatcgactggtccggcaggcagtggtgtccgggcgggcgcgacagcgaataggcgttatccagctcccccttcagcaccgcttccaccgccgcacaggccagcccggcggaaagacaggcgatttcataactgcccggccccagcggcgcctctttgccgagcatgccgccgccgttatcgcttatcgccttgaagcgctccagatagctgtcggggtggatccgccgcaggtcctcaaggctcgccggcgccgcgctgcgcagcgccagctgcggcgtcagcccggagacatccatcaggtttttcatccgccgtttggtctctggcgattcagcatgaccgccgccggcgggcggctgtacccacccgcccaccggcagcgtcaccgcgtgcagaccggtactgtgccagaaacaacgttcatcaaagaagaaaccggtttttcttttcactctatcctcccgtgggctaagccttcccggcggcggacgccgccacaattaaaatcagtgacagcagcgcgcagacgcctgccgccgccagcagcgggtcggcgctggcgaagtgttgcagtaaggcccccgcaagcgccgggccagccgccatgccgccgccgatcaccagattgatgctgttcatcagccgaccgctgttatcgagcccggccacgcgggcgagaataaagggcagcacgaaggtccaggtgaacttaaacagcagcgccgcgatggcgtaacgcaccagcagcggctggccgatcagcagcccaacgctgacgatcaacaggccgtagcccagccacaccggtaaacgatcggcccgccgggtgccgcgcagggccgcgccgccggcgccgataatgccgcaaaccgtcgccgccgccagcaccagaccgacctgcgtcgggctcagccccgccgcgctgccgatggtgccgataaaggtccacacggcgctgaggctgatatagaaagtgagcaccgccagcacagccagcgcctgacgccacagcgccgtcgacggctgctggcgggagactgaaagcggttgaaagcgcggagggaaagcggataccagcggcaaacagcagagcatgatggcggcgaggatcagatacaccaccttcaggccaaaggtcgcgaacaggccgggcagcgccagcaggccaagcatccctaacagcagttgcccgagcacccagaaggcgtagacccgcgacgggttcggcgttccggccgcgcagctgatgcacaaaatcatcaacgtgccgcccgccagcgaggcgataaagcgcgccgccagcagcgtctcgtactgggtgaccaccgccaaggcgaggttggcggccagaaacaccaccccggccgtcagggcaacccgccgccagtcgaggcggctcatccaccaccacgccgggagcgtcgccaggctcatcgcccccagctccgctgagaacagccagccgatctgcccgggttttagctgccattcgctggccagctgcgccgccaccgccggcgcggtcatcagaatacccggcgcaatagcggcaaaaatcacgatcgccgccagcaaacgcagggacaccatcagcccggcgggccgggaaagcgcattatcagtgagaggtgtactcgacatcgtagggcgtgctccggtcaaaaaagcctccccccggaggatcctccagggagtgatacccacaggcatcaggaaaacgccgtgctgccacggcgcgcgcgggatgcgaaagtcagattacagatgcagcgtacgctgagcggccggcatccaggttcgggaaaccagttcggtacgattgaccacttcggtcttggcgaaaatattgcgcaggtgcgtttttaccgtcgagagcgagatatccagctggcgggcaatcagcttattgctggcgccttcgcgcaccatgccgacgatttcccgctctttcgccgtcaggatggcgggcagatcatcttcttcctgcaggcagtcgcgaatggccagctctaccagcggcagcaccgcctgggcccgctggcgctcttcgctggagaaaggcacgtcgcgcatcagcgagataccggcgacgatccgccgctcgcggcggataaagatctcggtcatgtcgcgcacgttattcggcaacataaattcatgatagtaatgccggttgcggtcgcagagccgcggcgtcatcgccgccacggtggtgttctggtggctaaagtgcgacggcagaagcggatccagcggctggaagttttccagatattgttggtgcgtattatcggaaatattatgcaatatatagttttcgggttttaaacgattatttactcgataaaacaccgctgaagttagtggaattaactgggaaatagtctgtaaacaacgggctattatcgcatcattacggctggcttttaacaaagcagacatgatagggcctccccgtcgagatgatggtacatgacacatggatgactactgataattgaagcatacatttcacatttaagtaacacaatcattaacatattaacaatgtgatagccgttacaaaattttcagcaatacattgttatataaagcatttaaaaaacaccccggccatgctttacgatagcggcgttaaaacataaacaaataagattaacacccggcgtacctgcccctggtgataaaaaaaccctattcccgacgcgtgattctcatcctaaagaacgatggatttttgttttttttcacttatacccttaacaggatgcaattaattttcgccgcggcttaatcatgtgattacgccagacccgctgttgccaaaataatatcaacagcaccggtcattaaccgaggataagccgatgctgaatatcgccgccctgcgccagcagcaaattccgctggccgctgagccgcgctcgccggtgccgtttcatattctgatgaagccgattggccccgcctgcaatctcgcctgccgctattgctattacccgcaggacgaaacgccggtcaacaagatggatgacgcgcggctggagcagtttatccgccgctatattgccgcccagcccgccggcgcgcgggaaatcaactttgtctggcaggggggcgagccgctgctggccggcctgagcttctacaaaaaagcgctcgccctgcaggagcgctatgcccccgacggcgtgactatcagcaacagcctgcagaccaacgggacgctgatcaacgacgcatggtgccgactgttccgcgaacatggctttattatcgggttgagcctcgaaggcaacgaagcgctgcaggactaccatcgtccggataaacgcggccggtcgacctggtcggcggcgctgcgcggcattgacctgctccatcagcatcaggtggactttaatctgctggtggtggtgcataacgagatggcggcccacgcggcggcgatttatgaccggctggtcagcctcggcgcgcgctatctgcagtttcagccgctgatgagcgaaggcgcggccctgcgcgaaggataccagctcagcgccgataactggggacgttttatggtcggcatctggcgacagtggcggaagcgctgcgatagagggcgggtgttcgttatcaatatcgaacaggcgtgggcgcagtatttcactcataccagcggcagttgcgtgcacagcgcccgctgcggcagcaacctggtgatggagcccgacggacagctctacgcctgcgaccacctgatcaacgccgaacatcggctgggccgcctcgatgagcagacgctcgccgccgcggtcgacgcctcggtgcaactgccgttcggtcagcagaaaagtctgcgccgcgaatgccagacttgctcggtaaaaatggtctgccagggcggctgcccggcgcatctcaacgccgcaggcaacaaccgcctctgcggaggctactaccgcttctttagcgacatcctcgcgccagtacgccccttttcccgcgaccttaatggcctgaaggcctggcgggccgcgtttgttgggactgcgcatactgcgtagcgccttaccctgatgatatccccctctgaacaggagagtcagtcgtgaacaaaaaagccatggccgcggcggtcagcatgatcctcgccggtggcgcgcacgccgcgcagcaggagcgtccaaacgtcatcgtgattatcgccgatgatatgggctactcggacatcagcccctttggcggcgagatccccacccccaacctgcaggcgatggccgagcagggaatgcgcatgagccagtattacacctcgccgatgtcggccccggcgcgctcaatgctgctcaccggcaacagtaaccagcaggctgggatgggcggcatgtggtggtacgacagcaccattggcaaggaaggctacgagctgcggttgaccgaccgcgtcaccaccatggccgagcgctttaaagacgcggggtataacaccctgatggccggtaaatggcacctcggttttgttcccggcgccacgccgaaagatcgcggctttaatcacgccttcgcctttatgggcggcggcaccagccactttaacgacgcgataccgctggggaccgttgaagccttccacacctactacacccgcgacggcgagcgcgtctccctaccggatgatttttactccagcgaagcctacgcccgccagatgaacagctggattaaagcgacgccgaaggaacagccggtcttcgcctggctggccttcaccgcccctcatgatcccctgcaggcgccggacgagtggattaagcgcttcaaaggccagtatgagcagggttacgcagaggtctatcgccagcgcatcgcccgcctgaaagcgctgggaattatgcatgacgataccccgctgccgcatctggagctggataaagagtgggaggcgctaacgccagagcagcagaaatatacggcgaaagtgatgcaggtgtatgcggcgatgatcgccaatatggacgcgcaaatcggcaccctgatggagacgctgaaacaaaccgggcgcgataaaaataccctgctggtctttttaaccgataacggcgccaacccggcgcagggtttctactacgaatctaccccggaattctggaagcagttcgataacagctatgacaacgtcggccgcaaaggatcatttgtctcctacggcccgcactgggccaacgtcagcaacgccccctacgccaattatcacaaaaccaccagcgcccagggcggcatcaataccgactttatgatctccggtcccgggatcacccgccacggtaaaatcgacgcctcgacgatggcggtgtatgacgtggcgccgacgctatatgaattcgccggcatcgatccgaacaagtcgctggcgaaaaagccggtgttgccgatgatcggcgtcagctttaagcgctatctcaccggcgaagtacaggagccgccgcgcggcaactacggggttgaactgcatcatcaggcggcctgggtcgatggcgaatggaagctgcgacggctggtgccgcgcggcctcaccgccggcgacgcgccgtggcagctgtttaatctgcacgacgacccgctggagacgcatgatgtcgcggccgaacatcccgatcgggtcaaagccatgagcgaggcctacgaggcatttgctaagcgcaccatggtcacccgggcacagggcaagatgatcgactacgtcggcatcgacagcaaaaccgggcgctatctggcagtcgaccccgccaccatgaagccggtgcctgcgccgcaggcgatccctgtgagcgagatccattaaccaccacggctatcgttcttccgggcgatagccgggacctgacgcgctttttaaggtaatcggaaaccccattacaggagagtgcggatggcgagagtcgtggtaattaccggcggtggaaccggaattggcgccgcctgcgcgcggctgatgcgcgccgcgggcgaccgggtgtttattaccggacggcgcgaagcgccgctgcaggctgtcgccaatgagaccggcgccacggcgctggtgggcgatgccgccgccggcgagggctggcgcccgcggccgctggcggcccaccccggacagcccggggggagcgagggcgcgacgccggcgcgcgcacgcacccgcccccgcgccgcatgcgcgac

SEQ ID NO: 150 - DNA, 66431 bp, Unknown
  source: /note="Description of Unknown: MKP2_2161_1 Mutant Bacteria sequence"
ggccagcgtgccggcatgcctccccggtggcgctgcgcttaccggggctacggatccgacacggggctacgtccctgtggccggacaaggtgcgcagcaccgcctccgggaaaatccctcctatatctcctttcaacgcaaaataaaaccccgtcatggcaatcccttcgccataatccactttttccctgcccctgcgctggcgatgatcgcgaaaaccgtgcttgcgaaaaaaaatgtgaatccaatcacatataaaaatataacaattatataacatttagtttactaattaatttgtctgcgtgacgtggtacgcccgacaagacagattgcagtctttgctggagcaatataacaatgacagaaagtagcattaccgaacggggcgcgccggaactggccgatacccgtcgtcgtatttgggcaattgttggcgcttcctcggggaatctggttgaatggtttgatttttacgtttactcattctgctcgctctatttcgcgcacatcttctttccatccggaaataccaccacccaactgctgcaaacggcaggcgtatttgccgccggatttctgatgcgtcctatcggtggatggctgtttggtcggatcgctgaccgccggggacgtaaaacgtccatgcttatctcggtctgcatgatgtgctttggctcactggtgattgcttgtctgccgggttatgcggtgatcggcacctgggccccggcgctgctgctgctggcgcgtctgttccaggggctgtctgttggcggagaatacggcaccagtgcgacctatatgagtgaagtcgcggtggagggtaagaaaggcttctatgcctccttccagtacgttacgctgattggtggtcaactgctggctgtattagtggttgtggcgctccagcaggtgcttagcgatgaagatctccatgcctggggatggcgtattccttttgccctcggggcggtactggctatcgtcgcgctgtggctgcgtcgccagctggacgaaacctcgaagcaagagacccgggcgctgaaagaggctggctcatttaaagggttgtggcgcaatcgccgggcctttgcgatggtgttaggctttaccgccgccggatcgctgaccttctacaccttcaccacctatatgcaaaagtatctggtcaacacggcgggcatgacggccagcaccgccagcgtgatcatgaccgcggcgctgttcgtttatatgctggttcagccgctattcggcgccttctcggataaagttggccgccggacctccatgctgtgctttggcgtgctggcgacgttatttaccgtgcctattctcagcgccttgcaaaaagtgagctcaccctatgccgccttcggcctggtgatctgcgccttactgattgtcagtttctatacctcgatcagcggcatcctgaaagcagagatgttcccggctcaggttcgcgcgcttggggtcgggttgtcctatgccgtcgcgaacgcattgttcggcggctctgcggagtacgtcgcgctgtcgcttaagtcggcagggatagagcacgcgttctactggtatgtgacggtgatggccgccattgccttccttgtctccctgatgttgcatcgcaaagggaaggggttgcgtctgtaacgcttactgatgagccaactgccatacagcgtagccggtggtcgcgccggcgacatcccaggcaaaatccttccagctccagccgctcccagccgggcggctgtcccaaagctcttttgaggcgccaaggctgacggaaaacatcaggccgatagcggcgctgcggtcccggctgtaaccctgatgttgcgcatattcattgccagcggcagagagcatcgctgaggccagaaaatgctgggctttgtcctgaccggaccatgcatcatttgccatgtggctgcagccggttaacagcagcgaagcaatcactattatcgtacgcatagcgcttccagaaaaaagccccgtcgaggcggggctgatagtcagagaatacggctgatcagccggtcaatgcggatccgccgcaggcggcggatcagttttcgcactttcaccggatagtcggcgatactttgcagatcccgataatgtttcactaccgtggtgtgggtgcggatgagcttcagctctttctcccgcatggcccccagctgccgctttggatcgtggatcagaatggcgttttccagatcgagccgccaggcgcgcgggttcaggttgttgccagtgagcagcatccactcatcgtcaacccacatgcctttcaggtggtagctgttatcgtcatccttccacaggcggacgatcagctgatcggtattgacataatactgcagccggctgaggaaacgccgcaggttgatctcatacagatagggaagggcgccgatgattttaaacggctgatcttcaggaatgtagaaatcgttagccgttttatcgccgacaataatctccacctgtttaccgtcgcgcagcagctggatgatatttcttaccagtacggcagggaggttgaagtagggggtgcagatcgtcagcttgtgttcggcacagggcatcaggtgaaagatggttttattcagcaggctcgatttacccaggcctaccagcggggtgacggagagttcttcgtcaccagcggtgccgacaaaatggtagctgcggtcgcggagctcctgacggtactggcgaatgtcgtttttgatttccgggctttttggccgatccggtctgtcgagacggttaacgccgcgcccctgaaccagattgttgtcgacccagtcgaacatgatgtccgccattttgccgttacggatgcactgatagcgatcatagcgatacttatcatgctgatgcagataaacatcattcaggctggcgccgctgtagaggacgcagtcatcaataataaagcctttgaaatggagaacgccgagcgcctcccgggtgttaatcggcacgccgtaaacggggatatctacccctggattttcattggccatccgacaataccagtcggcattggtattagaggcggcggcgccgatacggccacgctgagcgcggtgccagtccaccagaacgcggacatccagttccggacgctggcgtttggcgtcataaagggcctgcaaaattccttttccgccatcatcttgctccagatagagcgcaataatgcatatacgctgagtggcgtgggcaatccgggtcagtaacgcttccctgaattccgcaggggcgtaaaagaactctacatcatcaactgactgagaaagcttagggagttgggcaaggtgttgttgatgtttattacgcttaaattttgacaacatcacagtgcgtttcttctctgtttattgaagggtcttctgtaccatgcagacgacgtaagcgggcaataataccattactacccgctaatgtggtcaacaattgcggtcagcgtcgcgcgattatccctgattcaggggcagcgacaggctgacaatcccatcttccagctgaatatcgacggtgaatcccagctttctggcgaggcctatcatgcctcggttatttggcatcgtaataccattaaggcgctgcaggccatggctttgcgtataggcgatcagcttttccagcaaccttcgccccaggcctaacccttttaaatctgaacggaccagaacggcaaactcggcgtcaatattatcgggatcggagatcgcccgcgtcacgccgaggatctcgctcttctctgcgctggtcctgacggcaacgaacgccatttctcgatcgtagtcgatctgggtcatattggctaagtcgtcatgggtaaattcgttgatctcactaaaatagcgataatagagatcttctttggtgacctgggcgataaatgcgagcaactgtggctcatcttccgggaggatcggccggaacagacagcgatcgccatttttcatcaccacccactcctccagttggtgcggatagggacgaatagcgagacggctttcactgtcgccgctgaagggagcaagccccagggtaacgtccagcgccgtaaactcgttgccggaggcgagcaggggatgaatatccaggcgctggatctccgggcagtcgacgatcaggttcgagacctgaaccagcagctggcttaagccagcgatatccagcgggcgcaaggcgctgcggccgcggatcttcttatttttgatcgcctggatcaccagataacgcgccaggttcatattcagcggcggcagcgccacggcggcctggtcctcggcccgccactccacgccgccctcgcctagcataatcaacgggccgaagacgggatcgtgctcaaccactactcttagctcctgggcgccagcgcgattggccatgctttgcaccagcaatccatgaatgcgcgcctggggccaggccagtttgacgcgatcgatcatcgcatctgcagcctgctgcacctcggcggcggtacgcaaatagagcatgaccccctgtacttctgatttgtgcgggatatccggagaacgcagcttcagcgcaaccggatagcctatctgctcagcgatatgcaccgcttccgcgctgtcagcggcaatccaggttggcagcgtgtggatgccataggcccgaagcaccgggctgacctcgtgagtatccagcgtggtggcgccgtcttctatcgcttgctgcagcagagcatgcgcctcgctggtattggcggttaaggagtctggtagcaccggcgtctcgcgcagttgtttctggttgcgacggtattccaccatatgcataaaagcggtgatcgtgccctccggcgtacggtaggtagggaggccggcatcgctgaataaacgtcgcgcttcctgcgaggaaaattcgccgcaccagttggtcagcacggtgacatatttaccgcgcgggtgatgcttcagagcgtcaatcagggccagggcactctcggtgcccggcgcggcggcgctgggagagtggatcaccagcagcgcgtcatagtcctgactgttgagcaaaacattcaccgcccgctgatagtgttcgctactggcgtcatcgcgtagatccagcgggttggcgatctccacgccaaccggcaacgcctggcgcagggcgtcgcgcgtctcctcgctgagagtcgccagcttaccgtttcgcaaccaaagctcatccagcgccagcgccgccggcgccgcaccgttgctgacgatcatcagtttttcaccgcgcagcgggcgcatgtggctgagcgtttccaccgcagagaacagctcatgggtatcctgcacccgcagcagaccagcgcgctgaatggccgcatcccatgccgggtccatcccggaattggcgtgcaatagcttctgcgccgccggactacggccgcttttaatcaccaggataggtttgtttcgcgaagcgctgcgcgcggcggagacaaagcggcgcgcgtcgctgagatgctcgaggtacagcaaaatggcgctggtcttgctgtcgcgggccagaaagtccagcaggtcatcgacatcaatatccaggctatcacccagggcgatgaagtaggaaaaacccatctcgcgctgttgcgcccagtcaaggatagtattggagacggcggccgactgcgagataaaggccagtttaccgcgatggatcggcaccggtgaaaagctggcgttcagcccttgccatggggccagcagtccgagactgttggggccgagcagacgcatctgatagcgcgcggcgcattcgagcagcgccgggtactgttccggctgcgaagagaggatgatgcaggtcttgcagcctttttgccctaaggcttcgagcaattcgagattacgcctggcgttagtacagagcaccgccagatccggcgtaaacggcaggctctcgatggtaggccatgccagtaccccaagaaccgccttccaggcgggggtgaccggcatcaccgggccattgaagccgccggctaacaggttgcgcatcatgagatagccagcgcgctgcggcttcattgatgcgccaataacggcgatggactttggtcgcagcagcgcttccaggcctcgttggctcataccggtctcctttcatcccagtgaccgaatgattttaaacgttttccacctggcccgctgtgatactgcccttatgctgggtttttcccgccagatagcgggtccggaagcgggtgaagtgctcgccaagcgcagcggcggccggggcatcgcccgccagatccagcagggcgatggccacttccgcggtacaatattgtccgtcggcgtgcgcctcgcgcagatggtaggcagagatgcgcgacagatcgacggagataatcggcagcgcgtcgagataaggactcttacggaacattttgcgcgcttcggtccaggtgccgtcgagcatgataaacagcggcggtttaccggacggcggcgcgctcaggacctggcgatccggcccggcataggaggccggaaatacgaccatgggctgataatcaggatgggcgaccagatcgagcagcgcctgcggcggttcggtacgcgaccactgaaacgcttcggtatctggcagaatatcggcgatgagccggccagtgttgctgggcttcatcggttccgtatcaaacatcaccaggcagaagcggctggcggcctgcgccgaggttaacgtggcgcacaggcactgcttgagcggcagcagacagcgctggcagcggcggaggcgattgccgcgcgcaaggaaagggcgggtagctcgcgcgagacgttcggcgcgcaggcgaaggacagcgttatcagtcatgggagtcgctagtgaaaaacgctattgtcgcagaggtgaaaacggggcacaagcggtgccccggaagggttattgttggccggcttcgttaagccagctatcgaatggcgcttttggcactgcgccattgagcatgtcgatcacttcgccatttttgaacatcataatggtcgggatgctgcggatacgaaaccgggcgctaagctcacgttccgcttcggtgttgactttcacaaaacgcatcttcccgctacgctcttccgcgacgtcttcaaagatcggcgcgaagctacggcagggtccgcaccatggcgcccagaaatcgacaacgaccggcagatcgtccttcaagagtttatccagcgttgccccggtcgcgttgatgacgtcgccgtcaaaaagatcgtgaccgcagcgtccgcactttgcgccatccgcgctacgaccgtccgggaggcggttcagagcctgacaactggcacaaacggtattcataactaacctctggttatgggttgcaacgtggcacgtggccgatatgtttctgtgatgttacatattatcgatgaagtgttatttgaggacaatgcgttttgttcgatgagtgcaatagaggccggcttttaaacgaaatcatggcgaagcgatgacacatcgggtaatctgcgcgcttcgcgcagcgcaggtggagaaaattgatgagcgacgaactgaaaaataaaagcggcaaggtcaaagtgatgtatgtccgcagtgatgatgattctgacaaacgcacccataacccacgtaccgggaaagggggaggtcgtccaggaaaatctcgtgttgacggccgcagccgccctgcgcgtgacgaacgaaacagccgcggtgacgatcgcaaacgtgacgaccgtaagcgtgacgatcgcaaacgcgatgattttcatcgcgacgatgcgtctccgtggcgtaccgtttcccgcgctcctggcgatgagacgccggtaaaagaagatcacggcgggatcagcgggaagagctttatcgatccggaagtgctgcgtcgtcagcgtgcggaagagacccgcgtatatggcgaaaacgcctgccaggcgctgttccagagccgtccggaagctatcgttcgcgcctggtttattcagagcgtgacgccgcgctttaaagaggcgctgcgctggatggcggccaaccgtaaggcctatcacgtggtggacgaagccgagctggcgaaagcctccggcaccgagcaccacggcggcgtctgcttcctgatcaaaaaacgccacggcacttctgttgctcaatgggtcgcgaaggccggggaagaagattgcgttctggcgctggaagatgtgggtaacccacataatctcggggcgatcatgcgcagctgcgcgcactttggcgtgaagggcgtggtggttcaggatgctggcgtgctggagtccggggcggcgatccgtacggcggagggcggtgcggagcatgttgaaccgatcactggcgacagctttatcgataccctcgatcagttccgcaaagcgggctacgcgattgtctcaacgtccagccataatggtaccccgctgtttaaagccgagctgccgaagaaaatggtgctggcgttaggccaggaacgtgatggtctgtccgatgcggcgatttccagcgccgatctcagcgttgccatcgacggtaccggtaatgtcgaaagcctgaacgtctctgtggcgaccggcgtcctgctggcggaatggtggcgtcagaacaaggcgtgattcgcctgcctgaatgcaaaaaagccagctgatgctggcttttttttatggctgtcaatcactcgctttcagcgggaaggaccggcatccagtcgatcggcgtttcgccgcggtcaaccagccactggttggtctgtacgaaatgattgcagccaaagaagccgcgatgcgcagagagcggtgatggatgcggcgccttcagcacgcagtggcgctgacgatcgataatcgcgcctttcttctgcgcatgagagccccacagcagaaaaactactccctcgcaatgctcattgattaaagcgataaccttatcggtaaaggtctcccagcccagactggcatgcgagtgcgcctgtccggcgcggacggtcaggaccgtattcagcagcagcacgccctgtcgtgcccagctttcgagataaccgtgggtggggcgggtaaagccggggatcgtggcctccagctctttatacatattcagcaacgaaggcgggatcgcgacgcccggacgaactgagaacgccagaccgtgggcctgacccgggccgtgataggggtcctggccgagaatgacgactttgacatcgcccagttcagtaaagcgaaacgcattgaagacgtctttttgcggtggatagatggtgatcccggactggcgctcttcggcgacggtcttcagagtattgagaaaatagggttgttgcttttcatccgccagcacgtcatgccaggttaaaggggtggtcatcttgctctcctgcaaaagggtcatcgctatagcttaacggcttctttctatagaacaaaatcggcacggcttgatgccggcttttatgcaaaaaaaattgaaaatttacaaaattatttatagctcacaatggcgtaacttgatgtaaaacaataaaaacctcctatacccacgttgggtgagtggtttttattgatttatatcaaggaatgccgagggtgcggctgatatatatacactcatacaacaatggttttaccaattggccgcgaagaggccaaaatcgaataaacactgcctgggaggcatcaaatgattactggtatccaaattactaaagcggcaaacgacgacctgctcaactctttctggctgctggatagcgaaaaaggcgaagcgcgctgcctgtgcgccaaaggtggttttgcggaagatgatgtggttgcggtaagcaaactgggtgaaatcgaataccgtgaaatcccggtggacgtgaaaccggaagtgcgcgtcgaaggcggtcagcacctgaacgttaacgtgctgcgtcgcgaaaccctgctggacgcggttgagcatccggaaaaatatccgcagctgaccattcgtgtttccggctacgcggtacgcttcaactctctgacgccggaacagcagcgcgacgttatcgcccgtacctttaccgaaagcctgtaaggctaacgccagatgtgaaaacgccgggatatcccggcgtttttttactcatcgctggacgctgatggcgtcccggccgcgcttggcttccggcgcttaccgatatttttcgtatcgcggtggcgcttcttcacccgcggtttctctttttcatcttttttcttctgcgcacgcttcgccagcactttcttcgatggcttacccgtcagcttctcgctcggcgcacgggtcttcgggcgcagttcatcgataactctggctttcaacggctcttcaatatagcgaccaatcttacccagcagcaggtggtcatgagcctcgaccagagaaatggcggtcccttttttaccggcgcggccggtacgaccgatacggtgcaggtaggtatccgcggtacgcggcatatcgaagttaaagacgtggctgacgtccggaatatcgataccgcgggcagcgacgtcggtggcgatcagcacgttgacgcggccgtcggtcaggcgcttgatagcttcgtttcgcttggcctgcaccatctcgccttccagccagcaggtgttaatcccggcctcacgcagccagttagccagctcatgcacgcgctcacgcttacgcacaaacacgatagcgcgggtggcttccggctgttgcagcagattcaccagcagtttggttttatgttcgatatcgtcggcgcggtagtaccactgatggattttcttacgctcgcgggttgacggattggcggaaacttcaaccggctcctccagcagacgctcagcaaagtctttgatcgcatcgccttccagcgtcgcggagaacagcatagtctgcttgcgccagcgagtttcaccggcgatggtttcgatatcctgggcaaaacccatatccagcatgcggtcggcttcatcgaggattagggtctcgacggcgcggcagtcgaaattctcttctttaatatattgcagcaggcgaccggtggtggcgactacgatgtcctggttttcgctgaacacttccgcgtggttcatgtacgccacgccgccggtaatggtagcgatgtccagatgggtatgcttcgccagctcgcgggcgtggtcggctacctgcatcgccagctcacgggtcggcgtcaggataagaatgcgcggcgggccggatttcttacgcgggaaatcgagcaggtgctgcaacgctggcagcagatacgccgccgttttaccggtgccggtcggcgctgaaccgagaatgtcacggccatcgagcgcaggcggaatagcggcggcctgaatggctgtcgggcgagtgaaacctttatcctggagggcttccagcaggttttcgtcgagttcaagttcggaaaaagtcgttacagtcatgttctacctctgagtgggccgccgattatagacgttactgacgtaatgttcatctgtttgtaaggctatctgttctccggtattgtgcatagccttaggttcaggagtttttgtcggcaaggttattgaggatgtctcagtcgaagtttgcgctgccgcgcaatggttttaccttcaaacggttctttgtcgctcacgatcgctgcgccatgaaggtgggtaccgacggtattttgctgggcgcctgggcgccgattgccggagtgaagcatgtgctggatattggcgcgggcagcggcttgctggcgctgatgctcgcgcagcgtaccggagatgatgtgcatgtcgaggcggtagaactggacgaagaggccgccgctcaggcgcgggaaaacgccctcgcgtcgccgtgggcttcgcggattgaggtctggcaggccgatattcatcagtggcagcagtcgcaaactcgacgctatgaactgataatcagtaatccgcccttttttgccgaaggcgtgccatgcgcgacctcgcagcgagagcaggcgcggtacaccactacgctcgatcacgcctccctgctgacctgtgccgcagagcatattaccgaagaaggttttttttgcgtggtgttgccggtggatattggtaatgctttcatcgaacgggcaagggcgatgggctggcatctgcgactgcgtactgacgtggcggagaccgagctgcgaccgccgcatcgggtgctgctggctttctccccgacggcaggggagtgtttcagcgacaggctggcgatccgcgggccagcgcagcaatattcggaaggctttaccgctctgaccgaggacttttatctctttatgtgagccaggggcgagagtatcgacgggccgctgtcaggcagcggctgcggatagtcgagggtataatgcagaccgcggctctccttacgcaacatcgcgcagcgtacgataagctccgccacctgcaccagattgcgcagttccagcaaattattcgagacgcggaagcgggcgtaatactcatccagctcctgctggagcatggtaatgcgccgcagggcgcgctccagcctgcgggtggtgcgcacaatccccacgtaatcccacatcagcaggcgcagttcgtgccagttgtgctggataaccaccagttcatccgggatctccacctgactttcatcccatgctggcagcgtggcgaccttctgggcgagcggcaggcgccgggtaatatcctccgcggcggaccagccatagaccaggcactccagcaacgagttcgacgccatacgattcgcgccgtgcagcccggtgtagctgacttcgccgatggcgtataaaccatcgacgtcggtgcggccattatcatccaccatcacgccgccgcaggtgtaatgcgcggcggggacgaccggcaccggctctttggttaaatcaattcccaggccgagcagcttttcataaatcatcgggaaatgctggcgaacaaacgcctcgggtttatggctgatatcaaggaacatgcagtccacgcccaggcgcttcatttcatggtcgatggcgcgggcgacgatatcgcgcggggccagctcgccgcgctcgtcaaagtccggcataaagcgggtgccatccgggcgtttaaggtgggcgccttcgccgcgcagcgcttcagtaagcaggaaattacgcgcctgggggtgatatagcgcggtggggtggaactggttaaactccagattcgccacccgacatcccgcccgccaggccattgcaatcccgtctccggaagaaacgtcggggttagtggtatattgataaaccttcgcggccccgccggtagcgagtactacggctttcgcgctgcaggtttccacccgctctttattacgattccagatccatgccccgaccacccggcgggtgcccggcaggccaatcttatccgatacgatcaaatcgacggcattgctgcgctcaaggatgcggatattaggatgggcaagcgctttatcgaccagcgtcgtctctaccgctttgccggtggcgtcggcggcgtgaagaatgcgccgatggctgtgccccccttcgcgcgtgagatgatagctctcttcgccattggcctggacctgggtgtcaaacagcactccctgatcgataagccactggacgcatgatcgggcattgctggcgacgaaagtgaccgcatgacgatcgcagagtcccgcgccggcgatgagggtatcttcgacatgggattcaatactgtccgtctcatcgaagacggcggcaatcccaccctgggcgtagaacgtcgaaccttcgctgatcggccctttactcagcacggtcaccgaactgtgctcagccaggcgcagggcaagggaaagaccggcagcgccgctgccgataatcaacacatcacaagagaagtcaggagtggtattcattgtctttgtttaatttactaaacacatttagctcacaatagcaccggtccgtgaggaatcgtacaatttttttgtctgctgttgtgacggctaaacaaaaggcgaacggaaacggcgtcttgcgcgctgaaaatgagacgcggggcaggttgatggcattggattttatagtgaaataaacggcgtgttacgatacccttcagacgggcctgcgctttttcttattgacttacctatcgtttagcaacctgggcatataatgattgataacgatctgccgccgttgccagacaaaaaacaaaaagcgtaacggaactttattgttttcatgcactccaacagtcagcttgctcataatgcagattttgggtggtgttttgaagacgcatgggaattgggtttggggagacattacctcggatgagcgagcagttaacggatcaggtccttgttgaacgggtccagaaaggagatcagaaagcgtttaatttgctggtagtgcgctatcagcataaggtcgcgagcctggtttcccgctatgtaccgccgggcgatatcgctgacgttgttcaggaatcgttcgttaaggcatggcgtgcgctggactctttccggggagatagcgctttttacacctggttataccgtatcgctgtcaacacggcgaagaattatctggttgctcaggggcgccgtccgccgtccagcgatgttgacgccaacgaggcggaaaacttcgaaagcggcggggcgttgaaagaaatttcgaaccctgagaacttaatgttgtcagaagaactgagacaaatagtttttcgtaccattgaatcgctcccggaagatttacgcatggcaattacgttacgggagctggatggcctgagctatgaagagatagccgctatcatggattgtccggttgggacggtgcgttcgcgtatcttccgggcgcgagaagctattgataataaagttcaaccgcttatcaggcgttgacgatagcggaatactggaaaagggtatcaggcatgcagaaagaaaaactttcggctttaatggatggtgaaacgctggataacgaactgctcaacgagctgagtcgttcttctgagatgcaaaaaacctgggagagttatcaccttatccgcgatacgctgcgtggcgataccgctgaggtgctgcaatttgatatctccgcccgggtgatggccgccattgaaaatgagcccgttcgtcagacggcgccgcttattcctgaatctcagcccgcaccgcatcagtggcggcagatgccgttctggaacaaggtgcgtccgtgggccagctccctgactcaaatgggcgttgccgcctgcgtatcgcttgcggttatcgtcggcgtccagcactataatggtcagtctgattccgctcagcagcccgaagcgccggtgttcaatacgctgcccatgatgggtaaagcaagcccggtaagtcttggcgtgccggctgacgcgtcagcgggaagcggccagcaggcgcaggtccaggaacagcgccgccgaattaacgccatgctgcaggactacgaactgcagcgccgcctgcacgctgagcagcttcagtttggccaggcccagactcagcaggccgcagtccaggtaccgggctatcaaactttaggaacgcaatcgcagtaatgaagcaactttggtgtgccatgtcgctcatggcaggcagcctgttgttctctgtcaacgcctcggctgatacatcgtccggggcgttgttgcagcagatgaacctggccagccagtctctcaattatgagctgtcttttgttagcatcagcaaacaaggcgttgagtcgctgcgctatcgtcacgcgcgactgaacaaccaaccgctggcgcagttgctgcagctggacggtccgcgccgggaagtggtcctgcgcggcacggaaatcagctattttgaacccggtctcgatccgttcaccctgaacggggactatatcgtcgattcgctgccatcgctggtatatagcgatttcaaacgcctctccgcggcgtatgattttatctccgtgggccgtacccgtatcgctgaccgcctctgcgacgtgatccgcgtcgtggctcgcgacggcacgcgctacagctttatcgcctggctggatgctgaaaccaagctgccgctacgcgtcgatttgctcgaccgcgacggggaaacgctggagcagttccgggtcgtctccttcaatgttggcgataacgtcagcgccagcatggagacgctggcaaaagcgaatttgccgccgcagctgtcggtgcctgaaggaggcgacaaagccaacttcaactgggcgccgacgtggctcccgcagggcgtgactgaggtttccagcagccagcgccgtcttcccacctttgacggtccggtagaatcacgtctctattccgacggcttgttcagcttctcgatcaatatcaaccgcgccacggcggccagcagcgaccagctgttgcgcaccggccgacgcaccgtcagcacgacggtgcgcgataacgcggagataaccgtagtgggcgagctgccgccgcagacggcgaagcgtatctctgacagtattaaattcaaggcagtacaatgattaaagagtgggctaccgtggtttcctggcataacggcgtggcgcaggtgcactgcgacgttaaagcctcctgcagcagctgcgcctcccgtgccggctgtggtagccgggtgctaaacaagctggggccgcagaccagccataccattagcgtgccctgcgagcagccgttggccgcggggcaaaaagtggagctggggatcgctgaaagcagcctgctgggctcagcgatgctggtgtatatggcgccgctggcggggctgtttgtaatggcgtctatttttcaggtgctgtttgccagcgatattgcgtcactttgcggcgcgctgctgggcggcgtcggcggcttcctggtggcgcgcggtctgtcgccgcgactggcggcacgtcagtcctggcagccggtgattttgaacgtcgcactgccgccggatctgctgcgtgttgatacgccttcctccgacatgggccagtgatttcactggcccttatctttatttacctttcctgttacaacgccacaatttctgcgggtatgctggatctaacagcatttcctggtttcgcggatgtagtgtagaatgcggcgttttcggattaaaaaacgtcaggcacagtacagcggcctcatgatactcgtaaggcataattaactctaaatatgaagaatatacgtaacttttcgatcatcgctcacatcgaccacggtaagtcgacgctgtctgaccgtatcatccagatttgcggtggcctttctgatcgtgaaatggaagcccaggttctggactccatggatcttgagcgcgaacgcgggatcaccatcaaggcgcagagcgtcaccctggactataaggccagcgacggtgagacctaccagctgaactttatcgacaccccgggccacgtggacttctcttatgaagtttcccgttctcttgccgcgtgcgaaggcgcgctgctggtggtagacgccgggcagggggtagaagcccagaccctggccaactgctacaccgccatggagatggatctcgaagtggttccggtactcaacaagatcgacctgcctgcggccgaccctgagcgcgtagcggacgagattgaagatatcgtcgggatcgacgcccacgacgcggtgcgctgctcagcgaaaaccggcgtcggcgtgaccgacgtgctggagcgtctggtgcgcgatatcccgccgccggaaggcgatccggacgcgccgctgcaggcgctgattatcgactcctggttcgataactacctcggcgtggtgtcgctggtgcggattaaaaacggcaccatgcgcaagggcgacaagatcaaggtcatgagcaccggccaggtctataacgctgatcgtctgggcatcttcaccccgaaacaggttgaccgtaccgagctgaaatgcggcgaggtaggctggctggtctgcgcgatcaaagacatcctcggcgcgccggtgggcgataccctgaccgccgcccgcaacccggcagacaaagcgctgcctggctttaagaaggtgaaaccgcaggtgtatgccggcctgttcccggtgagctccgatgattatgaagctttccgcgacgcgctgggcaaactgagccttaacgatgcctctctgttctacgagccggaaagctctaccgcgctgggcttcggcttccgctgcggcttcctcggcctgctgcacatggagatcattcaggagcgtctggagcgtgaatacgatctcgacctgatcaccaccgcgccgacggtagtctacgaagtagagaccacctccaaagaagttatctacgtcgacagcccgtccaagctgccgccgctgaataatattcaggagctgcgcgagccgatcgccgagtgtcacatgctgctgccgcaggagttcctcggcaacgtgattaccttgtgtgtcgagaagcgtggggtgcagaccaacatggtttaccacggtaaacaggtggcgctgacctatgaaattccgatggcggaagtggttctcgacttcttcgaccgcctgaagtccacctcccgcggctatgcgtcgctggactacaacttcaaacgcttccaggcgtcgaacatggtacgcgtcgatgtgctgatcaacggtgagcgcgtcgatgcgctggcgctgatcacccacaacgataacgcgccgtatcgcggccgcgagctggtggaaaagatgaaagatctgattccgcgtcagcagttcgatatcgcgattcaggcggccatcggtaaccacattatcgcgcgctctacggtgaaacagctgcgtaaaaacgtcctggcgaaatgctacggcggcgacgtcagccgtaagaaaaagctgctgcagaagcagaaagaaggtaagaagcgtatgaagcaggtcggtaacgttgagctgccgcaggaagcgttcctcgccattctgcacgttggtaaagacggcaaataaccctaaggagttggcatggcgaacatgtttgccctgatcctggtgattgcaaccctggtgacgggcgttttatggtgcctggacaagttcatttttgcaccgaaacgtcgtgaacgtcaggccgctgctcaggcagcgaccggcgagcaactggacaagaagacgctgaagaaagtcggcccgaaaccgggctggctggaaaccggcgcatcggttttcccggtgctggcgatcgttctggtggtacgttcatttatttatgagcctttccagatcccttcaggttcgatgatgccaacgctgctcatcggcgattttattctggtggagaaatttgcctacggcattaaagatcctatctatcagaaaacgctgatcgagaccggccatccgaagcgcggcgacatcgtggtgtttaaatatccggaagacccgcgtctggattacattaagcgcgcggtggggttaccgggtgataaggtcacctacgatccggttgccaaacaggtcactattcagccgggctgcagttccggacaggcctgcggcaacgcgctgccggtgacctattccaacgtggagccgagcgattttgttcagaccttctcccgcagcaacggcggcgaagcgagcagcggtttctggcagttgccgaagggcgaaaccaaagccgacggcattcgtcttaccgagcgtcaggagacattgggcgacgtgacgcaccgaattctgatggtgccgattgcccaggatcaggttgggatgtactaccatcagtccggtctgccgctggccacctggattgtgccgcccggtcagtacttcatgatgggcgacaaccgggataacagcgccgacagccggtactggggctttgtgccggaagccaacctggtcggaaaagcaaccgctatctggatgagttttgaaaagcaggaaggtgaatggccgaccggcgtgcggttatcgcgcattggtggaattcattaatttcctctgctgaattcacgtcgctgctgttatcgcagcggcgtgaattatttagtatttaaatccattcaaactaacgacatcccgtgtcgttgcgtatagaatatccccccgaagtttttggttgtcgctctgccgggtgacactgcacacgaaagcgtattggtctgtttcaaattactgtttgaagcgaatgctcaggtcggtttcgtgtgctgcatctttgacgcattcatttattggtaacgcatgaaccccatcgtaattaatcggcttcaacgaaagctgggctacacttttcatcatcaggagctgttgcaacaggcattaactcaccgcagtgccagcagcaaacataatgagcgcctggaatttttaggtgactccattttaagtttcgtgatcgcgaatgcgctgtatcatcgctttcctcgtgtagatgaaggcgatatgagccgtatgcgcgcgacgctggtgcgcggcaacacgctggcggagatcgcccgcgagtttgagctgggcgagtgtctgcgcctcgggccgggagagctgaaaagcggcggtttccgtcgcgaatcgattctcgcggataccgttgaagcgttaattggcggggttttcctcgacagtgatattcagaacgttgaacgcttaatcctctcctggtaccagacccgtctggacgaaatcagtccgggcgataagcaaaaggatccgaagacgcgtctgcaggagtatctgcagggacgtcatctgccgctgccgtcttacctggtggtccaggttcgcggcgaagcgcacgatcaggaatttactatccactgccaggtcagtggcctgagtgaaccggtggttggcacaggttccagccgtcgtaaggcggagcaggctgccgccgaacaggcgctgaaaaagctggagctggaatgagcgaagaaaaaaattattgtgggtttgtcgccatcgtgggtcgtccaaacgttggcaaatccacgctgttgaacaagctgcttgggcagaagatctcgatcacctcccgtaaagcgcagaccacccgtcaccgcatcgtcggtatccataccgaagggccgtatcaggcgatttacgttgatactccgggcctgcatatggaagagaagcgtgccattaaccgcttaatgaacaaagcggccagcagttcgattggcgacgtggaactggtcatcttcgtggtggaaggcacccgctggacgcaggacgacgagatggtgctcaacaagctgcgcgacgcgaaagcgccggtgatcctcgcggtcaacaaggtggataacgtgcaggaaaaagcggatctgttaccgcacctgcagttcctcgccagccagatgaatttcctcgatatcgtaccgatctcagcggaaaccggcaccaacgttgataccatcgcggcgatcgtgcgtaagcatctgccggaagcgatccatcacttcccggaagattatattaccgatcgctcacaacgctttatggcctccgaaatcatccgtgaaaaactgatgcgtttcctcggcgctgagctgccgtactccgtcaccgtggaaatcgaacgtttcgtcagcaacgagcgcggcggttacgatatcaacggcctgatcctcgtcgagcgcgaagggcagaaaaagatggtgattggcaacaaaggcgccaaaattaaaaccatcggtatcgaagcgcgtaaggacatgcaggagatgtttgaagcgccggtgcacctcgagctgtgggtgaaagtgaaatccggctgggccgatgacgagcgcgccctgcgcagtctcggttacgttgacgacctctgagttaacgcaacgtggatggatggcagcgcgcctttgtcctgcatagccgtccgtggagcgaaaccagcctgatgctggacgtcttcacggaagaatccggtcgcgtgcgcctggttgccaagggcgcacgctccaaacgctctaatctcaaaggcgctttacagccctttacccccttgttggttcgcttcggcgggcgcggcgaagtcaaaaccctgcgcagcgcggaagccgtttcgctggcgctgccgctcagcggcatcaccctctacagcggtctctacgttaacgagcttatctcccgcgtgctggagcacgaaacacgcttctccgaactctttttcgactacctgcactgcattcaggcgctcgccggggccagcggctcgccggagcccgcgctgcggcgttttgagctggcgctgctcgggcacctggggtatggcgtggattttctccactgcgccgggagcggcgagccggtagacgacaccatgacctaccgctatcgtgaagaaaaaggctttattgccagcctggtgattgataacaacacgtttaccgggcaccatttgaaagcattggcgagtcgcgagtttcctgatgttgatacgctgcgcgccgcgaagcgctttacccgtatcgccctgaagccctatctcggcggcaaaccgctcaagagccgggagttgtttcgccagtttatgcccgcgcgaaaggcgcgagccgataatacgaataatgattaacgaggattgtcatggctgaattattgttaggggtcaatattgaccatatcgcgaccttgcgtaacgctcgcggcaccgcttacccggatccggttcaggcggctttcattgccgaacaggccggcgccgacggcattaccgtgcatctgcgcgaagaccgtcgccatattaccgatcgcgatgtgcgtatcctgcgccagacgctgcacacccgcatgaatcttgaaatggcggtcaccgaagagatgctgacgatcgcctgcgaaaccaaaccgcacttctgctgcctggtgccggagaagcgtcaggaagtgaccaccgaaggcgggctggacgtcgccggccagcgcgacaagatgcgcgatgcctgtcaacgcctggcggatgccggcatcctggtctccctgtttatcgatgcggatgaagcgcagatcaaagcggcggcagacgttggcgcgccctatatcgaaatccacaccggctgctatgccgatgccaaaaccgacgccgagcaggccagggagctggaacgtattgccaaagcggccacctacgccgccagcctcgggctgaaggtgaatgccggccacggtctgacctaccacaacgtgaaagcgattgctgcgctgccggaaatgcatgagctgaatatcggtcacgcgattattggccgtgcggtgatgagcggcctgaaagaggcggtggcggaaatgaagcgtctgatgctggaagcgcgcggctaatggccattctcgggttgggtaccgacatcgtcgagatcgcccgcatcgaagcggtgatcgcccgcagcggcgatcgccttgcccgccgggtgctgagcgaccatgaatggagcatctgggagcagcaccagcagccggtgcgtttcctggcgaaacgctttgcggtcaaggaagcggcggcgaaagcgctgggaaccgggatccgtaacgggctggcgtttaaccagttcgaggtttacaacgacgagctgggcaagccgaagctgcggctatggggtgaagcaaaccttttagctgaacgcatgggagtaagcgctattcacgttactctcgctgatgaacgccactacgcctgcgccacggtgattgtcgaaagctagccaggagggcggttaaattttatccgcgtggtgcatcagcacgaatttatcccacagctgttcttcactctcgacgtgtgccggatctttcaggatcgtattcgggatcgggcacactttctggcaggttggcgtgtcgtaatgacccacgcactcggtgcagcggtcgctgttaatctcataaatgctctcacccatcgaaatggcctcattcgggcactccggctcgcacatatcgcagttgatgcattttttggtaattaacagcgccatcaggaaagtctcagaaacaacacaaacagggcgggcattatacgcccattttctgctcagaccagctttttcaccagcgcttcgctatggcgaatgcgctccggcgcccgctccagatcctgctgcaccagccccataaacagcagatcggtgagcatcatttgcgcgctggtggaggagatggccgcgctgcgcgtcgcctgctcttcggcgatagtatacaggcagtgggtcgcctgctgttgcagggcgttcgggctaaacccggtgatcgccaggatcttacagccgacgcgcagcgcttcaccggccgccatattgatctcccggcgctcgccggagtaagagatcgccagcagaagatcgtcgctggacatggcctgcaccgtcgccagcagggcatgcatatcctgctcagaaacagcgttgatgccgatcttcatcagcttccagctaaagttacgcgccaccaggccggaggcgccaatcccggtgacgatcactcgccgggcgttgcgcagcagcgtgacggcttcccgtagcgtctcttcagtgttgacgtccagcgaggcatgcatggcggcgacattgtctttaatgagtttctcgccgaccagacgcagcggatcgtcaccgcgaatgtggttatgcaccgggacggagtgcggatccgggctactcgccagcgcttcactaagggccagcttcagcgccggaaagcctttgaatcccagcttctgggcaaatttaaccacgctggactgactcacaccggcttccgccgccagctgctgcgagctgaggtgccgggtctcatcgggctggcttagaatataatcggccaactttttgtcgctcgccgccagggtgggatagcgctgacgaatacgcgttaaacagttcattggagctccgctggagccgtccggctcgtgactgacagaatttttattcgattataaggggtataccatgaattaaaaattcttaagccacaatttttccttcgcctgctactttaattctttcttaacggcaggggatgttttccctcgacatggcgtcaggctgttaagcttaccctaacgagaagcgagttctgagataaaggaggcagtttgcagcacactgaacggagagtggtgtttttcgatctggacggaaccttacaccaacaggatatgttcggcagttttctgcgctatctgctgcgccatttgccgctgaacctgttgctggtggtggcgatggggccggtgatccttgccgggctggcagtgagcggacgggcggcgcgctggccgatgagcctcctgctgtgggcgacaacctttggccgccgcgaggcggtgctgaagcggctggaagcggagtttgtcggctggtttcgccatcatgtgacggcgtttccggtagttcatgcgcggcttaccgcctacctgaccagcaccgatgccgacgtctggttgatcaccggctcgccgcagtcgctggtggagcaggtctatcgcgataccctctggttgccgcgggtgaatctgatagccagccgcaccgcgcgccgctggggcggctgggtattgaccctgcgctgcctggggcatgaaaaggtggtacagctggagaaaaagattggcgccccgctgcggctgtatagcggctatagcgatagtgagcaggataatccattgctcggcttttgccagcatcgctggcgggtaacccctcagggagagcttcagcagctggagtaatagtgtgtaattgatagcgcccatgtataatgcgccccgctttttctgctggagtggccgctgtgtctgacctcgaactcaatgatgaatactggatgcgtcatgccctgacgctggcgaaacgcgcctgggaagagggcgaggtgccggtgggcgcggtgctggtgcataacaatcaggtcattggcgagggctggaaccggccgataggccgtcacgaccccaccgcccatgcggagattatggccttacgccagggcggactggtgctgcaaaactaccgcctgatcgacgccacgctgtacgtgaccctcgagccctgcgtcatgtgcgcgggcgcgatggtgcacagccgtatcgcccgcctggtgtttggcgccagggatgccaagaccggcgccgccggctcgctgatggatgttctgcaccacccgggaatgaaccatcgggttgcgataagcgaaggcgtgctggcagagtcctgctctgccatgctgagcgacttctttcgctggcggcgggaagagaaaaaagcgctgaagaaagcccgggagcagaccggggaaagttaatacaggtggccggggagtttcatccgggcattatccatctgcttatcggcgcgaaacttgaaaaagggcagggtggtctcctgcggctgttcgagctcattggggagcacggccgggtaatcctccgccagggccagcgtttgctgctgctggcgctccttctctgacaaatagccgacaaggcttatctgatatttgcggatgttttccacataggcgtaggcctcatggccgcgggcatagccgtattttagtttgctgtaatagggtttctggctcagcaacggtaaacgcagcttaacgtccgcccagctgttaggattgcctttctgtttgcgggtgagcgccatggcgtccagcatatgggcgtaacccatattataagcggccagcgcaaaccagatgcgttcatctttcgggatcgaatccggcactttatccatcatatcctgcaggtagcgcatgccgccgtcgatactctgcgccgcatcggtgcggtcggttagacccaggctttgcgccgtattgcgtgtgagcatcatcataccgcgcacgccggtgggggaggtggcctgcggatcccagtgggattcctgccaggcgatggcggccagcaggcgccagtcaatctcgcgggcgtatttttcaaacagcggctgcacctccggaagaatattttccaccgcgcgcaggaaggtgcgggtatcgacataatcgaaatcgttgccgtggccgaggtacttctcctcgaggcgcgccagggtgccgtcttcattgatgttgttgaagaaatcaagcattgccgccgacagcgaattatcgtcgtcccgggcgctaaaccaggtgaccggctgttcgtcggtgatatcgagggccaccgccagctccggatggacgcgctgaaataggctgacggccaccgagtcggcgatggtgtaatcaagtttaccgtcaatcaccgcctgcatcagcgccgtggtaccgcgtttttcgtccacgcgccaggcaagatccgggtatttctcggcttttaaggtctgcaggtcgttgatcgccacgtggcccggagcgatagtgagctgctcggcggtcagcgccgcgagggtgcgcggccgggtattgccgacgcggtagaccagctgttgcgaaacagaatagtaggtggggccggcctgatagtttttcactcgctcctggttatagaccagtccggcggccagcatatcggcctgaccgtcgtcgaggtcgtcaaacagctgactgatgttttgccggacagttatcttaagcgttacgccaaggtagtcggcaaactgcttcgccagttcataatccagaccgaacgctttattgttcatggtggcgaaggtcattggcgagttgatggtgctgattcgcagctcgccgcgagcgataatgcccgccacgcggttctcgggtttaccagaccaggggatcgacggccacagggccgccgccagcaaaagggtgacaatgccgatcagcagataattaatctttaattttttcagagagttaatcttctgcagcttcaggttcctcagcaggcgatgtccggaaaaaacgcaaggttgtcgtcgaatgtgcggcattctgcttaataatgcgccagttggcaacttattcgcgatggtcgtcacatttattgataaacagcatcaatgattttatttctacgcaaacggtttcgtcggggcgcaggattcactataatgacgcccgtttccccccctggctcaccctgaaagcttcgaagacgagagacttatgatggaaattttgcgtggttcacctgcactgtcggcattccgtattaataaactgctggcacgatttcaggcggccaaccttccggtaagcgccatatatgccgaatatattcattttgccgatctgaatgccccgctgagcgctgacgatcgcgagcgcctggcgcgactgcttcagtatggcccgagcttaagcagccataccccgaccggtaaattactgctcgtgacccctcgccctggcaccatctctccctggtcttctaaagctaccgatatcgctcacaactgcggtctggcgcaggttgtgcgtctggagcgcggcgtggcgtattacgttgaagcctcaaccctgaccgaagcgcagtgggccgcggtggcggcggagctgcatgaccgcatgatggagagcgtcttcgacgagctggaagcgggcgagaagctgttcgctcaccatcagccgacgccggtcaccagcgtcgacctgctgggcgaagggcgtcaggcgctgattgacgccaacctccgtctgggtctggcgctggccgacgacgaaattgactacctgcaggacgcgtttacccgcctgggacgcaacccgaacgatatcgagctgtatatgttcgcccaggcgaactcagagcactgtcgccacaagattttcaacgccgactggatcatcgacggcgaacagcagccgaagtcgctgttcaaaatgatcaaaaacacctttgaaaaaacgccggactacgtgctgtcggcctataaagataatgccgcggtgatggaagggtctgaagtcgggcgctatttcgccgaccatcagaccggacgctacgacttccatcaggagccggcgcacattctgatgaaggtggaaacccataaccacccgacggccatctctccatggccaggcgcggcaaccggctccggcggcgaaatccgcgatgaaggcgccaccggccgcggcgcgaagccgaaagcgggcctggtgggcttctcggtttccaacctgcgtatcccgggcttcgaacagccgtgggaagaagatttcggtaaaccggatcgtattgtcaccgccctggacatcatgaccgaaggcccgctgggcggcgcggcgtttaacaacgaatttggtcgtccggcgctgaacggctacttccgcacctatgaagagaaagtcaccagccacaatggcgaagagctgcgtggctaccacaaaccgatcatgctggccggtggtatcggcaacatccgcggtgagcacgtgcagaagggcgagattaccgtcggcgcgaagctgatcgtgctgggcggcccggcgatgaacatcggcctcggcggcggcgcggcgtcttctatggcctccggccagtccgatgccgatctcgatttcgcctccgtacagcgtgacaacccggaaatggagcgccgctgtcaggaagtgatcgaccgctgctggcagttgggcgacgccaacccgatcctctttatccacgacgttggcgccggcggtctctccaacgctatgccggagctggtgagcgacggcggccgcggcggtaaattccagctgcgcgatattctcagcgatgagccagggatgagtccgctggagatctggtgtaacgaatcgcaggaacgttatgttctggcggtcgccccggagcagctgccgctgttcgacgaactgtgccgccgcgagcgcgcgccttatgccgttatcggcgaagccaccgctgagcagcatctgagcctgagcgacagccactttaacgatcagccgatcgacctgccgctggacgtcctgctcggcaaaacgccgaaaatgacccgcgacgtgcagactctgaaagctcagggtagtgcgctggatcgccaaccgattacccttgccgatgcggttaaccgcgttctgcatctgccgacggtggccgagaaaaccttcctcgtcaccatcggcgaccgcaccgtgaccggtatggtcgcccgcgaccagatggttggcccgtggcagatcccggtggccaactgcgcggtgaccaccgccagcctcgacagctactatggcgaagcgatggcgatgggcgagcgcgccccggtcgccctgctggacttcgcggcctctggccgtctggcggtcggcgaagcgctgaccaacatcgccgccacgcagattggcgagctgaaccgcgtgaagctgtcggctaactggatggccgccgccggccacccgggtgaagacgctggcctgtatgaggcggtgaaagcggtgggcgaagagctgtgcccggcgctgggcctgaccattccggtcggtaaagactcgatgtcgatgaaaacccgctggcaggaaggcagcgagcagcgcgagatgacctctccgctgtcgctggtcatctctgccttcgcccgtgtcgaagatgtccgtcataccgtcacgccgcagctttcgacggaagataacgccctgctgctgatcgacctcggtaaagggcacaacgcgctgggcgcgacggcgctggcgcaggtctatcgccagctcggcgacaagccggctgacgtgcgcgatgtcgcgcaactgaaaggcttctggaatgcgatgcaggccctggtggcgcagcgtaaactgctggcctaccacgaccgctccgacggcggtctgcttgtcacgctggcggaaatggcctttaccggccactgcggcgtggaagcggatatcgccgcgctgggcgacgaccatctggccgcgctgttcaacgaagagctgggggcggtgattcaggtccgcgccgcagaccgtgaggcggtggaagccattctggcggttaacggcctggcggactgcgtgcattacctcggtaaagcggttgagggcgatcgcttcgtgctgaccgccggcggtcagacggtgttcagcgaaagccgcaccacgctgcgcatgtggtgggcggaaaccacctggcagatgcagcgtctgcgcgacaacccggcctgcgccgatcaggagcatgaggcgaaagccaatgatgccgacccgggcctcaatgtgaagctctcgtttgatattaacgacgacgtcgccgccccgtacattgccaccggcgcgcggccgaaagtggccgtcctgcgcgagcagggggtgaactcccacgttgaaatggcggccgccttccatcgtgccggctttgacgccatcgacgtgcatatgagcgacctgctggccggccggaccggtctgggcgatttccatgccctggtagcctgcggcggcttctcctacggcgacgtgctgggcgcgggcgagggctgggcgaagtcgattctgttcaacgagcgcgtgcgcgatgagttcgcgaccttcttccatcgtccgcagacgctggcgctcggcgtgtgcaacggctgtcagatgatgtccaacctgcgcgagctgatcccgggcagcgacctgtggccgcgctttgtgcgcaaccagtctgaccgctttgaagcgcgctttagcctggtggaagtgacgcaaagcccatccctgctgctggaaggcatggttggctcacggatgccgattgcggtctcccacggcgaaggtcaggtggaagtgcgcgacagcgcgcatctggcccagctggagagcaaaggtctggtggcgctgcgcttcgtggataacttcggcaaagtgaccgaaacctatccggcgaacccgaacggttccccgaacggtatcaccgcggtgaccagcgaaagcgggcgcgcgaccatcatgatgccgcacccggaacgcgtcttccgcaccgtaagcaactcctggcacccggagaactggggcgaggatagcccgtggatgcgtatcttccgtaacgcgcgtaaacagctgggttaatcttcccgccgcgcttcacgcgaacgtatcagccccctgcctgacagggggctttttttatctgtgatggtcggcacgccagggtgtcgggaattgccgacaactgcgatattgtagtgtcgtcaataggcgacacttaagttattgatttaaatgatgagtaatcggtagcctatttggtgtcgctaaatagcgacaatgcgggtgaaaaataaacagtggtagtacgactgttcctgcggttaaagccatatatatcaatatgttaataaaatgttttgagagctggcatagttcatgcataatattaaccagtggctcattcaccttcttatgtcagccccttcgggacgcgctacataaacttcgaatgacgcacaaacaggtgcctgccgtccaactcctgataacagcctggctttatcagacatcgggcgaaacgtcgagtaaggcaccgcctcattcctgaacaaagccaggccttgcgcctggctttgttgtttctgcggcgcagcactcagcggtagcgcttttctccggcgcgctcctcagttagcatcgaccagagctaatgattgagacaacatccttgaagcgactctctcttttcccccgttcgctgcgtcagctggtgacgctctcctttgtgctgatcctgctgccattgctggtgctggcctggcaggcctggcagagcctgaacgccctcagcgcccaggcggcgcatattaaccgtaccaccctggtcgacgcccgacgcagcgaggcgatgatcaatgccgcactggagatggagcgcagctatcgccagtactgcgtgctggacgatccgacgctggcgcgcgtctatcaaaaccagcggcagcgctacagccagatgctggacgcccacgccggcgtgctgccggacgagaagctctggcaggcgctgcgtcaggatgtcagcgatctggcgcagctgcagtgtaaaaatagcggccccgatgcccaggcagccgccagactggaagttttcgccagtaataacagcgatatggtgcaggcgacccgggcggtcgtctattctcgtggccaacagctgcagcaggagatagccgaacgcggccagttttttggctggcaggcgctggtgctgtttctgctgagcctggcgctggtgctactcttcacccgcatgattatcggcccggtgaaaggcatcgaaagaatgatcaatcagctgggggcagggaagtcgctggacgacgccgcattgtttaccggcccgcgcgagctgcgatcggtgggcaagcgcatcatctggctcagcgagcgcctggcgtggctggagtcgcagcggcatcaatttcttcgccatctgtcgcatgagctgaaaaccccgttggccagtatgcgtgaaggtaccgagctgttggccgaccgggtcgcggggcccctgacccctgagcagcaggagattgtcgagatcctcgacagcagtagccgtaacctgcaaaagctgattgaacagctgctggactataaccgaaaacaggccgacggcccggtggctcgcgaagcggtggacctggtggacttggtggaaaacgtcgtggcggcgcacagcctgcccgcgcgggctaaactgatgcataccgaactgacgctgcaggcgcggcgttgcctggcagagcctgcgctattgataagcgtaatggataatctctactccaatgcggtgcactatggcgctgaatccggtaacatccgtatccatagctaccggcacggagagcaggtgcgtattgatgtcgccaacagcggcgaaccgatcccggccgcggaaaaaaacatgatattcgagcctttttaccaggggagtcaccagcgtaaaggggccgttaagggcagtggactggggttgagtatcgcccgcgactgcgtccggcagatgcaaggggagctcagcttagttgatgcgcccgccgggcaggtctgttttcgcattacgcttccctcagcgccggaataatccaacttatgaatcgatatcggggaactatgtcccaattcctggcctggcgccgttccctcagcggatggctgctttcaggcattgcttgtctgacgctggcggggtgttccgccggcttttcaccgcataccgcggaaggtaccgccgcccccgggcaggcgcagcatcaggtggccgattttgtcgcggtagactgcgcggatatctgggcgcacagcagcgatgccagcgacaaaaatcccctctactggctgcggggcattgactgtgccgatcgcctcgcgccggcgcaggcgcgggcggaggcgaaacgccataccgacgacagctggcaggacgcgttccgtcgcggcatcctgcttgctgatgctaaaattacccctgaggagcgccgcgacctggtggcgcgtctcgataccttcagcccgcaaatcgccgttcaggtccgcccgctgtatcagctctggcgcgacggccagacccgtcagctgcagctggtggaagagcgtgcccgttacgctaagcttcagcagtccagcgatagcgaactggagacactgcgtcagcaggagctggcgctgcgcgagcagctggagctgaccacccgcaagctggagaacctgacggatatcgaacgccagctctccagccgcaagccgggcggcaatttcggcagcgaaaaagtgccggaggtgatccatgacgatccgtaaaccggcgcgtttactgctggtggatgacgatccgggactgttgaagctactgggcatgcgcctggtcagcgaaggctacagcgtggtcaccgccgagagcgggccggaagcgctgcgcgtgctggggcgtgagaaagtggatctggtgattagcgatctgcggatggatgaaatggacggcctgcagctgtttagcgagatccagaagggccaccccggcatgccggtgatcattctcactgctcacggttcgattcccgacgccgtggcggctacccagcagggggtgttcagcttcctgaccaagccggtcgataaagatgccttatataaagccattgatgaggcgctggagcagcgctcgccggccaccgacgaagcctggcgccaggcgattgtaacccgcagcccgctgatgctgcgcctgcttgagcaggccggaatggtggcgcaatcggatgtcagcgtactgattaatggccagagcgggaccgggaaggagatcgtcgcccaggcgatccacaacgccagcccgcgtcatgataagccgttcgtggcgatcaactgcggcgcgctgccggaacagctgctcgaatccgaactgtttggccatgcgcggggcgcttttaccggcgcggtcagtaaccgtgaaggattattccaggccgctgagggtggtacgctgtttctcgacgagatcggtgatatgccggttgcgttgcaggtgaagctgctgcgcgtcctgcaggagcgcaaggtgcgcccgctgggcagcaaccgcgatatcgaaatcaacgtgcggattatctccgccacccaccgcgacctgccgaaggcgatggcccgcggcgagtttcgtgaagacctgttctaccgcctcaacgtagtgaacctgaaaataccgccgctctccgaacgcacggaagatattccgctgttggccaaccatctgctgcgtcagtccgccgatcgccataagccgttcgtgcgggcattttccagcgatgcaatgaagcggctgatggccgccaaatggccgggcaacgtgcgccagctggtgaacgtgatcgagcagtgcgtggccctgacttcgtcgccagtgatcggcgacgcgctggttgagcaagcgctggagggcgagaacacggcgctgccgaccttcgtggaggcgcgcaatcagtttgagctgaactacctgcgcaagctgctgcaaattaccaagggcaacgtcactcacgccgcgcggatggcagggcgcaaccgcaccgaattctataagctgctgtcgcgccatgagctcgacgccaacgactttaaagagtagctccgcactatagcgcaagttatgatacggtaagcaaccggttacgcgattaagacaggaaccccatgaaaaagattgatgcgattattaaacctttcaaactggatgacgtgcgtgaagcgctggccgaagtcggcatcaccgggatgacggtaacggaagtgaaaggctttggccgccagaaagggcacaccgaactgtaccgtggtgccgagtatatggtcgattttctgccgaaagtaaaaattgaaattgtggtgaccgacgatatcgtcgatacctgtgtggataccatcatccgtaccgcacagaccggtaaaatcggcgacggtaaaatctttgtcttcgacgtggcgcgggtcattcgtattcgtaccggcgaagaagacgacgcggcgatttaacgctcgccgctcgctgcagtattgccgggtggcgctgcgcttacccggcctacaaatccccgcgcgtcggggcttacagcaccttatgcgggccgaagcattcgtaatgaatgttgtctttgttgacccctaattcgaccagctgcttcgctgcaaactgcataaacgctaccgggccgcagagataatactgcatctgcgggtcgcgaatattgtccgccactgctgctaaatccatcaaaccttcgctatcaaaacgtccagcctgacggtcggcctcagtcggggtgcgataccagacgtgagaggtaaacgccggcagcgccgcgccgagcgccttcacttcatcggcaaaggcgtgaacgtcgccattttccgccgcatggaaccagttcacctgaccctgatgaccgctcttcgccagcgcatccagcatcgccagcatcggcgtttgcccgacgccgccagagagcagggtgaccggcgtctgtggcttaacgttaaggaagaaatctcccgccggggcggccagatagaccacatcgccttcgctggcatggttatgcagccagctggaaacctgaccgccttcctcgcgtttaaccgcaatgcggtagcctttgccgtccgctttgcgggtcagggaatactggcggatttcctgatattcgaagccttccggtttcagccagatggccaggtactggccaggctggtaatcggcgaccggctggccatcaaccggttcgagctcaaagctggtgataagctggctgcgcggggttttcttcacgatgcgaaacgcgcgggtcccttcccagccgccggttttactggcgttttgctgatagatctcggcttcacggccgataaagacgttcgccagcacgccgtaggctttaccccaggcatcgagcacttcctggcccggactgaacatttcatcgagggtcgccagcagatggctgccaacaatattgtactgctccggtttgatctggaagctggtgtgtttctgggcgatcttttccaccgccggcagcagggcaggcaggttatcgatattgctggcgtaggcggcaatagcgttgaataacgcttcacgctgatcgccgttgcgctggttgctcatgttgaagatctctttgagctccggattatgcgcgaacatacgatcgtagaaatgggcggttaatttcgggccggtctctaccagcaggggaatggtggctttcaccgtggcgatggtttgagcgtcaagcatagcgtgcttccttatgtgttatcttaatgatgcattttaaatgcatcttaaagaaataaccctgcgttgtaaatggttctttaacacattcccccgatccagttacaacatgaagagtttgcatcacaaacctgaaaagaaatccgttgatactgagagaggcgttattgctcaaagccttgtgtcatgcggagccaatcgtttgcgtaaaatcctttgtcaagacctgttatcacagaatgattcggttatactgtgggccgttgtccaatcggaccgcctttttaggccgaaattttattgttagctgagtcaggagatgcggatgttaaagcgtgaaatgaacattgccgattatgatgccgaactgtggcaggctatggagcaggaaaaagtacgtcaggaagagcacatcgaactgatcgcctccgaaaactacaccagtccgcgcgttatgcaggcgcagggctctcagctgaccaacaaatatgctgaagggtatccgggcaagcgttactacggcggctgtgaatacgtcgacgtggttgaacagctggcaatcgaccgcgcgaaagaactgttcggcgctgactatgctaacgtccagccgcactccggctcccaggctaactttgccgtctacaccgcgctgctgcagccgggcgacaccgtgctcggtatgaacctggcgcagggcggccacctgactcacggctccccggttaacttctccggcaaactgtacaacatcatcccttacggtattgatgagtccggtaaaattgactatgacgacatggcgaagcaggctcaggaacacaaaccgaagatgatcatcggtggtttctccgcttactccggtatcgttgactgggcgaaaatgcgtgaaatcgctgacagcatcggcgcttacctgttcgtcgatatggcgcacgtggcaggcctgattgccgctggcgtgtacccgaacccggttccgcatgctcacgttgtgaccaccaccacccacaaaaccctggcgggtccgcgcggcggcctgattctggcgaaaggcggtagcgaagagctgtacaaaaaactgaactctgccgtgttcccaagcgcgcagggcggcccgctgatgcacgttatcgcggcgaaagcggtggcgctgaaagaagcgatggagccagagtttaaagtttaccagcagcaggttgcgaaaaacgctaaagcgatggtggaagtgttcctgaaccgcggctacaaagtggtgtctggcggtactgagaaccacctgttcctgctggatctggtggataaaaacctgaccggtaaagaagctgacgccgctctgggccgcgccaacatcaccgtcaacaaaaacagcgtgccgaacgatccgaagagcccgttcgtgacctccggtatccgtatcggttctccggctgtgactcgccgcggctttaaagaagcggaagtcaaagagctggctggctggatgtgtgacgtgctggacaatatcaatgacgacgcggtcattgagcgcgtgaaaggtaaagtgctggatatctgcgcccgcttcccggtatatgcgtaagcgttagcgttgacatcaaaaaggccgcgtatgcggccttttttgcgtctggagattagcggcggtcgagggagatcgccccggggccggttattgccagcagcaggaaagcgccggcgatgctgacgtttttccagaagttaatcatgttcggcaataccgcatcgccagtcatatcccagtagtgatggccaatcaccgccgtgcccagggtgtagaaaataaagatgaccgccagcgggcgggtgaaaaagccgagcacaatcagaatcgcggcaggcacttccataatgacggcgataatcgccgccagggtcggcatcggcgcgccggaggcggccatgtactgcaccgtaccgtcaaagcccagcagtttggggtagccaaaaagaataaacagaatcaccacggcgatgcgggcgataagcagcaacagagagcgggaagcgccaaaatcaaaatagcggagtgagttcataatcagctcgttatgagagacatgtgatttaaacgtaatacacaaatttgcgctccgccacgttcgtttatgactaaaccagcgtctgcaattgctcctcaacgtacagataacctatccccatcagctgctgggcgcgcgtcagctggccaaagcctatttgggtggcgtgcgctcgcggcgtatccctgtggtcaaaggggttaaaacccgtttgtttgacgatactttccagccactgctcaccgaaggcgcagctgcgcccgtaaagccagatttgattaatatttaatatattcaggaaattatagaggcttaagccaatcgcgttggcagcgttatcaacccatgcgcgaatttgcacatctccctctttccaggcctcaatgagcgacgccgtggttaactgctcgggggcgagcgttgcttcaggctgcgttttgagccacattcgggcctgttttttcagcgcgctgagagaggcgacggtttcgaggcaaccgtatcttccgcagtcgcaggctttgccgtcaggattgacaatcgtatgcccaatctgcccgctgccgtacagactgccgcgataaatatgatcgttaatcacaaatgacgagccgataccgtagtcgacgttgatcacgcaaaaatcctgctgtgtaccctgatgctgccacttctccgccagcgccagcatcacgcagtcgttatctacccgaacctgcacgccaagccgctcctcaagcagatactttatttcgatcggtgttttccagcgtgcctggggcatggtttgtgaaacgccggtaatcggatcaacctgtccatgcacgccaagggcgagattgatgctgtgctgcgggtagcggcggtggatatgccgccagcattcaacgatggcctcaagcagggcctgaggagtgggcgcgttgaccggcaaatgctgatggccatccactgccagcaggcgggcgtcggcaagctgatattcaatgctggtcggggtgatattcatgcacagtgtccaggcgccgtgctcggggatctggtagctgccgctgttcacgccccgtttgctcaagtgttccgttgagtgaccgatcaatccctcgctaagcagctcggccagaatattgctcaccgccggaatggagagaccggtgagttgagagagctgtgatttactgagctgcttttcccgccacagatgggaaagaaaaatcgacttattggcctgccggacccgggcgttattaaagccagtacgctgcatacacttaactcccttaactatattgcgtgagcattgcgcattttaacagcgaattggcgatatagactcctgttattgcaacttttacttcgttttgtttagtggaggcatcatgtacggttcggttaaggtctggcaggaaatcatttcattaccaacgtggacaacgggcgcggaagatccgaaccctatgtttctggaaaaacgtgtttatcaaggatcttccggcagcgtctatccctacggcgtaattgataccctgaccggcgaacgcgaaatgcgcgattatcaggcagtgtggatggagaatgatttccttcgggtcatgctgctaccggagcttggcggccgtattcaccgggcatatgacaaagtcaaacaacgtgatttcgtctattacaatgaggtggttaagccagccctggtagggctgctcgggccctggatctccggcggaatcgaatttaactggccgcaacatcaccggccgacgacctttaaaccggtcgatttttctattcagcagggagaaaacggcgcgcagaccgtatggatgggggaagcggagcccatgcgcggtttgcaggttatggccgggtttacgctctatcctgaccgcgcgctgattgaaatcactggcaagatcttcaatggtaacgccacgccgcgccatttcctgtggtgggccaaccctgcagtaaaaggcggcgatgcccaccagagtgtattcccacccgatgtcaccgctgtattcgaccatggtaagcgtgatgtttccgctttcccgattgccaccggtacctactacaaagtggactattctgcgggggttgatatctcccgttataaaaacgtcccggtacccacttcgtatatggcggagaagtcggattacgattttgtcggcgcttatcatcatgacgagcgaggcgggttactgcatgttgccgatcaccatgtctctcctggcaagaaacagtggagctgggggtacggggattttggccaggcctgggatcgaaatctgactgatgaaaatggcccttatattgagctgatgaccggcgtcttcaccgataaccagcctgactttacgtggcttgcgccttatgaagagaaggtgtttgtgcaaaatttccttccctacagcgagttagggatggtgcaaaatgccaatacacagctggcactgaagctggttcgcgagtctgggcaactgcagcttggcgtatatgccattgctccgctaaatcatatcgtggttgaactcagcgctgaccatcagccattgtacgaaactcagctgacgctgaagcccggtgagagctggcagcagacgctgccggaaaatggcgtcgggcgcttaaccctcaaagtgaaaaccgccgagaaccagccgctgctggattatcaggaacatattacccaacagacgccgctgcccgaaccagctatagcgcccgcgttaccggaagcgatccacaatggcgacgagctctattttatcggccagcaccttgaacaatacaaccacgcaagccgctacgccggggattactatcgtcgggcggttgagctcgatccgcaggattatcgcaataatgttgccctcggtaccctggcgttcaacagtgccgactgggcgctggcggaacagtgtgcccgtgctgcgctacagcgcgcgcatcgtttgaataagaacccgcgagatggcgaagccagtatgctgcttgccagcgtgctggaaaggatgggggatgatgcaggcgcctgggatcactattacaaagcctcctggagcggtaactgccgtgacgccgcctggtggtcgctggcgcggctggcgatgaagcgcggtgatgttgccgatgcgctggaaaaagtaaacaccagtctgcggttcaacgccagcaatcctctggcgatggggttgaaagcgctggcattagccaacagtgggcagaagaaagcagcgctagagtttattttcgcctctcttgagcaatacccattgagctatccgctgcactgcgcgcgctggatgattgagcggagcgacgacgcgcgagaaaccctgctgcgcatcacggggcgcagaggggtcaacgccagcctgctggcgggttggctgctctctatcggacagacgtcggcggtgaaagaggttcttgcggttctggacagtcaggaagcgctgccgatgctctggcgtgcgtcgctaagggatgatgccaatgaacgccaacagtttattgccgccgccgagcactgccatgcgcacaatgttcgtttccctaactcgctcgatgaagttcagatgctgcagtcgctgggcgacagcgcttttgcccgctatctactcggttgcttctggtacagcaaacgtcgctatgacgaggcggtgagctgctggcgcgagacgctcgaaaaatctcccgattatgcgcccgctcatcgtctgctgggcgtttactcctggaataaacagcaggatgcaacgcaggcgctggcttatctgcagcgcgccgtagcgctggagccggacaatgcgcgcttcctgtttgaactcgattttttgcaaaaattactggccaggccggtacatgagcgactgacgacgctggtggaacgtaaagccgtggtgctgaagcgggacgacctgaccgctgaactgctaagcctatggaacgcgtccggtcattatgccgatgccgccgcgattctggatacgcgcgtattccatccctgggaaggaggagaagggaaaatcaccggccagtatttgctcaatcagctccatcgggcattacagttcatcgagcgtggggcgtttaaacaggccacggactgtctgaaagccgcattacgctatcccgacaatctgggggaggggcgactgcctgggcaaacggacaacgatatctggtatttgctgggctactgcgcagaacaggctggggatgcgcagcaggcggcggaatattaccagcttgcccggcaagggggctcaacgctggacgccgggcggtactacaacgatcaacccgccgattaccttttctggcagggcattgcgctgcgtaagagcggtaacccagcgcaggccgagcagcacttccgccattttatcgactgggccgcgcagcatcgggatgacgttccgcaagtcgatttttttgccgtctctcttccggacctggtggttctcgatgtatcagcgcagcagagacatctgcagcactgcttgtttattgaagcgctgggccatctggggctgggcaacgtatccgcctgccagcagaggatgcagcagcttctgcaaataaatccggctcatgataaggcgcatctgattcgccatgccctgcaaagcggcattttttcctgaacctcaatgggcgggctcggcccgcctgaaccctactgttccctgcgtttcccttatagaggaatcattatgaacaacgcgcagacacatctgaaaatgggctacgtctggacgatttgtctggtcgccgcctgcggtggtttactgtttggctatgactgggtggtgattggcggcgctaagccattttatgaagcctggttttcaattacggacccggcgcagtccggctgggcgatgagctcagcgctgttgggctgtattttcggcgcattaatttcgggatggtgcgcagacaaactggggcgcaagctgccattaattctttccgccgtgctgttcagcgcgtcggcctgggggacggcggtcgccagtcatttcgatatgtttgtggtttaccgcattgtgggcggcgtagggattggtctggcgtccgctctcagcccgctttacattgccgaagtcagtccggcagagaaaagagggcgttttgtcgcggtcaatcagctcaccatcgtgattggcgtgctggccgctcagttaatcaatctgatgattgctgaaccggtggagccgggggcgacgcagcagatgattgtggacagctggaatgggcagatgggctggcgctggatgttcggtgcggaactggtgccggcgctggcgtttctggtcctgatgttttttgtccccgagtcgccgcgctggctcatgaaggccggtaaaccggagcgcgcccgggctgcgctggaacgcattggttctgccgactatgccgacaggatcctgcgtgaaatcgcgcataccctggaaaaggataacaataaagtctcctacggcgcgctgttggctccccaggtgaaaccgattgtgatcattggcatggtgctcgccatattccagcagtggtgtgggattaacgtcatctttaactacgcgcaggagatttttgcctcggcggggttcgatattaacagcacgctgaaatcgatcgtcgcgacgggcgtcgttaatctggtctttaccattgcggcgctgccgctggtggataaaatcggtcgccgtaaattaatgctgcttggcgcttcgggattgacgctgatctatgtgctgatcgccggcgcttacgccatgggcattatggggtggccggtactgttgctggtgctggcggcgattgctatttatgcgttgaccctggcgccggtgacctgggtgctgctggcggagatttttcccaaccgcgtacgtggactcgcgatgtctttaggtaccctggcgctgtggatcgcctgtttcctgttaacctatactttcccgctgcttaatgccggtctgggcgcggcaggaagcttcctgctgtatggtgtcatttgcgctgccggctacctctatatcctgcgcaacgtcccggaaacgaaaggtatcaccctcgaagcgctggaagagcagctggcgcagcgtcatacgggcgtgaatgcggcgaagcaggagcagatgcgctaatggcggaagagtggattctggagaacgcgcatctgcggaggtgcgtctcttctctgggcggcaaagtgcaaagtttattctcgcggcaatatcaagcgccggtgctatatgaaaatcccgccggcggcatgtttccgatgctgccattggccaatcgcgtcgccggcaaccgttttatttttcatgggcaggagattgtcctgccttgccaccatgccgacgagtatttctttcttcacggtgacggctggttacagcgctgggatattattgagtacggcgccgagtattgtgtattacagctgcgtcggcagcatgcctgcggtttcgattatctggcgcagctccgctaccagttgctgcgtaaccagcttatagcggagctaacgcttacccactatggggaggtccctgcgctttacggctgcggctttcatccctttttccctttcgatgaacgcagcaaggttcagttccaggtcagcggttactggccggaaggggagaatcacttacctctcaactggcaaggaaacttgcccgactatgccaatttcagcgtggctcagttcggtgaagatcgttggctgaacgtgggttattccggctggggcgggcgggcgagggtaagcaatgacgtgatgaatatcacaattctatcgcaaactccgtggttgatgctgttcagaatgcaaggtgaatcattcctttgcctcgagccgcaaagccatccggtaaacgcccacaacatggacgggcagccggggctgcgagttttaggcgcgggagataagctgaatttttcgctgaaaatcatcatcgagggggcataaataacgagctatcagcagacaagagcatcttgcgcccgccggggtttatcgccagactatcgccaccattcgggaggaaatcatggtcttgcactccacgcgctggctggcgctcagttatttcacctacttttttagctacggtatttttctgcccttctggagcgtctggctggccggaaacgggctgactccggaaaccatcggcattttgcttggcgccggtctggtggcccgttttctcggcagtctgctgattgccccgcgggtgagcgatccctcccggctgatcgccgcgctgcgcgtgctggcgctgttaaccttgctcttcgcgctggccttctgggccggcagccacgtagcatggctgctggcgatcatcatcggcttcaacctgttcttttcgccgctggtgccgctgacggatgctctggccaacacctggcaaaagcagatcaccatggactatggccgggtgcggctatggggctctattgcctttgtaattggttcggcgctgaccggcaagctggtgagcctgttcgattaccgggcgatcctgctgatgctaagcctgggggtcgcctcgatgctgctcggcatgctgcttaagccgtcggtgatgccccagggggagtcgcgccagcagcagggggccggaatggcggcctggctgacgctggtgcgccaaagctggcgctttctcgcctgcgtttgtctgctgcagggagcgcatgccgcctactatggctttagcgccatctactggcagcaggccggctattccgcctcggcggtcggttatctgtggtcgttaggcgtggtggcggaagtggtgatcttcgcgttgagtaaaaaggtgttccgccgcttcagcgcccgcgacctgctgttgctctccgccgcctgcgggctgattcgctggggactgatgggctggaccacggcgctgccgggactcatccttgcgcagatccttcactgtggcaccttcacggtgtgtcatctggcggcgatgcggtatatcgccgcccgtcagggtagcgaagtgatccgtctgcaggccgtctactccgcggtggcgatgggcggcagtattgccatcatgaccgtcttcgccggtttcctctatcagaacctgcaccagggcgtattttgggtgatggccctgctgacgctcccggcgatggctatacggccaaaagcggtggcggcctagtcctcgagcatggcgcagatatgctgctgctggcgttcagtgaagtagttctccgcgtggatcagcggcggcgaaaacagcggcagcgccgtcgcatagggggtgacgataagcgtcacccctttgggcgcaccttccttctgaaagcgctctacgctctggtatttgatattcagcggcagcagcgttagttcgcgcagctgttgttccagggcctcttcaatagctgggttgtcatcggttagcaacagcacctgtttctcgtgcaggtcgcttttctgcatcagccaggcgccaaagatcaccgcgattaaaccggtctcttcctcattaaaacggatgtgccaggcctcctcgaattcgctcaatgccgcctgggtggtacgcagtaagcgagggtagagccgggtcacttcctctgtgagcgtgctgtcgatgccgatagcaaacacgctgcggatcaacgcctgcgacaaatggatatagagttgatcgctgagcccctgctcatcactgaacgctctgccagcgaggatctgaaagcggtggatcaggccggagatagccagccgcaggcggcgatcgtgcgggtgaccgtcgcggaccgggtcgggggttttgagcaacataaacagcagcgagaggaaaaaaggttctccgacatggggcggagcgccgacccgacgctgccagtggcggacaatctcctgcgccagggtgaactcggcggcggtttgagcccagcgttgctgttcctcattgaagtccggagagtatccccggtgatgttcgagcagacagtactgcaggtacaagcgcagaaactgcacgtcgcggcagtcaaactggcgattgagcgcccgcgcgcagcggttcaccagcgcctgcagattggtatcatcgtataaggtgcgggcaatgccttcctgtttaagctgcgttttcagcgccggggtaaaatgatgattaacgaacggtgggcaggggcgcagcccccgccgcagcgcatgcagcagacataaacgttggtcgagcgcggcgccttcaatccgatagctgccgtccacctgtgactggagggtcaaacggtggtaacgctgaatttcgcgtccggtctcctcaatatcctgccgggccgtggtctcatcaacgaggttgatcctgccaagccgttcagtcgtcaccgactgtccgggcagataaaacatcaggagcacctggctacggcgctgtggactggaaagcgcagatggtggttcaatgacggtcatcatctggtaagttccagttagggtttccgctaaggatagacaatgaccgcggcgtgggcagggaagagcgtccgcttttactcaggattgctggcgaagttcacagaatttttcacgtgaggaacagatgaacagagtgaaacaatgcacaagcgcggcgtttttcatggttttatcatggtcggccgctgcgcatccgcatagcttcatcagcctgcaaagcgagccggtggtcaaggacggtctgctgagcgcctttaaaatgcgctggacgatggatgaaattacctcatcggatctgctctatgatgccggaaacgccaaaccgggcagcgaagtctggaaaaagctggcggcggaggtgatggccaacgtgctcggtcagcactatttcagcgagctgtggcataacggtcagcgggttaaatttgacaatcgtcccgacggttacggcctcgaacgtgacggactgcaggcggtactcacctttactctgccgctggcgacgccgcaacccattgccgggcagacgtttaccttttccaccttcgacccgacctactacgtcgatatgttttatgacaaggatagcgatttttccctgcccgcagggctgcgggccgcctgtaaggcaacggtgatgacgccaaaaccgaacgacaaaatgctctcatacgcccagtcgctggataaagcggatgcgccgccggaggatatggcgctgggcagctattttgcccagaaggtgaccctgacatgtcagtaatttttactccgcgtgcgcgatcttcgcgctggaaagcgctgtggccgctggcgctgttgctggctgtgagcatcatcggcggcatttggctgtggcgggcgtggccgcaggtgctgatgcagagcgcagtctggcagcgttcgctcaatctggaactcagccgcctgctgcaggcggtggcggagaacccggcggcggcagggctgtcgctgctggggtttagcttcgtttacggggtgctccatgccttagggcccggacacggtaaaattgtcattacgacctggcttgccacccatcccgcgaagctgaaatcaagcattggcctgacgctggccgcctctttattacaggggctggtggccatcgcgctggtggtcgtggtgctggcgctgctgcagctgccggcgcgccagctgcacctcagcagtttctggctggagaaggggagctatttgctggtgggtgcgttagggctgctgctgtgctggcgggcgttaaaaaagctgcgtctgctgctgcgccggccaacgtttaccgcttttaccccgcatcatgttcataacgaacactgcggctgcgggcatcagcatctcccggccccggagcagctgcaggccggcgacgactggcgggctcgcgccgcgattgtcctgtcgatgggcatgcgtccctgctcgggggcgatcatggttctgctgttcagcaaggtaatcggcgtttttggctgggggatggcggcggcgctggcgatggcggcgggaacctcgttgactatcacggcgctggcgctgttggtgcatgggttccgccaactggcgatccgcctcagtcgccatcaggcgccagcgttatggaagcaggttagttgggcgacgctggcgctggccggcggcgtcatattgctggcggcggcaggggtgatgtggctcagcgccgtccctgccggcggtgggatccgtccgttttagacagacgccgggcgcaaatcctaaagtgggcgccagcgcttgccgctggcgaagcgatgctctagttttccgcttttcggcggatgacaaggagtcgctatggccgcaaatatcgtttctcccgcgcagagcgggcggttctattatggctgcgccggcgccgccgggctgctggcgggcctggcgatcgtattctggtttccatccctggccagctggtggccgtcagatctggtgcgtgtctaccacgccatgccgtatgttatgcgattcggggtggcgagtgtcgcggatattccgctggtggcctacgccaccctaacgctgtcgggcttcgtgctggccttttgtcatcccggtcacagtaaactgcccattgttgcctgggctgtgcataaccagccctcgccgcgggagatggtcgactggatcctgcgcagctgggtgttgcagttcggttttctggtgatcattttctggcgtttcgcgtttatgggtaagctaagcagcgacaggctaatgcagatcgtgggcatctttaacgacgtatgctatctggccacgctggtgctggctggaatactgctgcgcgacggctggcgcgactttcagggcgttgccgcaccggcaggcaatattcgcattccgctgatctttgccctgagcttttatctgccgtttcagctggtatggattttactcagtgcgcagcagtatgagctgccgctgtggggatggctgctgctggttccggcgatggtcggcgtgctgctcgccaggctgacggtggtagggatagcgctgtgtttccggcgctggctggggccgcagggctgtctgcgctggcgcggaccgctggccttgtttagcggcctgacggtactgtgcatcggcggcaatgcggtgattcgccagatcctcaacatgataaaatgacataaaaaaaggaagccgcggcttcctttttgacatcagtaagagattaacgcttcagcgcgtcgctcagctgctcgcgcatgttcgccagcatcgctttcaccacgcgcgggttaccggcaacgatgttgcccgtcagcatatagttatgaccgccggtgaagtcgcagacaatcgcgccagcttcacgggcgatcagctcgcctgcggcgaaatcccatggtttcagggcgatctcaaagtaaccgtcaacgcggccggcggccacataggccagatccagcgcggcagagccggtgcgacggaagtcggcacattcggtaaacatgttgccgagaatattcatgtaggtggtggcgtgctgcttcgctttgaacgggaagccggtcgcgataatggtgccgtcgaggtcgcgagcgttgctgccgcgcagacggtagccgttcagctgcgcgccctggccgcgggtcgcggtaaacagttcgttacgcatcggatcgtagaccaccgcgacttcagtacgccctttgatgcgtacggcgatggaaacagagaagtgcggcagacgtttaacgaagttggtggtgccatccagtggatcgataacccattgaacatcctgctcttcgccagcgtgttcaccgctttcttcggtgataatggtgtgctgcgggtaagatttgcgaatggtttcgataataatcgcttcggcggctttatcgacgttggtcacaaaatcattgctgcctttctggctggtttctacggtgtctggcgtttcgtagtgtttggcaattaaattacccgccttgcgcgcggcgcgcacggcgatgttcagcatcggatgcatcggtctctctcactggatgttaaagaacgggaaaaaacggcgcatataatagcagccaaatctgcttatgtctccgttttatggtagcatgcacgaataatctttagccgaagaaccataatgctgcaaaatattcgaatcgtactggtagaaacttcccataccggcaacatgggctccgtagcccgcgcgatgaaaaccatgggcttaactaacctgtggctggtcaatccgctggtcaaacccgattcgcaggcgatagccctggccgcgggcgccagcgacgtgatcggcaacgcgcagattgtcgatacccttgatgaagcgctggcaggctgtagcctggtggttggcaccagcgcgcgctcccgcacgctgccgtggccgatgctcgacccgcgcgaatgcggtctgaaaagcgtcgccgaaggtcagcatgcgccggtggcgctggtctttggccgcgagcgcgttggtctgaccaacgatgaactgcagaagtgccactatcacgtggcgatcgccgccaacccggagtacagctcgctgaacctggcgatggcggtgcaggttatcgcctatgaagtgcggatggcctggctggcggcgcaggagcaagcgcagccggcggttgagcatgaagaggcgccgtacccgctggtggacgatctggagcgattctacgaccatcttgagcagacgctgctggcgaccggctttatccgcccgaatcatccggggcaggtgatgaacaagctgcgtcgtctgttcacccgcgcgcgtccggaaagccaggagttgaacatcctgcgcggcatgctggcgtctattgagcagcagaataaaggtaagtaaccgcgttaacgccggatggcgcttcgcttatccgggcaacgaatcgggctcgcctggcgggatgaaggtatcaggctatgcggaagtaaaacggcacggaaagccaaatacctgactaaaacagtcaagtaaatagttgaccaaattactcgggaatgtcagacttggccctgctatgcaatacccatattaataaaaagcccggccaggggcgagtttgaggttaagtaagacatgagactgacatctaaagggcgttatgccgtgaccgcgatgcttgacgttgcgctcaactctgaaacgggcccggtgccgttggcagatatttcagagcgtcagggaatttcgctttcctatctggaacagctgttctctcgcctgcgtaaaaatggcctggtttccagcgttcgtggcccaggtggtggttatctgttaggtaaagacgccggcagtatcgccgtcggcgaagtcattagcgccgtggacgaatccattgacgccacccgttgccagggcaagggcggctgtcagggcggcgataaatgcctgactcacgcgctgtggcgcgacctgagcgagcgcctgaccggcttcctgaacaatatcaccctcggggaactggtgaataaccaggagatcctcgatgtttccggtcgtcagcatcagcacgaaacccagcgcaatgcgcgcacccaggacgcgattgacgttaaactgcgcgcctgagtgacccgtcccgtttcgggctgcggctgacagggcaaggcggcgcgaaacggcgggacaacgattataaagagctttcagaatcaggccgggatgctccgacattccgtgtactcggtcgtacatcaagccggttgcctgattccttgcattgagtgatgtacggagtttaagagcaatgaaattaccgatttacctcgattactccgcaaccacgccggtggacccgcgtgttgccgagaaaatgatgcagttcctgaccatggacgggacctttggtaacccggcctcccgttcccaccgttttggctggcaggctgaagaggcggttgatatcgcccgcaatcagattgccgagctggtcggcgccgacccgcgcgaaatcgtctttacctctggtgcgactgaatccgacaacctggcgatcaagggtgcagccaacttttatcagaaaaaaggcaagcacatcatcaccagcaaaaccgagcataaagcggttctggatacctgccgtcagctggagcgcgaaggcttcgaagtgacctacctggcgccgcagagcaacgggattatcgatctgaaagagctggaagcagcgatgcgtgacgacaccatcctggtttccatcatgcatgtgaataacgaaatcggcgtggtgcaggatatcgctaccatcggcgagatgtgtcgcgcccgcggtatcatttaccacgtagacgccacccagagcgtgggcaagctgcctatcgatctgagccagctgaaagttgacctgatgtccttctccggtcacaaaatctacggtccgaaaggcatcggcgcgctgtacgtgcgccgtaagccgcgtattcgtatcgaagcgcaaatccacggcggcggccacgagcgcggtatgcgttccggtactctgcctgttcaccagatcgtcggcatgggtgaagcttaccgtatcgccaaagaagagatggaaagcgagatggcgcgtctgcgcacgctgcgcaaccgtctgtggaacggcgtgaaggatatggaagaagtgtacctcaacggcgacctcgagcagggcgcgccgaacattcttaacgtcagcttcaactatgttgaaggcgagtcgctgattatggcgctgaaagacctggcggtttcctccggttcagcctgtacttccgcgagccttgagccatcctacgtgctgcgcgcgttaggcatgactgatgaactggcgcacagttctattcgtttctctttaggtcgtttcactaccgaagaagagattgactatgccatcgatctgattcgcaaatccattggccgtctgcgcgagctttctccgctgtgggaaatgttcaaacagggcgtggatctgaacagcattgaatggtcacatcactaattcggcaccaataaggagaattcatcatggcttacagcgaaaaagttatcgatcattacgagaatccgcgcaacgtcggctcttttgacaacagcgacgagaacgtcggcagcggcatggtcggcgcgccggcctgcggcgacgtgatgaagctgcagattaaagtcaacaatgaaggtatcattgaagacgcgcgcttcaagacctacggctgcggttccgctatcgcttccagctccctggttaccgagtgggtgaagggcaaatcgctggacgaagcgcaggcgatcaagaacaccgatatcgccgatgaactggaactgccgccggtgaaaatccactgctcgatcctggcggaagatgcgattaaagccgcgattgcggattacaaaagcaaacgtgaagcaaaataattagttgaggttttgttatgtcgattactcttagcgacagtgcagcagcgcgagtcaatgccttcctggcgaaccgcggtaaagggtttggcctgcgcctgggcgtaagaacctccggctgctcgggtatggcctatgtactggagtttgttgacgagccggcggctgaagacaccgtgtttgaagacaaaggcgtgaaggtcgtgatcgacggcaaaagtctgcaattcctcgacggcactcagctggacttcgtcaaagaaggcctcaacgaagggttcaaattcactaaccctaacgtcaaagatgagtgcggctgcggcgaaagctttaacgtataatcggtactcctcaaccccaccgcggtcacgccgtgcgtggggttttaatttagatgcatgaccctgaggttactatggactatttcaccctcttcgggttaccagccagctataccctctcgcttgaacaactggctgtccggtatcaggatctgcagcgccagtaccatccggataaatttgccagcgcgcctgcggcggaacagcttgcggcggttcagcattccgccactataaaccaggcctggcagacgctgcgccatccgctgactcgcgcagaatatctcctttcgctgcatggcttcgatctggccagcgagcagcataccgttcgcgataccgcgttcctgatggaacagctggaattgcgcgaagagctggatgagatcggccaggcgaaagacgacgcgcggctggaaggttttatcaaacgggtgaaagcgctgtttgatacccgtcagcagctgatggttgaccaattgcataatgagagctgggaggcggcggcggacacggttcgtaagctccgtttcctcgataaactgcgcagcagtgctgaagaactcgaagaaaaactgctcgatttttaattttcggaagcaattatggccttattacaaattagtgagcccggcctgagcgccgcgccgcaccagcgtcgtctggcggccggtatcgacctgggcaccaccaattctctggtggctaccgtgcgtagcggccaggccgagactctgcccgatcatcaaggccgctatctgctgccgtcggtggtgaactaccacgcttcggggctgaccgtcggctatgacgcccggcttaacgccgctcaggatcctgccaataccatcagctccgtgaagcggatgatggggcgctctctcgccgatattcaaaaccgttacccgcatctgccgtatcagctgcaggccagtgaaaacggcctgccgatgatccagacggccggcggcctgctgaacccgattcgcgtctccgccgatatcctcaaagcgctggccgcccgggcgaccgaagcgctggccggcgaactcgacggcgtggtcattaccgttcccgcttacttcgatgacgctcagcgccagggaaccaaagacgcggcgcgtctggcgggcctgcacgtgctgcgcctgctcaatgagccgaccgcggcggctattgcctacggcctcgactccggccaggaaggggtgattgcggtctacgatctcggcggcggcacctttgatatctccattctgcgtttaagccgcggggtgtttgaagtgctggccaccggcggcgactcggctctcggcggcgatgatttcgatcacctgctggctgactacctgcgcgagcaggcgggcttcagcgaccgcagcgataaccgtctgcagcgtgagctgctggatgccgccatcgcggcgaaaatcgccttgagcgatgccgaggcagcgcacgtcgaggtcggcggctggcagggcgatatcacccgcagccagtttaacgatctgattgccccgctggtaaaacgtaccctgatggcctgccgtcgggcgctaaaagacgctggcgttgaagcgcaagaagtgctggaagtggtgatggtcggcggttcgacccgcgtgccgctggtgcgtgagcgcgttggcgagttcttcggtcgcactccgctgacctccattgacccggacaaagttgtcgccatcggcgcggcgatccaggccgatatcctggtgggcaacaagccggacagcgaactgctgctgctcgacgttatcccgctgtcgttaggcctggaaaccatgggcggcctggtggagaaagtgatcccgcgtaataccaccattccggtggcccgcgcgcaggagtttaccaccttcaaagatggccagacggcgatgtccattcacgtgatgcagggcgagcgtgaactggtccaggattgccgttcgctggcgcgctttgcgctgcgcggtatcccggcgctgccggcgggcggggcgcatattcgcgttaccttccaggtggatgccgatggcctgctgagcgttacggcgatggaaaaatcgaccggcgtggaagcctccatccaggtgaaaccgtcttacggtctgaccgatggcgaaatcgccaccatgattaaagattcgatgagctacgccgaacaggatattcaggcgcgcatgctggctgaacagaaagtggaagccgcgcgcgtactggagagcctgacaagcgcgctggccgccgacgccgcgctgttaagcgccgcggagcgtcaggccatcgatgccgctgcggagcaggtacgcgccgccgcggcaggcgacgacgctgacgcgattaaagaagcgattaaaaatatcgacacacaaacccaggaattcgccgctcgccgtatggatcagtcggtccgtatcgcgctgaaaggccaatccgtggacgaggtttaaaatgccaaaaattgtatttctgccccaccaggacctgtgtccggatggcatcgttgtggaagctgagaccggtgaaaccattctcgatgccgcgctgcgtagcggtatcgaaattgaacacgcctgcgaaaaatcctgtgcctgcaccacctgccactgcatcgtgcgtgaaggttttgactcgctggcggaaagtagcgaagatgaagacgacatgctggataaagcctgggggctggaacctgacagccgtctgagctgccaggcgcgcgtcaccgacgaagatctggtcgttgagatcccgcgttacaccatcaaccacgcacgcgagcactaatatggcactgaaatggaccgacagtcgcgaaatcggcgaagccttgtatgacgcttacccggatctcgacccgaaaaccgttcgctttaccgacatgcatcagtggatttgcgatttggaagagtttgatgatgatccaaacgcatccaatgaaaaaattctcgaggcgattctgctagtctggctagacgaggccgaataatttcgcgttaagcgaaaacattttaacgggctgccatagggtggcccgtttgctaagaaggataatgataatgaccgaagctatgaagattacgctttctactcagccagccgatggacgctggggagaaaaagcgacctggagcatcaataacgacggcatcgctctacatctcaacggtaaagacgacctcgggcttatccagcgcgcggcgcgcaaaattgacggcatgggcatcaagcacgtcgccctgagcggcgaaggctggaacaccgatcgcgcctgggccttttgggccggctataaagggccgaaaggtcagcgtcaggtcgaatggccatcccttgacgacgcgcagcgcagcgagctggataaccgcctgacgatcatcgactgggtgcgcgacaccatcaatgcgccggcggaagagctgggtccggagcagctggcgcagcgcgctgtcgacctgctgtgcggcgtggcgggtgagaagataagctatcgcatcaccaaaggcgaagatctgcgcgagcagggctatcttggtctgcataccgtgggccgcggctccgagcgcccgccggttctgctggcgctggactataacccgaccggcgataaagaggcgccggtatacgcctgcctggtgggcaaaggcatcacctttgattccggcggctacagcatcaagcaaagcgcctttatggattcgatgaaatccgatatgggcggtgcggcgactatcaccggcgcgctggcttttgccattacccgtgggctgaacaaacgcgtgaagctctacctgtgctgcgccgacaacctgatcagcggtaacgccttcaaactgggcgatattattcattatcgcaacggcaaaaccgttgaagttatgaacactgacgcggaaggccgcctggtgctggcggatggcctgattgacgcctcggcgcagaagccagagctgatcatcgacgccgccaccctgaccggcgcggcgaaaaccgcgttgggcaatgattaccacgcgctgttcagctttgacgatgcgctggcgaatcgcctgctggcgagcgctcaggcggaaaacgaagccttctggcgtctgccgctggccgagttccaccgcaaccagctgccgtccaactttgctgacctgaacaacaccggcagcgcggcctatccggccggcgccagcaccgcggcgggcttcctgtcccacttcgtggaaaactaccatcagggttggctgcatatcgactgttcggcaacctaccgcaaatctgccgttgagcagtggtcggcgggcgccaccgggcttggcgtgcgtaccattgctaacctgctgacagctgagtaatggcctggccgggtggcgcccgcgcttacccggccaggaaaaccatatgcccgcgtggacgaatggccgccgggcaattcattgtgaagtagccaaactatgtcagatacaaaaaatgaattagaaaccctgctggaaaaagcggcgactgagcccgcccatcgtccggcatttttcagcgcgctgctggaggccaccgtctgggtgccgggcagggcagccgatggcgagcagattgtcgaagatagcgcgctggatctgcagcattgggaaaaagacgacggtacctcggtgatcccattctttacctcgctggaggcgctgcagcaggcggtggcggatgaacaggccttcgtgatgatgccggcccgcacgctgatggcgatgacgctgggcgaatcgttattcctcaacccgaagctgccgagcggcaaagagttcaccccacgggaaatcagccatctgttaggcgaagagggcagcccactgagcacccagacggtactggaaggcggcgaagcgctgctgctgtctgaagtcgccgaaccgccggcgcagatggtcgattcgctgaccacgttgttcaaaacgctgaagaccgtcaagcgggcgtttctgtgctcgattaaagagcgcgccgatgcgccggccaacttattgatcgggattgaagcggaaggggatattgaagccattatccagaccaccggcagcgtggccaccgataccttgccaggcgacgaaccgatcgatatttgccaggtggtggaaggcgagaagggcatcagccattttatgattgcccatatcacgccgttctatgaaaagcgctggggcagcttcctgcgcgattttaagcagaaccgcatcatctgacagcgggggcggcagcccccgctgtttctttctgcttccagttcgaggcacaaaagcggggtggcaaaagctaatgcagggcggcaaagattcgcggataggcagacaccatgtgatagaggagaaatcccgtcacgcacagtgtgacaatgccgttgaagagcgccatatccccgcgccaggcccggcacctctcttcgcccagcagagaacgtagcgctgccaccagcccgccgaccagcataaacgccagtaacacccctgccatttgcgcgataacaatgtaccagcccagcggcgtattcacgtcccgggcgctcatcagcgcgatctgcgccggcaaaatcgtctggaacccgagggtaagtatcatgagaagacgcaagtccgccagctgagcgtcgaacgtccgggccaggcgccgggcgtcacgcaggagcagcacccctgacgccaccgccgcggcaacgctgatgtgctggagaataaaaatatataacgccagggttccggatgggactcgggacaaaaagaacagattgcaaaagaccatgaccagcaggccaaattttgtgacccaggcacggaatacctcgccgggccagcgccggcttgacgctgggttatgcatcatccacgcggcaagggtcgacttaccgtaaccgggcgcgagcagcaccatcagaaaacccagcagcgcctggtgaccataggtgatcagtgggacctcttccagagtgaccccgagaaagcgggtatacacggagactggcgcaggcaccaggcttagccatgtccggttccattgcggccaaaaataaaggatcgcgccgcctgccagcaggccagctatacctcccagccagggaaggcgcggtgaataagccgaatgtgggttagagactaatgccattttcactccttgtggtgacatcagattgggatggactggatgcgctatcagccctgaggaattctgtaccagtgctctgcctccccatcaggcaaagcgaactcggcaggaacaagccctgcggcagcacagagtaaccggtttagcgagaagcagaagaaagtgggagagaaaatcagaaattatttagtgaccgcggaacgggaggcccgcggtcacgccgtgtttacggagcggcaggggccggttcaatcggcagatcgctccgcgcgccccattcgctccaggagccgtcatacaggcagacgccgttcacgccaagcgtggtgagcgccagcacgaccaccgccgccgtcacccccgagccgcagctggcgatgatcggccgttcaaaatcgacaccctgacgtaaaaagatgtcgttcagctcgtcaacggttttcagttcgccgttaatcaccagatccgtccacggtacgttcagcgcgccggggatatgcccgcggcgcaggcccgggcgcggttcgtcggcctggccgttaaaccgggccgccggacgggcatcgacaatctgcgccgatccttcatggctgaccaacaggacgtcggtcagacgcttaatttgttgaggatcgaaccgcacgtcgaattccccttcggccacctccggcatcccttgttccagcggcagttcgtcgcgccgccagccctccagtccgccggccagaattgacaccttctctacgccaaaggtgcgcagcatccaccacgcgcgcggggcggaaaacagattgccttcgtcatagaccaccagatgcttatcgctgcagacgcccagttcgcgcatggcgacggcaaacgcttcggcccgcggcatcatatgcggcagcggactggtgtggtcggatagcgcctcgatatcgaaaaacagcgcgttcggcacatggccggcgcggtattccgcggccatatcccgcagggcctcctgcccggcgggcgccatgcgggcgtcgataatctgaatttccgggtcatcaatatgttctgcccgccagtcggcagcgacaaaaaacgaggtggacataggtgcctccgttttattattcatgactgaattgtcggcgttttagctggcgctgacaagttaaggacgccagagtggggacggcgtcacggcacttttctgattaatcggcagaaacccgcttcgtcactgttgagaagcgccgccataacgcataataaatgtgacaaattgcatcaggctcatcggccgaggggttagaaggatgaaaccatttcgtttagcggcgctatcactagcgctccttaccgcattttcattaaccgggtgtgatgacagcggtacaccgcaggcctcggccccggcgccagccgcggatagcaacccaggcgcgacggcaaaaccggaccgcgcccagctggcggcgctggcggaaaaaagccagggtaaagcgctgacgctcctcgacgcctcggaggtgcaactggatggcgccgcgaccctggtgctgacgttttccgtcccgctgcagccggaccaggatttctcgcgcagcgtgcatctggtcgacaagaaaagcggtaaggtggacggtgcctgggagctggcgccgaatctgaaagagctgcgtctgcgtcaccttgagccaaagcgcgagctgattgtctcagtcgacccgacgctgaccgccctgaacaaggcgacgctcgataaaccgtttgagaagaccctgaccacccgcgatatcgcaccgagcgttgggtttgccagccgcggctcgctgctgccgggcaacgtggtcgccgggctgccggtgatggcgctgaacgtcgataatgtcgacgttaatttcttccgcattaagccggaatcgctctccgcctttgtcagtcagtgggaataccgtaactcgttaagcaactgggaatctgatgaactgctgaagatggcggatctggtctacagcggccgcttcgatctcaacccggcgcgtaatactcgcgaaaagctgctgctgccgctgagcgacatcaagccgctccagcagcctggcgtctacgtggcggtcatgaacccggcgggccgttatagctacagcaacgcggcgacgctgtttaccctcagcgatatcggcgtctcggcgcatcgctaccataaccggctggacgtttttacccagagtctggaaaacggcgccgcccagtcgggcattgagatgcagttgctcaatgccaaagggcagaccctggcggaagcgaaaagcgacagccagggccacgtcaccctgcaaaccgataaagaagccgcgctgctgctggcgcgcaaagaggggcagaccacgctgctcgacctcaagctgccggcgctggatctggcggaattctctatcgcaggcgcgcccggctttagcaaacagttctttatgtttggcccgcgcgatctctatcgtcccggcgaaacggtgatccttaatgcgctgttgcgcgatagcgacggcaagccgctggcggagcagccggtgaaactggaggtggttcagccggacggccaggtgatccgctcggtgatgagcaaaccagtgaatggcctgtaccagtttacttatccgctcgacagcggcgcggttaccggcatgtggcacattcgcgccagcgccggcgacaaccagccgcgcgaatgggatttccacgttgaagactttatgccggaacgcatggccctgaacctgacgccgcaggccgcgccagtcgcgccggatgccgacgtcacctttggcgttagcggcgcttatctctacggcgcgccggccagcggcaaccagctgcagggcaagctgttcctgcgcccgctgcgcgacgccgtcgctgcgctgccgggcttccagttcggcgatattgcggaagaaaacctctcccgtagtctggatgaagtccagctgacgctggacgaaaaaggccatggcgaagtgaccacctcaagccagtggcaggatagccattcgccgctgcaggtggtgctgcaggccagcctgctggaatccggcggtcgcccggtgacccgtacggttaagcagccgatctggcccgccgaggcgctgccggggatccgcccgcaatttacgctgaaggacgtttacgattaccgcaccgataccaccgtgaaacagccggtggtggatgaaaacagtaacgccgcgtttgatatcgtctatgccgacgtcaaaggcgagaaaaaagcgatctccggtctccaggtgcggctgatccgcgagaggcgcgactactactggaactggtccgacagcgaaggctggcagtcgcagttcgatcaaaaagatctgcaggagggcgaggagtcgctggacctgcaggccggccagatcggcaaagtgagcttcccggtggagtggggatcctatcgcctggaggtgaaaggaccggacgacgtggtcagcagcgtgcgcttctgggcgggctacagctggcaggataacagcgaaggcgccggcgcggcgcgtcctgaccgggtcaccatgaagctggataaaccgagctataaaccgggcgacaccatcaggctgcacatcgccgccccggcggcgggtaaaggctacgcaactgtcccttatacacctctgacgctgccgacgcgcggacgaggggaggcccagggggtaggcggacccgcaaaaacaaccctcagaagacgcatctaaaaccca

SEQ ID NO: 151 - DNA, 66212 bp, Unknown
  source: /note="Description of Unknown: MKP2_2161_1 Mutant Bacteria sequence"
cgttgctttcgttgcccagacggccgatcgccgaggcgccgttataggagccgtcgacgccgacatatttctggtcgccggtctggaagtgggcgccatagcgggcgtagccgctgaacttgaggccaaacggaatggccatatccggcgaggcggcggtggtctgcgggttggtgatcacgtcgacctttttgtcggccgcggcgtcgattttcgcctggcggtcggccagcgctttatcaacggctttggcgacgatggcgtcgatctgttcctgagtaaattcttgcgccattacagaggtaagcggaaaaaacgcggcgataaccgccatggttaatggaagcttttttatcattgtcatgagtttctcaatataggttaattttattcagacaataaccagcctattctgagctgacagaatatgtcgctatcatcagaacaagttattttttattttgtacggtcacagaggcgttacacaattatcgttacccttcctccttcgctgatattaaacaggtggtctttcgccactgacaaaaaaaacacagcacgaaccaataaacgctatttcccggcagcggatagacggcggaatacatgcccccgcgggggcatgtcagcaaaaattaaccaaagatataggtattgacgagattttcgagtaattcctgacgcccgctctgaggctgcggattcagattatgctgctcagcgtatcgggcaatattatccagcgacatctgcccgctcataattttctgccccagctcgccctgccagccggcatagcgttttgccagaccctgatcgagcttgccatcctcaatcatgcgcgcggccagcttaagggacagcgccatcacgtccatggcgccaatatggccatagaacatgtcgtatttgtcggtgctctgccggcgaactttggcgtcaaagttcaggccgccggtagtgaatcccccggctttgaggatctcatacatcaccagggtattttcttccacgctgttcgggaactgatcggtatcccagccgagctgcgcatcgccgcggttggcatcaacggagccgaaaatgcccagcgcgatggcactggcgatttcatggtggaaagagtgccccgccagggtggcgtggttggcttcaatgttcaccttgatctcattttccagaccaaactgcttcaggaaaccatacaccgtcgcgacatcgtaatcgtactgatgcttagtgggctcctgcggtttcggctcgataagcagcgtgccgccaaagccaatcttatgcttgtgctccaccaccatctgcaggaagcggccaatctgctcgcgctcctggcgcagatcggtattcagcagggactcgtaaccttcgcggccgccccacagcacatagttttcgccgccgagccggtgggtggcattcatggcggtcactacctgcgtggccgcccaggcaaatacctccggatcggggttggtcgccgccccggcgccgtagcgcgggtgggtaaagcagttggcggtgccccacagcagtttcacgccggtttgctgctgtttttccgccagcacctcggtcatgatggcgaaattgtgcagatattctttcagcgacgcgccttctggcgagacgtcgacatcgtggaagcagtaatacggcacgttgagcttgtagaaaaattcaaacgccacgtccgctttgcgtttggccatttccagcgcatcgcccgcggcctgccagggacgctcaaacgagccggcgccaaacatatccgcgccattccagcagaaattatgccagtaacaggcggcaaaacgcagatgatctgccatgcgttttcccagcacgatttcatccggattatagtggcgaaacgccagcggattatcggttttgggtccggcaaagcgaacgcgatctacctggtcgaaataggtttgcatgatgaactccgaaattgagaaacaggaaaattaacaactgtgacacatcgtgtattctcatcgtcggttgctcaattacgttatttcactcggcgattgagaaaatgctcaaatgtgagccatctcgcaaataaaactattttaaatatctcgcttcgcgcgcgtatagcgtacacttcctggggaattcaggtatccataccaaattaaaatgccggttttgtcacaatgcccgcctgccaaaaaattagcggcggataacggttcaacgcaggcgatacaggcctttgcttcgaggatcacagaagtaaaaaaacataattacgtaatttaaaaacgtaatagattcttccaggtcaactgtgtcagaaagtgtttcacctacacaaaacaaaccggagtctgcttagaatgagtaaaaacataatgcacagtcggcatgatgaatatcataaattaacccgtggagaacgaattggttatggcatgggcgactttgcgcaaaacctggttttcggcacaattgggggttttctggctttgcatatgctgacggtaaataccatcagcacggcaacggcaggctttatttttctttttgtccgtatcattaatgtgttttgggatccgatggtcggaacctacgtggataaacgaacctcaaaagcagggaaatatcgaccctggctgttacgagccggcgtgccgctggtgatcctgtcggcattactgttcgcgccaatccctggggtgaaaggttcggtggctttcgcctttattatttatctggcgctggacctggtttattccttagtcaatattccctatggctcgctgaatgcgtcgctgacccgcgacccggaatcgatcgataagctgaccagtacccgcatgatgctggccaacagcgccaacctgctggtctataccctgttcccgatgtttgtgcagatggcggcgccgaaagatcgcagcctgaaagataccggctttttcggccttgagctgaatctggggaactataccgatccgtcagcgaactacgcctggttcggcgtgtacgccatctatatgatcatcggcgcggtggccctgtttatctgctacaaatgcaccaaagaacgcgtggtcgcgaccgccgagcagaccgccaacgtcaaaactaccgaccttttccacgagctcagacataaccgtccgctggttattctcggcatgttctttatgctggcctttaccttcatgttcttcatgaacaccgttaacggcttcttcaaccagttcgtcgtcggccactccgaatggatgggcgccgtgggcctcgtcgcgtctattcccggcatcgccttcccggtgttctggccgaaactgaaaaaaatctttggtaaaaaaggcttcttccatctgttcctcgccatgttcatcgtcggcgaactgctgacctacgcctggtcccgcgaagggatgcacgacgccctgtggctggcctacatcgccacctttattaaacagtggggcttaacctccgccaccggctttatgtgggcgctggtaccggaagttatcgcgtacggcgaattaaaatcgggcaaacgcaatgccgccattatcaatgccattatgggactcttcttcaagatcggcttcaccatcggcggcgctatcccgctgtggctgctggcggtgtatggatttaatgaaagcggcgccgtgcagagcgccagcgccatcgacgggatcattatgaccgcggtgtggatcccaattgcgctggccgctatttcgatggtgatcatgcaggtttatccgatctccgataaacatgtgaccgacatcaaccgtcagctggatgagatccgcgtgtagttaaaaaaattataaatcagaccgatccttaactttccattttaaaaggtgtaatgaaatgtcacttattcaaaacccgatattacgcggctttaatgccgaccccagtattattcgcgtcgaggatacgtactatattgccaactcgacgtttgagtggttcccgggcgtgcgtttacatgagtccaaagacctgaaaaactggaacctgctgccttcgccgctctccaccaccaccctgctggatatgaagggcaacccctcctccggcggcatttgggccccggcgctctcctgggccgacgggcaattctggttggtgtataccgatgtgaaggtcaccgaaggcgcctttaaagacatgaccaactacctgaccacggcgaaggatattcggggcccgtggagcgacccgatcaagctgaacggcgtcgggtttgacgcctcgctgttccatgacgacgatggccggaaatatatcgtccagcaaacctgggatcaccgggagtaccatcaccccttcgatggcattaccttaacggagctggataccaagacgctgaagttaatgccggaaaccgcgcgcaccatctaccgcggcaccgccgtggcgctggtcgaggggccgcacctctataaactgaacggctactactatctgtttgccgcccagggcggcaccgtgtttacccaccaggaggtggtggcgcggtcgaaaaccctcgaggccgacagcttcgaaaccgagccgggcgacgtgttcttaaccaacgtcgataccccggacagctacatccagaaacagggccatggcgcgctggtctccaccccggaaggcgaatggtattacgcctcgctctgcgcccggccgtggaatcgcccgggggaatctatctacgacccgcgcggctggtcaaccctcggccgggaaaccgcgatccagaaagtatactgggacgacgaaggctggccgcgtattgaaggcggtcacggcgggaaaaccttcgtcgacgggccgaaagacgccatcttcaccgaaagcgccagcgataatagccagcaggatgactttacctcgccagcgctcgacccgaactggaataccctgcgagtgccgtttacggccaaaatgggcaccaccggcgacggcaaattaaccttaatcggccagggttcgttagccaatacgcatgacctgtcgctgattgcccgccgctggcaggccttctattttgacgccgcggtgaaggtgaaattcgaacccttcagctaccagcagatggccggattaacaaactactataacgaccgccactggagcttcgtcttcctgacctggaatgaaattaacggcaaggtcatcgaagtcggcgaaaataaccgcggaaaatacacgtcgtacctgaaagataacgccatcatggtgccggacggcgtggaatacgtctggttccggaccaaggtccgcaagcagacctacagctatgaatatagcttcgatggcgtgaccttcaccgagatcccggttcagctggatgccgcggtactgtccgatgactatgtattgcagagctacggcgggttctttaccggggcgttcgtcggcctggcggcggtagactacgccgggtacggcacccaggctgagttttatcagttcgagtatcaggagctgggcgataggttagcggccgatggcagctacagctgggaggctggcgagacgcgggataagtaagagaaagctggcccacgctaccggtgaggtagcgtggggtttgtgaactgtgggaacgcaacggttatgcgcttccgattttttcaggcttgcgtcgcaggcggcgaacgcggtctccactcccacagcaagatccgtcgtaatacttaaaaagtgatccacctggaatcgccgcatctggtgggttgatcggcaaggattttgcgagcatcatcgcatttatttagctgccactgtaacgctatgccctccagcacgaccctgcaacacgcgatcgaaaacatcaccatctggcgcaaaggcgaacagcgtgcgccgcataagccactgttgctgctgtacgtcctctcacagtaccggcgcggccatgcgcggatgttcgactacgcctcggagatacgcgatgagctgcatagcctgctggaacgctttggcccgcagcgccgccagtaccggccggatatgcccttctggcgcctgaaaggcgacggcttctgggagctgcacaacagcgaccagtgttcaacccagggcagccgacagccgcccggcaaagagctggagctctgtaacgtcgccggcggcttcgatgagccgcattttgcgttactcaacaaaaataagaggctgatcaataccctcgcccatctgatcctcgaggcgcatttcccggagagtattcaggaagaactggctgaagagatgggatttgatctgcagcagatccgtaaagagcgcgacccgcattttcgccagcaggtgctgcgcgcctataactatgagtgcgcgatctgcggcttcaatatgcgccatgataatacctccgtcgccctggaagcggcccatatcaaatggaagcagcacggcggcccatgtgaaatccctaacggcctggcgctctgcgcgattcaccataaggcttttgataaaggatccattggtctggatgaggatatgcgcatccaggtttcgccggcggtgaacggcgggggcatcgttggcaggctgttctgggattttgatggtaagccgattaccttgccgcaggggaaagaatgctatccgcaggaagggtttgtggcatggcaccggcgggaggtgttcaggggatgaggggggatggtgtgtggggtttaatgtggagcgtagggtttagggattgtgactgtgtttcggagaggatttcgtggttgatcaatgattcgtcgttgttagattaaagggattatttattggttgttttgatattgatgcttgagagtgggggcgaaggctggactcgccttttcgtttaatttgttgaaaataaattggttatgagattttagtttgggggtttgcccccagaatgggacataaaattgaatactgggtggaagatcacaaagttgcgtgcttactttccagatccgaaacgcattccagagtaaagcctctcacggcattgcaccagtcgagatgctaaatctcccacatgcaactccgacttgtgaccatccgggtcaagaaaatagaaagattgcccttcgcttttattgtctttccagaccgtcactcccgcctgtttcagcttatacgagaacgactcaaaatcctctggcgcgatgctgaatgcatagtgggtgtagtcgccttcctgcgtggctacgtagttgcgtgatacgtcataagaaagacagatccaaaggtccccacaggtaaggtaagcaccggtatcccactcagcatgaagctgcaaccccagcaaatcgcgtcagaaagtcaggctactttgcaaattactgacggcaagcattaagtgattcagagattgaagaataggaacatccgtgatggttattcgttaatcgagcgaacgtcaatagcgccaaaaagtggcgttactagacaaagttatatctctcggagagaagtgcaaagactaaatattgcaacccatatcaacttacaaacttatccatcttcataaacgctagtttgctagctctaacctagatctttaggagcctaactatttatgcagagttgctaatcagcagtaatgtcgtcaaaagatgaactacttaatgaacactagcgccacgtcactaagatcgtagcacttcctatccctaacttactttgttatattataacaaaagacgaggtaactatgaaaacgaccctgtataaagatttcacattcgaagctgcacaccgactacctaatgtacccgacggacataaatgcgggcgcctacatgggcattcttttgtggttcgccttgagattactggagaggtgaataaaaataccggttggattatcgattttgcggaacttaaagcgatttttaaaccaacattagatcgtttggatcactattatctcaacgatataccaggtctggaaaatccaactagtgaagtcttagctgaatgggtatggaatcaggttaagcctctgttaccaatactaagtgctgtagtcgtgaaagaaacatgcactgcgggatgtatttatcgcggtgtgtagtgactcatttagatagccaagaactaaattgtggctatctaaatgcttaaacataaaattaaaataaaaaatcaccttcaataaccgccatcataaaaatttagcatatatcaaatagtgtcataaaataataaaaaatctcaatacaaaacatcaatcgaaataatttaataccataaatagtagttgaaattaaatttcattgaatcgccacggatttaacagacatctcagagtcatttaagatgacttaaagagaggtgcccatgagcggtaagcgttatcctgaagagtttaaaattgaagcagtcaaacaggttgttgatcgtggtcattctgtttccagtgttgcaacatgtctcgatatcaccactcacagcctttacgccaagataaagaagtacggtccggtttcttccactcataatgaacagtcagatgctcaggccgagatccgccgtcttcagaaagagttgaagcggattacggacgaacgggacatattaaaaaaagccgcggcgtacttcgcaaagctgtacgactgaggtacacctttatccgcgacaacagccgttgctggcctgttcgtttgctctgtagggttctggatgtccatccgagtggattttatttctggcttaagcagccacattcacagtgtcaccagacagaccagatgctgaccgggcagatcaaacagttctggcttaagtctggctgcatctatggttatcgcaagacacatctcgatttgcgtgataccggacagcagtgcgtagtgaaccgggtttggcggctgatgaagcgtgccggaataaaagctcaggttgggtaccgtagcccacgtgcacgtaaaggtgaagccagcatcgtgacatccaacaggctccagcggcagtacaatccggactcaccggatgagcgttgggtgacggacataaccgacatccgaacccacgaaggctggctgtatctggccgtggtggttgacctgttctcccgaaaagttatcgactggtcaatgtaaccccgcatgataaaagagattatcctgaacgcattacttatggcggtgtggaggcgtaaccctcaaagccggtactggttcactctgttcagggcagtcagtatacgagctatgagtggcagtcgttcctgaaatcgcacgctctggaaggcagcatgagtcgtcgcggtaactgtcatgacaacgcggttgcggaaagctttttcaaactactgaaacgcgaacggattaagaaaagtatctacggaacgagagacgaagccagaagcgatatttttgattatatcgaaatgttttataacagtaagcgtcggcatggttcgagcgagcagatgccaccggctgaatatgaaaacctatattatcaacggctcagaagtgtctagattatccgtggcgattcacatatcttattgtgtttaaccacattgatttacgttctgtgaaaccaaagagattttttacattttctacttgaatatagggtttatcacagtattctatcctcatgtacgtaaattttgctttcccttacattgtcactcagacgtggaaaatctctaatcgcatcccatgactgtacatttttcaatcaaatgtgtctgagaaagcattttcaaggattgtgtggatgagtgtattaccaattgggtcgttggttatttcggatagttttgacggcattggcaaagttactaatgttgatattgatgccaaccgcgcaacagttgcattttttgagtcccccttgcaacctttcgcccggcacactgatactcgtctggataagttgattccgacaattcctcacgatgaggcagtgatatattgtatcgaaccagaaagccagcgatgggtacgcgcgcgttttggcggatcccgtcccaatggcgattttctggtaatctttcgagaagacgaatctgcgactctcccgatcgataaagtctacgttctcaataaagcctctgatatcccgattaatccggcccatttccttgcctctcagacgaatgatgctccgtttttcttccctcgccgtcaatcctttatcaatacgtatatccagcagcgagcgtcatgtcggggaatggcttccctttcaagcagcgcagttgaacttgaacctcatcaattagctgttgtacggcgcgtactgcaagataaaacgccgaagtatattctggcagatgaagtagggctcggaaaaacgattgaagcaggcatgatcattcgtgaacacgcgctagaagaagccagtcatgtcagcatgctcattgccgtacccaaccaactcgttaagcagtggcgggaagaattgggtgaacgttttcagctgagacagttgctcgtagatgtgacgacaacactctcttcattaaggcaagatgggatcgcgcaagggatagttatctgcagttatactgaagccagccttctgcttagcagaggattcaaaccatctctggttaccgtcgatgagatccaccaaattgcaaactggccatggtcaatagatgaagacgaacgccataatttcggcctgatttcacaggcgtgccacagagcacattatgtgttgctacttacaggaacaccgcttcatggacatgagcgtaacttcctgtcgatgctgcattgtatcaatccagaggcttatcagattgacgagaaccatctaaaggcgttcaccgaattggtgaaaaaccgtgaaagtcttggtggcgttttctcggcccttgtaccgtcagtgtctaacatcagtctccgccgtaaccttgatgaaattcttgcgcaatttccggatgaccatcagttaacaacgctgtgccaggacttgtttccgttaattggcagattctctcagccaacgcctgagcgtgaagcgggtattaaagcgatacgcctgcaccttggtgaacattatcgaatccatcatcgtttgttgagaaaccgccgccaagtcgcccttagtcaggacgaaagtaagaacctgaatttaaatctgctattccctggactggatggggtgattgagtatcactggcaaaccgaagggctgacgctggacgagttactggaagaatatcgggccatggcagtgctgccgcaaaaccataactggtcgctaaaagaagcgagctatatcgactgggttgacgatctattttccagtccattgtgcgtgatgcagcgtgcaaaagcgactcttgcatcttcaaaccctcttccttccgatgaacaggcattgctggaacacatagtctcaacggccaaaaacgaactacaggccatcgacaatatgttagctgcagcactcaatgactggctgaagcaattcccggagggtaaagcaattgtgttctgcgatcgccctgagttggcgcaacatctgtcggtcaaactaagtatcctgttggactatccggttgaacgttatctaccgggtcaaactttgcaatttacccaaccgcaaagccccattcgggtacttctgtgcgataaaagtggcgaggatgggctgaatctccatggagggcgccgtctggctgttcactacggcttgccgcgttcctgcagtcgtatcgagcagcgacttgggcgcctcaatcgctatagtgccaatctgataaggatcaaaccaattcagagccttttgctaaagaattatgctgcccaaggtttacgtaatctgtgggcagatcttctggtgaacagcattggcgtatttaacaacactatcgccagccttcaatttgtgcttgatgactatattggcgatgcctggagcaggttgttccgagaaggtccacaagtactagaaaaccttgcgacagaattgccaggcgaaaacggcgtgttgttcagagaaactaacaaaatcaacatgcaggaaaaactgctggcgatggatgaagacgtcgtgcaagctgcacttttcgcgcagcagttaagcaatgacgacctaaccgctgtagaacagagcaaagccctgacgctctggatcaccgagggattacgcttccgctcatcgggaaatactgaagagggcatacggttccgtttcgaactggctgaacgcagttcaggtacgctagtcgactttaaaacattcctcacgacctgtatgctcagctttgacaaagaggggggttaccctccttccacacatctgatgagcgcaaagcgtatctcggctattgacgggacagcggtatatcctttgcgctatggtcagccctttgtcgatgcaatttggcaactcctgaatcaagatgcacgtggaagttctgtggcattgctgcgtatgattaacgcgcaactcaacgcccctcgctacttcttcgagatgacttggctcattaccggttgcgaccccctcagcccttacgcctaccttcgtaaaagcgacgagcttgcaccgccacgcatagtgcaggagtgggttgctgctgacagttctcttgtgaccagtccacaactccttaagatactaaacagcgagtacagcaaaaatccttcagcaacgaaaagctatgttgatctcaacctgcgcgcctcaagatggcaggaaatagaagaactgatttccgctgatgcttggaaagaaatggtcgagcaggtttatgataaagctttgcaaaaacagcgtggtttggtcggagacagcgcttatatccagttaatgtcagtaaaagcgatcatcatctgtagcagcaatattttatccggagtcgcctaatgattgaacaatggtcgcgtctacagttggcgctgacaacctgttttaatgaagatgtgacctttacggaagggattgaaaatccctttcttaaacggttaatgaatattattaccgattcctccgctggtcagaatgatatttttgctggttacgccgatgcccttcgagccgcacaggcgaatggcatcgaagaaccgtggctcccctctccaccaacaataaaggatatgccccatcctctttggggtctggtaaaatcagtcgcagggcagacgttgtcactctctgtagatatgcacctagatagcacaaaagctacttaccaatgcagaacccggcgtaatttactacaaccggagatggatccggcgcttaaaaacctgctggtagatacaccacatacgcactatcgcggctttgggcagcaggcagcaatccgcacgttgctcacctcagacatcaacagtacgttggtgataaatctacctaccagttgcggcaaaagcctgataactcaaatccaggctatcagcgctcctgcctgttccttaactttagtcattgtcccgacagtagcactggcgattgaacaagccgatttgatgcgggatatgctgcgcaaggccgaacaggatcatggcggaagctacgcgtgggttggcgggcaggatcagacgacgcgccagacactgaaagagcggctgaaaaacggcacccagcgagccctgttttgctcaccggaagcagctaaatcatcgctggttccggtgctatttgagctggcaaaaaataatctgattggtgccgtcattatcgacgaagcacatctaattgatcaatggggagccgaattccgccctgactttcagctcattgcgccattgatccgttcactgaaagcccagcctgattgccgtttccgcaccctgctgctctccgccacctggagccagaacactcgtgacgtcattgtggagcaattccgtgcagatgacagtgaactcattgaaatcacggcgaacttcctgcgtcccgaacctgaatacttcgtgcataccgagcctaatccgacctcacataagcaacgtgttgaacagttgttgatgtcactcccacgtccactcattctctattgcacgactcaagaagaagcagaaagctggtatcaacgacttcaactacaacaatatcaccgtgtcggcctgttccatggtgatacggaaacgctgacgcgtagaaagctaatttcacaatgggcgaacgatcaactagatataatgattgccacttctgcgtttggcgttgggatgaataaaagcaacgtccgcacgatcattcatgccgctgttccggaaaatattgatcgctactatcaggagtgcggacgtgcagggcgtgacggcaaagcgtgtcaggcacatctggtctggcatccagcgcagatggagacggcggaaaatctctcagttgaaaaactcatcagcgtcgaaaaaggtttcttacgctggaaagcgatgtttgaacaacgtcagccaagtgatatcgccaactattgtatctctctggataccaaacccgattacatcgactatcagggagatcgcaaccaagcctggaaccgcagaaccctcttactgatgcagcgtacaggactgattgaactggtgtttgctgcacctgaactaccggaaagcttacgagaaggtggagaaaaaaacgatcaggcgatccgtggttggtttgccaattattatagccaagtacatattcgtcactgcaacgattcacacctttcggaagagtactggaataactttgtggaaaaagcccgtagggaagaattgaataagaggcaagcagcttttacgttgttaagagaatggctgaaggatctcgaaccatctttgtgtcaggttttaagaaaattttatatttatcaaaataatgaacctgagctaacctgtggaggctgcccaggttgccgggctcagggcaaggcctcattctctccaaccgttggcaccgatgtaaaaatcttgcaatcgacaccaaagaaaaaagcacgcttcgttggagctgaaaaaaaagtgtattacagcgaagaaatggatattcgaactttgctgtcagaacttcgcgttacccttcgccatctgatcggttccggcaattacgaaaccatccgagcagataaagttaactttattcatctggaacgcgctttagattctgtgtctcgtttctggagcgtacaaaaacttgcagcaccaacgtcaaacggagcagaaattgtgatcgtggcaaataccgccacagtgctaccgacactaccagcctcacgttatgaacgtattattatcgccccgcagcatctggcagatccactgcatccgtacagaaaatggtgggatagcgcagaaaactctctgcccctagacacttttatcaggcaatcacaatatgtcaatcatcaataatgccaaccctggcagcagcctggtgctgctccctttgtttgatcgcattgtacaaaacgcccgtgtttcgctttctcaggatgcgatcatagctcgctatcgcccaaacaatctccccgcgaacgacaatgcctggggaaagattagagagaaccttgccttctggtgtcgtttgggactttggcctatggaaaatgaagcgctactaccgcaaccagaagaaacacgtccgctctatcagcgagtgctgcaatgcaccatcgaagcctgcaaagaaaaaggcatcgccgaagggaatgagtgcgaacctatgtggcgagtgctgtcgtgtttgctaagtttgcaacaacatacattgatgggggcagaacctctttcagtaactgaagttgctaaaaatgtacataaatggttgccagcaggaacgatcaacagtaatagtgaaaaattacctatagaatatggtcgctaccttggcttcctggaattagctccagaccaaaaatattacactgatcctacccgggcaattaaatgctttttaccgcaaatttttggcgaccagaaaaccctgcccatcaaagcctttatggccaatatggcagaagcgatgccaatgatggatggtggcgattttagagtgacagtgcaggaaatgatggccgaacgggggtggtccgcaccggaaggcaaaaacatcagtaccagcacttcgcttgcgctccgtcgtctggagatcagccaacagatccaactgactttcggaagtgatgatgccgaatcgttatccctgcaacttcccactagtgaaatccgccccgtaagcaaggttagtctcagggagatcgcataatgagcattatgaactactggccatcccttgagaacatcgagcaatgcatccgtaaagaagctgaagaattgcaggatgacgtgcttctagctgtgcatgaaaagatggctctcatccgtcgcgacgtcaataacaatcaggagatcctccaagatgaggatctttttgaccaactgcttactaccgagcgtgctatcccactgattggcgactcagggatgggaaaatcacatctggtgcgctggttggactgccgtctcaaaagctacctggagacgaaaggtcagcttacacagtgggaaattgttcgtattccgaaaaacgccagcttgcgccaagtgctgttactgatcctgaaaaacctgcacggaggcctttttgatgacgcgcgcaaacgcgttgacgatgtggcccaagcgcattccgctaaagacctcgccgacctgctattgaccatgatgtcacaccaactacagagcatgtacgacgaatcgatggcacttggtatggaatacgaaaagcaggggaaagagattcctgccgatattgataaacgcattaataccattattgaagaagtcgaaaatggcattggcaacctgataaccgatcctaacttcaagctgaatctgctcaagccggagcattgcatctacaaacgcgccagtcgtatgagcgatgggctaaaggctagtgatgaggatcacgacaagtacgaactggtgcctagcgacctctttttccaagacaacattgatgacctgtcgtcgcttgcccgcgaatatattcgacattctcgtattgatgaacatgataatgaaaaggcgcgagttcaggccgtaaatgttctgaatgaagcgatgcatgcagcactgaaatctttatttgccaagctcttcacctttaacggcggcaattttcaggaactatttcaagagatccgccgtgaattacttgcgcaggatcgccgcctggtaatcctagtggaagatatggctgctatttcagcgatcgaagacgtattgattgatagcctaatcgaagaaggcgttcgtgacggggtgagaacactctgcccggtacattcggtcatagcggtcactaacgagtatccaggttataaacgtcgacaaggcacgctggtaacgagggctggctatgaatggagcattgaaagcacacataaaagcgacagttgtgaagaaagtattatttcactgtgcggtcgctacttgaacgcggcgcgtcatggtgcagcagccctgaagcagtcgcgagcgcaaggtttaaatgactggcctccagtctggcaggacgaagaagtaccagaatggctggatgattttggtagtacagccaaacagggcgttccgctgttcccatttaaccgcaatgctatccgggcactggcaaataaatactgtcgagacggcagcaatcaacttgtttacaatcctcgcgtagtaattagccgtatcctgttggatattctgcgggattgtcgtgttgaagcagaacaaggttcattcccaccgcctaatcttgcaggcattaccacggatgctgaaattcagtacaaaataagccaattaactacccatcgagtttccagcgcggcgacactgaccggactctggggctacaactgtcactcctgggatgaagtcagaaaacaactatcaccgggcgtcgccaaagctttcggtctgaatgaattagccgaacacctgaacggcaaaggcaaaatgcctgaaacttcaaccagaaatggcgacactgataagaaaatagctatagttcctaaaccaccggtatctcctccacagccaaaaccactagtggaaaatacgactctgccttttatcaggcatctcaaagcttgggtaaacgacaaagtcgttttaccccaagatattgcccgaaatctgcgagccggacttaacagttgttatgagctctacgcccaagcggagtttttcggcatggtagaaaagccctcgttgctcgagcgtatcccgttaattagcctgccgctttcagcttccgatccttccaacgccattgtaaagttctacgatcgtaaagatctgaacgacccgttacgtaggatcgaaatctacaacgtgtccctggcaatactgcgtattcaacattatatcgatcttgaacaagggggagactaccctgaagcgctggaagactatgtccattatgaaaactttgtcagttggtgggtcccacaaaccactgaaaaagcaattaatcatgcccgcgcacgaaaattgaaacccgcactgcgcaatcattaccaaaaagcactactgctgggactgatgacaggaaaagagaatccagcggaactgattgatacgctttgcctgacgcagaaaggggttggcagaacccaaggaaaaacccgaggacgtacagcagacactaccccttccgctctctgtttctacgggcttgaagctaatcaaaaacctcacaccagcattaaagtggctgaagcgcggcaagttgcccttcagggctgggacgaggcgcgagacgcgtggctttctcaggtcgcagttcctgagttgagttctgggctcagttcaatccgagccttggaagccgaagttgtcaccctcgcattgaaagagatcctaaaagagccgctgggtgcggagatacaacgcgcggcagagacagccagaaaagagatcgcatcaacgatcgcgaatgcacaactctttgaggatgtgaaaaatcaggatgaattcattgcccttctcgatgactggaaaacgtttatcgaagtggttcgcacccagtactatccagcggaaaccgaacagattagaaattcaacatggctattggatgaaatcggtgcactgaaagtggatgctgaagccagcctacataccctgcaaacacttaattccctcaccagacaacaggatgtcttcatgctatggcacgacatctcccatctggatggcgattatgtcaatcgcatcggcaacctgcttacacagtggcagaatattcaatcgaaaatcagttttaatctgcaacagataaacagtaagggtgatgcgccaaaacttgaaaatgctcgcaagcaggttgaagagcgactgaaaaatctggcggctgatatcagcgcctctggagcgaatgaatgagtacgttacgccaacagcttgcagacatgcagaaacaacttgatttgagtgttcaggcaagtaaggccacgctaattattgaaaaatgcggtgtggtactgtcgaaaaccgatacagtcgctgggcattatagtcgtctgaagtatcagtacccggccctgcaacgtctgccgccagaattaagagttacctggaacgaaaatcagcgtaatgaacttaaaaacgctgcaaatagcgttaataatctgctgtcccagtggagtcgctggctgaaaaatcagactctggctggcgctgccatcagcaccgaaaatcccgatccacagttggacgaagactctactacaaaagagccaacggcttatgacatcattcagaatgactccttaaccaactgcatgaacctgtcacttggcctgtaccgtacacttagtggccaactgaacaacgcatgggaagagtggcagcaagagttgcgtcaacagattcatgttgacaacaaaactctcgaggctcagcagaaagtcggcaaactaaaagaaattgccgatgagtactcaaacttacgcaataaattcgatgtactggttcagtccttacctgagaatggcgacagcattactcagatccgctcgatggcggaacatctgaacaccttacgcggcatgatgaaaaccgactggcctttggcggttcaacacttctttgaccgaatcaacgggccacagaatggcaaaccaaccctcagcacacttacaacagaagtttttgagtggctgcgtgatgaagacatgttggaagactttgtgattacaaggaaatagcgacatgattgctgaggatttagctcgtctacacgcggcgcttgatgtactcgaagggcgagaagccgaactgctggtctggggagacacggaaggcgcgtttacagatgctgatattctgtctctgtttacccaccattttcccgacgaaaatggcaaaatattgatgcaggatctgcaggatgccgcaatgttgtttagcatcccaaatactaaaggtacgcaactttatcgcacgcgaatggcagaatccgttcatctgtttcgtcaccaacgccagtggtttcgcggtcagcaactgagtcgtacccggacgttggtggcggattatcgttttatccgccgccctcgaagctatccggaaaggaagtatccggctgagaaggttctgagccaattgagcgatgtcgaatggatgaatgacatcaagcgtcaagccttgcgagcactgatcggtgatttctcaattgctggttttcaatcccgggcaactgctcgcatcctgcgagcatgggatttccatagcaatcatacgcgcgtcaaagaagcaacggctacgatcgtatgtgccggcaccggcagcggtaaaaccctggcgttctatctgcctgcactaacttcgctcatcaatgacctgcaacgcgatcgttcagcacgggtccgtacgctggccctgtatccccgtaaggaactactcaaagaccagtttatggaaacttggggaaaatgccgagaagtggacgctcagtcagttgaactatctggacgtaaaatacgcatcggatctttctttggcgataccccccacagcatccagtacattgataaagacaaagatattcctttcgacttactgcgctgtaacacgcctaaatgccaaggcgaaatgcgctggaaagcggaagatatcagccggggcaaagagatcctccgctgtacgcattgcacacatagtgtgggtgaagacgaagtagtgctcactcgtgtatcactaatgaacaatccaccggatattttgttcaccacgaccgaaatgcttaaccaacacctcggcaataacaaggccaaccacttgttcggcgtgggcataaatgtaattgcaccgccgatggtgttgcttgatgaggttcatacttattcaggcaatagcggtgctcaaaccgcatatttgctacgccgctggatgcaactggcacgctgtcgcccgcactttgtcggcctctcagcaacactgagtgacgcagaacgcttcttcgcagacttagtgggcgccaacaaaaaacatgtcatgctaattgagcccacttaccaagagatggaggataaaggggctgaatacctgttagcactgcggggtgaccctgtttcgcaaacggccttgctctctaccaccatccagaccagcatgttggcgcgccgactaatggatacccgcaaagccacatcgcacggcacctggggccgtaaaactttcgtctttaccgacgatctggatatcaataatcgcctctatcaccaactttgcgacgccgagggatggcgtacacgcgggaagcaacttgtgcccaacgagcccccgctggcggctcagcgtaacgaacgcaacggtgtatccaatgcgctgacccttgctggtcaaaactggcgaatagctattgatattggacacccgcttgataattccgatcgggctatcgtagcgcgtacctccagtcaggacaccggggtggaccccaaagccgaagttgtcgtggcaacagcttcgctggaagttggctttaacgatccctcagtcggggttgtgattcagcacaaagcaccgcgtaacgtcgcttcttatcttcagcgcaaaggtcgcgccggacgttcaagaactatgcgcccttggatgatagtagtgttgtcagaattcggccgcgaccgcgtggtgtaccagcgttatgaagagctggtgacaccggaaatcaagggccaatcactaccattagataatatccacatccagaaaatgcaggcggcgatggcaaccctggactggctgagtatgaagatccccggcagtaacatctggtcactgctaaacaagccgcccaaaaacagagagcaacacgggcatctggaacagatgctcaatctgatttctgtcgtgctggaacaaaacgtctggcaacaggggctggaacagtacttgttctacgcgctaaaaattaccgaatcgcagcttcagcacatcatgtggtcaccgccgcgttccattatgatggaactacttccgaccctgaagcgccagttgactacccaatggtcactgatgggcattcccggcgcagacagaacaccaggccgctcaccgctgcctttgtttattccggcagccctcttcagcgagctgaatttgcctgagctgagcatccagcttgagcgcccttttacaaaacatgaatacctaccatttattcaggggctgaaggagtttgcaccgggccgcatctccaaacgctacgccatttattccgatcttgaagccgactggctggtgccacacaattttgttctgttactaaaccaagtttcagaagtcgatttcgagatcaacgaggcatttggtgatacctggctgcctgagtgtttgattacgcttgcggatgcgccaccaatgaaagttattcgtcctctgcaggtacttactcgggcccttgatttcaaacaaaatctgaccgagaaaagcaattctcagctgaagtggcatactcactttgccacaaatgctcaggccgaaacgatggcgattcccgcaggtccatggagcacagtgttgcagtccgccacgttctatacccatcagcatatgacaccacttgagctaacgcgttataccacagccgctagtgcttcgctgcgcagtaaaagcaaacaacaggcttgggttaatttcagatgggttgagaatggtcagccggttgcggtgggtactcgtcagtgggtggatggtctgaagctgagcttcaccctgccttccacgctacatcagcaggtcatgaacgacgccaaattagccagttcgctcaggacgctctatttccatcaccgcattagcagtgaggcgcgtttcgaacatgacagcttcactgcagactggatctacgagtgctatctggcggcactgactaaagagatcgtcagccacaataccgtcgccgatgcaattcatgccctgcgcacgccggacggtagagagtcgctggcaaccattgccgattcactattccaggctgaaaatatctttgaaaacgacgatgatggtaacggtattgcagaacgtcaagagttacagcagcagttgagaagcctgttcaatgagccgcagcttctcgcgatgcttgatacgcatagtgctgtgtttactgaagatctcagccagagttattcattttgtcagtggcttcagaccttgttgatcaataccttctccggagccgtaaaacagaccggccatctactgctaccagatgtggacgacaaaggattgcttgttgacgccgtttttgatggcgagcacctcgatatctggctcacagaatcagagcctgggggctgtggaattatcacccgcctcgaagaagcgttccacagcgatccagtcgccctgctaaatctgtttatacgcagtttcgccgccagcgattacgagcaaatagatgatgatcttttcgaactactctctcgacttccttcaagcactacattacagaatgcgctgaacgatttgcgcatggcggaaagtcatcacgatcgccgaacagcgaacggacaactgcgtgctcagctgaaaaaacaaggatttgctctttctcacagctttatgtccgtgctacatacccgtattcttcgccctggcagccactcctctcacgatcggcgcttgctagagtatctgcgggaatggcaggcactagaggccaaagcgggttatgaagttagcctaaatatattcgcccatacccaagcaactcaggaactgcctgatgcgaacgtcaccaaaattttcgaccgtttttgccagattcagggcatgttatggcagcgtggcagtccccttcgtcagtcagtactcagctactacaatccctttgataatgggccgaaactgacagaaagattgctgctcagcactctcttccagcagcaagcaacacaagttgatgtgaccaatagcgactggcttcagcagatccatatagcaatctctcgcgaaggatttgctgaactgttgatccctcgggaaacccgttatcagatagtacagatcgtgtccacactacaactggagcctatcgattatttcggcctgcatctctatccacgaatgggagccgtagactatcggggtggtaacatcgtgttgcgaatcgaactagctgaagccctgcagtaaggaaagcaatgaatggaagagcaacgacaaatatttctccacggacctctcggacagcgacaacttagggaagtactgagcgcacagttctgtggactaatcctttatccagaactcatctggttgatctcgccctggataagtgattttgacatcattgataatcgcggcggccaatggagttttcttgacccatcgtggggtgccagaatgatcagtttccaggaattgcttgctacagcggcaaataacggctgtccactcaggattgtcactcgccctgatactcgtaacaaagtgttcgttgaacgactgctggcaaggctctctccggatcatgatgtgcaatacacataccatgagaacttgcatgctaaggatatgttaacaaagcacttcctcttgagaggttcgatgaactacacctggagtggtgcaaacctcaatgatgaacatttgctgttctccaccaataaaaccattatttctgacacactaattgagctcagtggacaatatacattcggagacagagatgactaatgttccctcctggcttcgagcctttttcggcgaaggcaatttgctcagcctcgaaaaattactgactgacggacctggtgcttatccagaagagcaaaaaaatgccctgctacctttggtggatagcgcacgagatggcgaatggcccattattctgccgtggtgtgaccgcaaaaactgggttttctttgcgatggcggaagatgagcgcactctgttagaactcagtaacgtcatcggagcccgactcggttctgctgatgtagaacctgaccgcaggatttacctgagtcccgcttctggtcccacgctcaccgtggaaaccatactgttggagcactgcccaacggggtttattcgtgttgaattgttggccgccaaacgtgatgataaactggcgaaaatgcgggtttttactgcactgacggaagtaattacgttatttcgccaacgtccatcgcttgttcgtacccgcaagcgcccgtttggtcgtatccttagcgatttcatgttggcaacgaatcaaaatgagatagcggccagtgacagctatctacaggaactacgtgacaacggtctgctgtctaaacgcaatttgctgttgctagaacttcaacaggctgggaaatggcagaaatgggactccctgctaaaccatccagatctccccgaactgatcagaggacgcattcctacttcactggttagaatgctgctcactgcttatcagaaccgctatttaggttatgatatgcagagctacgcgcagcaggccccctcagtattgcgccccgctttcctttctctacatccgctctttatgcaggttccgctgctgggatacgaagaggaagagcttaacatctggaaaacttgggcaatcggagtggcgctagccggtgaaccaaccctgctaagtgccctgccaaaagcgctgaaatccaactggctaaaagaattacagcagtgggccgaccttagaggaattaggtacgatatctcgacacaatctccagtctcattctctttgcctcctacatcgctagaatcactggcctcttatctacaaacatcgctgacggcaacaaccgacacgctgaattcatacgccgacacactccgcaacatagatatacaactgctagatcaagcaaagaaagttccactacttataacgctgattgaaagtatcgaacggcttactaccactcatatctccggctgggatagttggttctcacatctgtgcaatcccaacgctgatggaaatgcactgttgcagattgtcgctctggaaagcgaacattggtccacctcctccttccaagaatccacattcattcgcctactgtcacagaatattccgccacaggcatttcccaccctgcgtaatgctatgccggccttcattaactggctgaggaaaaaccaagtgcttttaatgagctcaacttggcttaaatggatggatgttctggcgatggaacaaagtgtcagtccggcagatattcaactggcgacgctagcaacggagcatttccttcaaggttctctcagtcggactgactatcaggaatttgttgcgacactgcaactcattattgaacgctgcggttcgcttaaaaatataacttcacttggcgagatgatcgaactgttcctggatgcaccagaacacgataaagaggttagaaacgctctgtggatgaatattcaagcttgtgctgttggtgtgtggccgcgtctagatcactcaacccgcacgatcatgcgtaatctggccatcgacgtattgggcaggggtgccgattctgcgtttccgccggaaccaccacgaagtgatgacagtgagtttgagacacttccgaatcttgcaggaaaacgcgtcgccatttataccttgactgaaggcgctgcgcgccgagcaagagggatgattgagacgttgttccagggaatcaaagtagatgtgaatcatgatcataccgcgacggacaagttagtcaatttggcaaaacaggcggattactttatttttgctgcctcaagcgcgaaacatcaagctctgtatgcggtaacaccgtatcgacgcgatcttatttaccctgaaggtaaaggagcgggttcaattctgaatgcattcatcgcccgtgttcaacatgccatgaatattacaggataaattccctcaggcattacgacttggttcatgagctcatagacaaaaataaggggctttcgcccctttttcaaatggttgcgttcgccgctttgatataatttgtgaccagataattagtaaccagcgatatatctttcgacaggttctgaacttcattccacttacggacaataggctgaccatcaatatctgtgcctaaattccacacaccgctgctccatgcgcaaagcggtttgatacgatgtaactcttcgacaaaacgggaataggaagggatctcggtccatcctggttcccctttgtactcctgatgcacttgatcaatttcatccatcaggctaccgagagcaagaatccccacaccgtgtaacaagcgagagtaacgaggttttttatcccaatcgtcagtaaacacagtttctacagctgaccagaagttattcagcagcttcaccatcttcgcttcgtcgcccaaaccagtcgccgaatcgcggaagcgatacaacgccccctcacgtaggctagagtcgatcattttgatcattgagttgtcagcaatcactccgtccgggttggtcgcagtcttaattcgcccagccaatggcccctcaccaaagttaagacgctgtgtcagcagtgaagggaatttgcgcagttgcagatcggaaggcaagcggccatgcgtatgcggagccagttcgtacaacagcgttttaggcaacggtttggtggagttcaccagcataaactgttcgcgttgttcttctgcatcattggcgataaatgccgataccggcatcataaaagagttgatgtccgcttctcttaacgcagctgtacgttgctgtccatcaacgataaaccccggtttgtcgaagtttgcctcctcagaatacggaataacgagatgccccatatcactgttttccagcagcggttcaaagcgtacgcgctgatcgaaagcgataatgacggggttggggatcatcggattcgcgctttcaatatagcgctggatttccttaatatggctacgtacttccggacgctgataaccaaccaggttctcatctccgcgtcgaatgcgtgaaatcgcagcaattttgctgatttgtttgccttcaatggccaagctgtaaagctgtctcttctcaccctgacgaatacgcagggcggggacacgaaactcactcatgattaatcctctgagcgtaatgacaatgtgtgctgcaagcgactgtacagcacctgaatattgtggaatccgcgacggcgattacgctcggcgccacggaaaataatcacgttaatcccaatggatttgcagatattgcactggcacttccgccaaggttggtcggcaagcgtacgttcgtaatcggcacggatcttctccgcttctttttcacccgagtgtagacgttcataggccattacagcctccagaactttttctagcgacaacgcgtctttatcgtattcaaccaaggcatgcatcgcatctttttccagaagacgcgccacatcctggtcaataacgccagattttatcttacgactgagactagggttggcatcgaactgcggcacacgcacagctgtataagcccgtccctcaggcgtatggtagttattcttgcgatctttaaacgcctgctgaaggggggttgttgagtcgatactggtaacaccaagacgaatgaaatccgtaaagctctccggacgtgcaataccaagcagatgaacccgggtatcacttttgagaagtggtttaatctcttccaaggtttcaaggatctgcgccgttttcaggggcaccatcccccccatggtgatattcttataccccatagccagcagtgcttctactgattgtctgtaagatgccttgttccaaccgtgcgcaacgccaaagggcgtgaagcaactcttctgcgatttaactaaaaaatcctgcgccagagtcaaggtgatatcctggcgacgacgacattctgccagcacctcacctgagaaagattctcccggtttttcgtagccaaaaatgatatggtcaagtgataccccgtagttaaagcgggatgtttcatagaattcaataacgtcttcgacgcgatatggaggaacatcttgatttacataagtaaatgcaccacagtctcccattgtttgcatcgtctctggcaaacgaaagaaatgtttcattccattccggaagtaccgtaatcgttgtgctcgcgtatatttactttcaccgcgacctaagccatctacaaccgctttcgaaactagcattccatcataagggtgggggaaaacctcatgcggatagaggtcgtcacgctggcgaacacgatgttcattgcgcgtttctcgaaggaagtcgaaactaggatcgataaaatcctgactatccgggaaaaaatactttagcttcgacaacactgatctcctgtgacgccttttactgtcaaaaaacgtgagattttagcatagtcttattgctgcgacattatcgattagtcaacaaaactgcctggtacagcgttcgaaaccgcttctcttcaaaactattgccttgatcacgaaatgaccgaagtgcccgggaagcacttccatctggatttgcatgtatatacgaagaaatccaaatagttacctcttctggtctcctgcgcaccccgcgaacagtatgctttttaggcagtactgaaaatgttgaacgaagacgctcagcaagcaaccctaaatggccatcatccatactcataaactgttcaattacatactgagctattttaatatttaacataagcatattactgttaaaaaactcagcgattgatttattgcttaccaataggttttttttcaaagaaaatttagcctgcgaagaagatataatgattaactgtctatcgacatcctttaagtaagagatgcctttcattaaatccatgtttattgcgtttatataatcaggtgatgcacagataataaaatactcatcggacttatccatcattaagtcagataaggatacaggatgagatttttttaatggggatgcttcatttaattttccccaccattcttgatgaaaggatttctttccatatttatcggaaaaaagaggtatggaatctttatgtcctgtagcaaatgtcgcttgataaggaactatagcatccccatgtttcaacagtccaaaaccagctgaaagaacccataattcaatgggttgagcgtcatatattgacattgccgttgaccaatgcccccccttatataacttttctacaggaacaactaacttcgtcgatagagccgaatttacggcctcaccccaggcatgaatcaaacctttcggcgttttatatttttcagaaaagatggcaagattcagtactgaatgaccgttattatgcttgctattagtgcaacttgtaatcagatttagtcggctcacaatattaccctcaagaatccccccgcaaagctaccgtatgtaggggttcgttgcaagcctaattaggtaaaaaacttttatcgtaacctatcacgaattcaattaatgtggagaatactcataataaacatcttcatccctatcacacggggcattacgtttgataactccctgggattctaaatattcgcaaaattcttgacaatcttttaacaaacatccacctgctttggcctttttattagaaatcaaagccctggcaagagtatcataactaaacccccccgttgagtgggtgatcatatccatagcagcatgtgtatcaaatgacatcatcgatgactctccctcggttttatatccaatgaaggtataattaagtcatcatagttttgcaagaacaaggcaccaaatactactttatacaactttcgcttcgatcccatccaaactacacggctatcaggttttcagaagttgcatagaaatcaagacacaaaaaaagccacccttaggtagctaattattgcatcacttggtgccgaaggccggactcgaaccggcacgtatttctacggttgattttgaatcaactgcgtctaccgatttcgccacttcggcactgaaggggatgcggaaacgttctggattatacctgtcggcggcggtcatgcaagcgacagcgtgtcgtcattgcgctaagtgttgaaaaaaacagcgctatcctgcgcggcgtcaccttttgccgctattccagggcgccccatcaccaccgcccctcccgcaaacccaaccccacctgccagccgttcccccttcccgctcaataacacccaaactccattcaaatttatctcaaatttttctcacgctatgctcacccgaattactcaacccaacccaacgttccccacccatccccaatatccactccccaactattccccccaccccacccaccaccattcccatatattccagaaagttttagccaatgcctttttgttatccatccgctccgcggcaaaacattaatttcatcaatatttttataactttacattaatgaaaagttttctttttgccgtttattccaggattttcctcaggcgtgaagggttccggtaaacactatttttactagtcgctgtacgagtcttgatggacatattcactcgatgaattaactcaggagaatacttgtgacgacgttaaaacctttgctggcccgcaaccgcagctgggcgctgcagaaatgtcagcatgacccggactatttcgaaaaatggatcgacgggcagcggccccactcgctgtggatcggctgctccgacagccgcgtgcccgccgaggtgctcaccggcagccagcccggcgagctctttgtccaccgtaatatcgccaacatgctcgatcccgccgacgacaacgtcatgagcgtcctgcagtatgccctccactaccttgaggtggagcgggtggtgctctgcggccactacggctgcggcggcgtgcaggcggcgctctctctgcccaccctgccgctggcgcaggagtcctcggcgctggctcgccgcatcggccagctgcgccacaccctgcatcacgaaattgcgcagatcgccgatgactgttgtattgcggcctcccccggcgccagcaccagcgccagcgccaacgcggagcgttctcgccatgcgctggacgccctggtggaagccaacgttcgcgcccagttcgcccgtctgctggagagtgaaccggtgcagacggtgctcgccagcgggcgaccgctcagcctgcacggctgcgtctacgatctggcttccggccatttaaccaccctcgtcgaacacctctcaccgcaggagcacgccccatgaacacgcttcgtcaggactctctcgccggcatcgtcgtcttccttgtcgccctgccgctgtgcctcggcatcgcccaggccagcggcttaccgcccttcgtcgggctgctgactggcatcatcggcggcctggtcgtcaccgccctcagcccctcccgcttcgccgtcagcggccccgccgccggactggtcaccatcgtcgtcgccgccattgaatccctgggttccttctccctcttcctgatggcgctgttgctggccggcgcgctgcagctgctgttcggcatcctgcgggccgggcgctttatctcgctggttcccgccagcgtcatcaaaggcatgctggcggcgatcggcatcctgctgattatgcagcagatccccgtcgcgctcggcagcgcagaagagaccgggctcgttgatatcgtgaagggtaacgccaccttctccctcagtgctatcgccgtcgccgcgggcggcctgctggtgctctggctgtggggttcgccgcttatccgccgggtgaagagcctacgctggatccccggcccgctgatcgctgtcctgctcggttgtgtcaccatcgtattaatgacccaggccgcgccgcagcagcttgccactctgccacgcatcaccctgccggcgttcggcagcctcggcgatctgctgggcgagctggaatctccggcgtggagcgcgtggcgcaatccgtcggtgtgggtggtggcggtaaccctggcgctggtcgccagcctcgaaaccttgctcagccaggaggcgctgaaaaagctgcgtccgcaaaatccgccgccttcgccgaaccgcgaaatggtcgcccagggcgtcggcaatctgctctccggcgtgctgggggcgatgccgatcaccgcggtgatcgtccgcagctcggtgaacgtcagcaatggcgcgcagagcaagctgtcgatctttatccacggcgtcctgctgttaatctgcggcctgtggttcagcggcctgctgaccttaatcccgctcgccagcctcgccgccgtgctgctgtataccggctataagctggcgacgccgcggctgttcatcgagcagttccgccagggtgcggcgcagtacgttccgttcctcgccaccatcggcgggattatcgcctgcggcatgctggcggggatcgggattggtcttgccacccagatggcgttcagcctctggcgcagccatcgccactcgctgcagctggcgcgctacgatgaccactacgtgctgcgcatccagcagaatctgacctttatgcacaatccgcatctgctggccctgctggcgaagattccggaaaagagcgtggtgatcgtcgagcacgacagcgtcggctatctcgacccggacgtgcgggcggtgctggatgattttgccgagaacgccccgcagcgcggcatccgccttaatcagtggccgctggccagccgctgaccttaacgggcggctggtccgcccgcttcgcgacccctccgattgccaagcgccggggaataccatgctctacactttctgggttatcacgccaaccccaaggaaatgaacatgagcatcattaaaagctacgccgccaaagaagcgggcgccgatctgtcactgtgggaatacgatgccggcgagctgcagccggaagatgtcgaagttgaagtggaatactgcgggatctgccattcggacctgtcgatgatcgacaacgaatgggggatgtcgagctacccgctggtggccggtcacgaggtgattggccgggtggcggcgctgggcagcgcggctcaggataaagggctgaagattggccagaaggtcggcatcggctggacggcgcgcagctgcggccattgcgacgcctgcatcagcggcaaccagatcaactgtctggaaggctcggtgccgaccattctcaaccgcggcggcttcgccaataagctgcgcgccgactggcagtgggtgatccccctgccggagagcatcgatctggcgtccgccggcccgatgctgtgcggcggcatcaccgtctttaaaccgctgctgacccaccacgtcaccgccaccagccgcgtcggggtgatcggcatcggcggcctcggccatatcgccattaagctgctgcgggcgatgggcgcggaagtgaccgccttcagctccaacccggccaaagagcaggaagtgctggcgatgggcgccgatcgcgtggtcaacagccgcgatccggaagccttaaaagcgctggccggtcagttcgacctgatcatcaacaccgtggcggtggacctcgactggcagccgtacttcgaagccctggcttacggcggcaacttccataccgtcggcgcggtgatgaggccgttcccggtgccggcctttaccctgatcggcggcgaccgcagcatctccggctcggcgaccggtaatccgtccgaactgcgcacgctgatgaagtttgccgggcgcagcaaagtggctccgaccaccgagctgttcccgatgtcgcaaattaacgaagcgctgaagcacgttcgcgaaggcaaagcccgctaccgcgcggtgctgaaagccgacttctgatgattctctcccgccgggcggcccgctcgcccggcgttttccccgtcgcttcatcaaaccgtcatctccccgccatgcctctgtagtcattgcttcccacaatccgggcttcgataaatggctgaacgagatgcgcgtcaccatgagaaagacctggcttccctggctgatcctgtcgccttccctgctgtttttactgctgtttacctggttcccgctggggcgttcggtgtatgacaacctgtttgatacccgcatggccagcgacggcgcgcagtacgtcgggctggataactttgcccgcctgtttgccgataacgtcttctggcagtcgctgggcaataacctgctctatatcctgctgacggtagtgcccggggtgaccctcgccctgctgctggcggtcgccctcagcgagaaccatcgcgtcaaccgctggctgcgcaccgcctttttcttcccgatgattatcccgatggtcagcgccgccgcgctgtggctgtttatctttatgcccggcctcggcctgctcgaccactatctggcaaagctgttcgggccgatgaacaacaactggctggggcgcagcaacagcgcgctgctggccctggcgctgatcggcgtgtggaagttcgccggctactacatgctgtttttcctcgccgggctgcagagcattccggcctcgacgcgggaagcggcgctgatggagggggctacccgcacgcaggtcttttttaaggtcacgctaccgctgctgcgcccgaccctgagctttgtgatcaccaccgcgctgatctactccatcacccagatcgaccacgtggcggtgatgacccgcggcgggccggacaacgccaccaccgtgctgctctattacatccagaatctcgcctgggatacccacgacctcggcaaagcctccgccgccaccttcctcaccctggccgggctgttcgccttctcgctgattaacctgaaactgctggagaaaggagcccactatgagcgctgaaatctcgccgctgctggtccgcacgcccgccgccgcccgtccactatggttgcgcctgcgccgctcgtcgccctttacgcttacagtattaatgtgctgcctggcgctgctgtggatcagcccgtttatctggatgctggccacctcgttcagcgccaccaccttcggggaagatatggcgtcgctgctgccgcgcctgccgctgaccctcgataacttccgcgacgcctggcagagcgccgactggctgagcctgtacgccaacaccattatcttcaccttcggcaccttcttcgtgcagctgtttaccatcaccaccgccggctacgtcttcgcctgccacgagtttcgcggcaagcagacgctgtttctcctgttcctggtgcagctgatgatcatgccggtggtgatgatggtgccgaacatgctgaccctgaaaaccttcggcctgctcaacaccctcaccggggtgatgatgccctacttcacctcggcgttcggcgtgttcctgatgcgtcaggcgttcctcgccatcccgaaagagctggaggaggcggcgctgatggagggctgccgctggtggcaggtgctgttccgcgtgctgctgccgatgtcctggccgtcggtgctggccttcgccaccgtcagcattacctaccactggaacgagtacctgtggccgctgatgatgctcaacgatcccgataagcaggtgctgaccgtcgggctggtctccttcgccatgggcgccgaatccggcggccagtggggcaccatcggcgccgggacgctgatggtctgtctgccgctgatgctggcgttcatcctttttcagaaacagttcctgcggagcttcggcttctccgggatcaaataaggagtgattcatgctgttagcgcacatttccgatacccatttccgcagccgcggcgagaagctgtacggctttatcgacgtcaatgccgccaacgccgacgtggtctcccagcttaacgcgctgcgcgagcgcccggacgcggtggtggtgagcggggatatcgtcaactgcggccgcccggaggagtatcaggtggcccgccagatcctcggcagcctgaactatccgctgtatctgatccccggcaaccacgacgacaaagcccattttctggagcatcttcacccgctgtgcccgcagctgggcaacgatccgcaaaatatgcgctatgtggtggatgacttcgccacccgcctgctgtttatcgactccagtcatgccggcacgtcaaaaggctggctgaccgacgagaccatcagctggctggaggcgcaactgttcgagggcggcgacaaaccggcaacgatctttatgcaccacccgccgctgccgctgggcaatgcgcagatggacccgatcgcctgcgaaaacggccaccgtctgctggcgctggtggagcgtttcccgtcgctgacgcgcatcttctgcggccacaaccacagcctgaccatgacccagtatcgccaggcgctgatctccaccattcccggcaccgttcatcaggtgccgtactgccacgaagacacccggccctattacgacctctctccggcctcgtgcctgatgccccgtcaggtcggtgagcagtgggtgagctaccagcactcgctggcccactacgccgggccgtggctgtacgacgataacatcagttgcccaacggaagagcgctaaccgccatgctcagtctgcaaaacatcagtaaacgtttcgacggcaaaccggcgctcagcgccctgtcgctggatattcacgaaggtgaattcgtggtgctggtcggcccgtcgggctgcgggaaaagcaccctgctgcgcctgctcgcagggctggaaccggtcagcgaaggccaaatctggctgcataatgagaacatcaccgccgccacgccgcgcgagcgcaacttcgcgatgatcttccagaactatgccctgttcccccatctgtcggtgcgcgacaacatcaccttcggcatgaaggtgcgcaaggaagagaaaagcagctggcagccgcgggtggataaagtggcgcagatgctgcagctggaggcgctgcttgaccgcaaaccggcgaagctctccggcggccagcgccaacgggtggcgatggcccgggcgattgtgcgcaatccgcggctgttcctgatggacgagccgctctccaacctcgacgcccgcctgcgcagcgaagtgcgcgacagcattatggcgctccaccagcagctgaaaaccagcaccatctatgtgacccacgatcagaccgaggcgatgtcgatggccgaccgcatcgtggtgatgaacggcggccacgtgcagcaggtaggacggccagaatatctgtatgccaacccggccaatctgttcgtggccggatttatcggttcgccggcgatgaacctgctatcgctcccctgcgttgacggcaacgttcagcttggcgaacaacgccatccgctgccgccgcgccaccgggatcagacccgcgtctggctgggcgttcgcccggaacatattaccgaccgcgtggaagagggccctctgcgcctgccggccaccgttctgcaacgagaactgatgggggccgattacctgctccacgtcaacaccccgatcggcaccctgcgctttagccgccgccaccgcggcacggtgccggagaaaggcgagtcgctaccgatcggcttttcgcctgccgatgtgcatctttttcatgctgagacccagcataatttagcgccggtacatcaggcgtaattgttgcagtcagtttggacgcggacagcgcggaagaaccggagcgtacacgtagtacgtgaggattctgagcactgcccagggccaaactggcaaataaaatagcctgtggacaggtgcttactgatggagacagatcatgtttaaacccctcacgctagtcgcggttgggctcagcctcgccctgagcggcgcggcgctggcgaaagagaaaatagacttcatgttcccggcgccggtggacggcaagctgaccatggagatgacccgcgtcattaagcaattcaacgactcgcagcaggatgttgaagtgcgcgggatcttcaccggcaactacgacaccaccaagatcaaagccgaatcggcgcagaaggccggccagccgccggcgctggtgatcatgtccgccaacttcaccaccgatctggcgctgaaggatgcgatcctgccgatggatgagctgtttaaatatggcgatcaaaaggccggcgattttctgcaaaaggaattctggcccgcgatgcataagaacgcccaggtgatgggcaccacctatgcgatcccgttccataactcgacgccgatcctctactacaacaagacgatgttcgatcgggccgggatcaaacagccgccgcagacctgggccgagctgctggccgatgccaaaaagctgaccgacgagagcacaggccagtgggggatcatgctgccgtcgaccaacgacgactacggcggctggatcttctcggcgctggtgcgcgccaacggcgggaaatactttaacgaagactatccgggcgaggtctattacaactcgccgaccgccatcggcgccctgcgcttctggcaggatctgatctacaaggacaaggtgatgccgtccggggggctgaactcgaagcagatcagcgccgcgttcttctccggcaagctcgggatggcgatgctcagcaccggcgcgctgggctttatgcgcgagaacagcaaagattttgagcttggggtggcgatgctgccggccaaagagcagcgcgcggtgccgatcggcggcgccagcctggtgagctttaaaggcatcaacgaggcgcagaagaaagcggcgtatcagttcctgacctatctggtgagccccgaggtgaacggcgcgtggagccgcttcaccggctacttctcgccgcgcaaggcgtcatacgatacgccggagatgaaggcctatctgcagcaggatccgcgggcggcgatcgcccttgagcagctgaagtacgcccatccgtggtactccacctgggagaccgtggcggtgcgtaaggcgatggagaaccagctggcggcggtggtcaatgatgccaaagtgacgccggaagcggcggtgcaggcggcgcagaaggaagccgacgcgctgatgaaaccgtatgtggataagaccgcgctggcggaagtgaagtgacgctttacccgtcatcctcaccctcaccctggccctctccctgagggagagggaactgtccggcgctgtggttaagccctgagtccggttgtgaaaggaaaaaagcaggccatacccggtatggcctgaaaatgtcacaacgattagatccctgccgtttcgcgaatatatttgcgcgctttgacggcgtattcgaaaggattggccagagcaggatcctgctcggcttccactaccatccagcctttatagccaaagtcgtccagcagcttgaacaccggacggaaatcgatcaccccgtcgcccgggacggtgaaggtgccttttttcacgccgtcgaggaacgacaggccgtcgcggcgcacctggtcaatcaccggcgggcggacgtctttcaggtgaacgtggttgatgcgcggcagatactttttgaggatcgccagcatcggcgcttcgccgccttcggaataccaggcatgtccggtgtcgaacagcaggaagacgcgctcgtccaccagcgacataaatttgtcgatttccgcggtggtctgaatgccggtgcccatgtggtgatgcagacagacctgcattcccttctccgccgccaggcggccgagggtgttgtagccttccgccacccgctgccactcttcgtcgctgaagcacggcttcgcatcgccgaggatcggtttatccagcccctggatgctgccgctctgctcggagcagccaatcactttcgcgcccatcgcatgaaggaagttcatgtgattgacgaattcatcaatggttttttcccgctggccgttggcgaaaaaggtgctgaaccaggcgttgcagatctgaatgccgcggatatccagcatcggcttgagaaccgccgggtcgcgcggatatttgctgccgacttcgctgccggtaaagccggccagcgccatttcgctgacgatctgctggaaggtgttttcgctgccgagctccggcatatcatcgttagtccagccgattggggcgatagccagtttgacgttatctttgttcatagtagggctcctgccgctgcgccttagcggcgcagcaattcacgttcaataagttcacgggtttccactgcctggtatttcattttttccgggtagccaaacagcgaggtggcgacaatcggctccccgccgaccttgaaggtctgctcggcgaatttcatttcgcgcagagtgcggaacagcgcgtcgaaatccacatccccttccccgacgcctacgtgctggtgcaccacggcatccacgcccggcgggttaacgatatagcggcaatgtttcgtatgattgcgggtgtccgcaatcaggacatgggagagatcgctcccggcatagcgcagcatgctcgccacgtcgccgacgcctttgtcgtagaaaaaggtgtgcggcacgctgtagacgtacttcacgttatcgctgcggaacgacttcacgatatcgacggtttcattgttctcttcgcagaaatcccagggatgcgcctggatctccacgcggatgccttcccgctcaaaaatcggcaacagctcttccattgagcgatagaacatttcatcgcagatctcaggctgattcggatcgccggagaactcggtgttgatcacctgaacgcccatctccaccgcaatttccaccagccgtttccagtttttcaccgccgcctgacggcgcagttcgtccgggccggaccagcggtagacgcagataaacgacgacagctcaaggccggtatcgcgcagcgcctgcttgtactccgccatgatctcccggctggcgcgcgggtgcttgtagaacgggttaatctgcgggtgcggcgactgttcaatgtacttgtagccccactccgctacctgatggaccatgcgggtgatcccgaggtccttaatcacatccacatcaaaggcaattttcatcgtcgttacctgtgcaaagaagttccgtcagcaaaacgcgcttaacgtttgtagaatgccgggcactcaggcagcgtcacttcaaccggctcgctggttccctgcgctttaatgcaggcgtccgccgccaccgacgccgcgtagccgtcccaggccgacgggccgtgcagctggccggctttgacgtcgttgataaaggcctgcagctcgacgtcgtaggctttgataaagcggtctttccagtcggtgagaatggcggtcgacaggctggcggacttgcgcatctggacggccgacggctccggcagacgggcaatcccggtttcgccgaccacttcgcactggatgtcatacccgtactggcagttcacgaacacttcgacgtcgatcagggtgccttttttggtttcaaaggagacgatctgcggatctttcaggcgcgcatgggtgtgcgaggtggagcgcgggaagcgcacctgcacggaacggtagtcatcgttcagcagccagcgcagcacgtccagctcgtggatcagggtgttggtgatcgccatatcggtggtgtagttctcgccgaccgactggttgcggtgggcgcagcgcagcatcagcggcgcgccgatatcgccatcgtcgatcacttttttcagcgccagatagccttcgtcgtacgggcgcataaagccaacctgcaccagacgacggccggccttcatttcggcatcgacgatgcggcggcagccttccgcggtcatcgccagcggtttttcgcagaataccggcttaccggcggcgatggcggccagagtgtactcttcgtgggtcgggtcccaggaggtgaccaggatggcatcgacatcgctggcgttaatcacgtcgtggccgtcggcgtagacttccgcctgcacgcccggcagcgcgaccgccgcgcgggcgttgtcggcattgatatcagacaccgccacaacggtggcgccctgcagaacctgggtgcagcgacggatgtgttctctaccgatagcgccagcgccgatgacacctaatttgagcgacataatggttttctccgtaagtctgtaggattcagggtagaggttcgttttagtaatcacgcgcctgggcgcgcttttcattaatcatttgcgccaccttgcggatccgctcagagagcgccgtctgggcgaccccaacgttccaccagctgccgtatttgtgcaccatggtcttcggtagtactttaatatcaatcagggtgctgaccgtttcgcgacgggcggcgtccagcgcatggcgcagttcgtccagagtagtgacgcgccaggttttgcagccgtagccggcggcgatggtggcgaagtccaccggcaccaggccgccctgcagctggccggtttccggctgacggtagcggaactcggtgccgaagctgtccatcccgtgctccatctgcaggttgttgatgcagccgttggccatgttgtcgaacagcacgacgttgatcttcgcccgttcctgcagggaggtgaccagctcagagtgcagcatcatgaaggagccatcgccgaccagggagtagacttcgctctgcggctgcgccagcttcacgcccagcgcggcgttgacttcgtatcccatgcaggagtagccgtactccacgtggtaggtgttttccgcgcggttgcgccagacgcgctgcagatcgcctggcagactgcccgccgccgcgacgatcaccgcctcggccggcagcgtttcattcagtaccccaagaacgctgctctgggtcagggtggagtcggtgatctggcggaactcgcgatacaccgattcgcgatcgagatgatcgtcgatctccggcacaaaggatttctcctgccacaccgcctggtagacgcgctgggtctcttttaactgacggctctgcacgctctcgatctgcgcgccccagccggcctgccagccgctgtccgccagcgccgcgtcgagagcggtcatcgcttcccgggcgtccgccagcatggcaatgccgtccagcttccaggcgtcgaagttgctgacgttaatattcaggaaacgcacctccgggtgctggaaaatccatttcgaggcggtggtaaaatcgctgaagcgggtgccgacgccgatcaccaggtcggcctctttcgccagcaggttcgccgccaggcagcccgtctcgccgacgccgccgacgttcagggggtgagacgagaccaccgtccccttcccggcctgggtttcggcgaagggcaccccgtagcgctcggcgaaacgggacagcgcttcgcccgcgccggagtatttcaccccgccgccgcagacgatcagcggtttacggctggctttgatggccgccacggcgtccgccagctgcgcggcgctggccgggcggcggtcgagacggtgcacgcggcgcgcaaagaaggattccgggtaatcccaggcttcgccctgcacgtcctgcggcaggcacagcgttaccgcgccggtttccgcagggtcgatcaggacgcgcatggcgttgatgcaggcgctcatcagctgttccgggcgggtaatacggtcccagtatttgctgactgcgcggaaggcgtcattggtgctgatgctgagatcgtagctctgttcaatctgctggagcaccggatccggctggcgggtggcgaagacatcgcccggcagcagcagcagcgggatgcggttggcgctggcggtgcgggcggcggtgatcatgttggccgctcccggaccgatggaggaggtgcaggcgataatctgccggcgcagggcctggcgggcaaaaccggtggccgcgtgggccatcccctgctcgttgcgcccctgatagacgcgcatatcgccgctgtcctgctccagcgcctgccccagccccaggacgttgccatggccgaaaatcgcgaaaatgcctttcacgaacttcagctctacgccatccacttccaggtactggttatcgaggaacttcaccagcgcctgcgccgttgtcagtctcagtttgcccatgatgcacaatccttattgttcagtatttgtgtgtggcgtcgcgccgatgccgccggggccgtcgttcacgtcactggaatacctgtggattataggcaaacatttttttcattaaatacaaatacagaagaaatatttcattttgcgagaaggatcaaactctctacccatttcatacgtttcacttacattccagacacgttttcggggccttttttgccgcaccagacggcaatatccccttaaaaatcataggtaaatggatgccatttggcgtttcattttcccccgggtcgacagagggggcgatccgcgctcgcgcgaggctcagtgcggcagagtggtagatccctcacacttttggttttttaatttcgaacgagtttgcaaatgaaatatttatttctcaaactaagggtaaccaataaccctcaggctgttcacggagtcgacgtcgggatcccgacccttccaggcagcagacaccaaaaaggaaatcctagctatgaatgcagcagtaaagcggctcgacgtcatctgtataggtcgggtggccgtcgacctctatgcccagcagattggttcgcggctagaagacgttgccagtttcgcgaaatatctcggcggctcctccggcaacgtggcctttggcaccgcgattcaggggctgaaatcggccatgctggcgcgcgttggcgatgaacacaacggccgtttcctgcgcgaaacgctcaaccgcgccggggtggataccgagtatctgattaccgacaaatctcgcctgaccgcgctggtgatgctggggattaaggatcaggagaccttccccctgattttctaccgcgataactgcgccgatatggccttaacgcctgacgacattagcgaggagtatattgcctcctcccgggcgctggcggtgactggcacccacctgtcgcacgccaacacccgcgccgcggtgctgaaggcgctggagtacgcccgccgtcacggcctgcgtaccgcgctggatattgattaccgtccggtgctgtgggggctcacctcgctcggcgatggcgaaacccgtttcattgagtccggaccggtcaccagccagctgcaggaagtgctgcatctgttcgatttggtggtgggaaccgaagaagagtttcatattgccgggggcagcaccgataccctgaccgcgctgaaaaatgtgcgcaatgccaccaaagccaccctcgtctgcaagcgcgggccgatgggctgcgtggtgctggaaggcgacatcccggacagctgggaccaggtgccgctgcagcagggcgtgcgcgtggaggttctcaacgtgctgggcgccggagatgcctttatgtcgggtctgctgcgcggctggctcaacgacgaaggctgggagcaggcttgccgttacgccaacgcctgcggggcgctggtggtctcccgccacggctgcgcgccggcgatgccgaccaaagtcgaacttgatgactacctgcagcgcgccgaatcggtgccgcgcccggacgtcgacgagcgcctcaaccacctgcaccgggtcaccagccgccgtcaacagtggccggagctgtgcattttcgccttcgaccatcgcaaacagctggccgatctggcgcgggagaccgggcgcgacgaagcctgcattccgcagctcaaactgctgttgttggccgcggccgaagcggcggcgcaggaggcaggtctcgatcagcgcagcggcattctggccgacggcacctacggccagcgtgcgctcaacgccattaccggcaagggctggtggatcgggcgccctatcgaactgcccagctcgcgaccgctgcgtctggagcatggcaacatcggctcgcagctgatcgactggccgctggagcatgtcgtcaaatgcctggtcttctatcacccggacgacccggcggcgctgcgtgcagagcaggacgccctgctgctcgaggtctggcaggcctgtaacaagtcaggccatgaactgctgttggaggtgatcctgccggaaaatggcccggacaaagacgagcgccattaccacactatgctggaacacttctatcagctggggatcaagccggactggtggaagctgccgccgctctccagcgccagctggcagcagatcaccgcgcttatcgagcgtgaagatccgtggagccgagggatcctgatcctcgggcttgacgcgccttccgacaaactgcgcgccggtttcgccgaggcggccgcacacccgatgatcaaaggtttcgccgtcgggcgcaccatctttggccagccgtcgcggcgctggatgcagggtgagctcagcgatgaggccctgatagaagaagtgaaacgcaactacctgacgctcattggctactggcgcgaagcccgccgctgatcccccgacgcccgtctccgtcaccttgcggagcgggcgtttttctgtttcttcgtgaaatgaatcgcgtatttcgtcgcaataaatgaaaaattcgcttcatttggtacactggaagccatattccttccattttctcagagcgcactctatggccaataacccaacacagctgaccatcctgcaggatgaaatcaggcgtcgctacgatacgttaagcaaacgcctgaaacaggtcgcccgctatatccttgataacagcaatagcgtggctttcgataccgtggcctccattgcgcaacaggcggatgttcccccttccacgttgattcgttttgccaacgccttcggcttcagcggctttaacgaaatgaaacagatgttcaagcaacatttgatggaagagaccgccaactataccgagcgcgcccgtctgttccgccagaccaccagcgatgagtccagcccgccggaaacgccgacggaaatcctcaatatgttcacgatggtgaacaaccaggcgttgcagcagctggcgatgcagacctccagcgatgatctggagcgcgcggtggccctgctgggcgcggcggaaaatatttacgtcattggtctgcgccggtcgtttagcgtcgcctcctatctgacctatgcgctgcgtcacctcgatcgcaaagcctttctgatcgacggcctcggcggcatgttcaccgagcagctgagcctggtcggtccgaaagacgtggtagtggcggtgagcttctcgccgtacgcccgggaagtggtcgagctggtggagctgggcgcgcagcgcaaagcgcggcagatcgccattaccgacagccaggtcagcccgctggcggccttcagcgatgtctgctttgtggtgcgtgaagcgcaggtggatggcttccgttcgcaggttgcttccctgtgtctggcccagacgctggcggtttcgctggcgctgaacagcagccaggagtccgaggccaagcagaaggcgtgagataggctgcctggcgtttgttactcggcggcgcagtataggcctgcgggaggatcccgtaggccggataaggcatttgtgccgccatccggcacaaaaatggctacggtatctgcggtgtcctgcccggcggcgctgcgcttgccgggcctggtgtatagggacttacgggaggatcccgtaggccggataaggcgaagccgccatccggcacaaaggcgggtatggcgccggaggtgtcctgcccggcggcgctacgcttgccgggcctggggtatatgcgcctgcggggtgccggatataatgttattggtatgcaactctattaatccgggtaaagcgtttgtcgcatgtgatttcagcgcacattgcgctcccggttaattgtctgcgttatgcctggcatggcgcagggagcgcacagggggcggccagtcgccgccgccccctgtacccccgggctccagccagcaaaatcgccgctacgcggtcccttcgacttatccctgcaggcttcgggtcgggccgaggcagcatccgtgcaaaacacggccttcagcccgcatccatgcgggctgccccggccttccgggaacgtctcagcgattttgaggccgtcagcaccggcagtttcagcaacaatggtgaataaattaacggcaggtcgcacgaaccgtatgccgggcaaggcgtgagccgccgcccggcataaaagcagcaccgtgcctgcggtcgcgctgcgcttgccgggcctacggtataggagcttacgggaggatgccgtaggccggataaggcgaagccgccatccggcacaaaggcgggtatagcgccggaggtgtcctgcccgacggcgctgcgcttgccgggcctggggtatatgggcttacgggaggctcccgtaagccggataaggcgaagccgccatccggcacaaaggcgggaatggcaccggtggtgtcctccccggcggcgctgcgcttgccgggcctggggtatagggacttacgggaggatcccgtaggccggataaggcgaagccgccatccggcacaaaggcgggtatggcaccggtggtgccctccccggcggcgctacgcttgccgggcctggggtataggggcttacgggaggctcccgtaggccggataagcgtagcgccatccggcataaaagcaggtatggcgccggtggtgtcctccccggcggcgctgcgcttgccgggcctggggtatatgcgcctgcggggtgccggagataatgttattggtatgcaactttattaatccgggtaaagcgtttgtcgcatgtgatttcagcgcacattgcgctcccggttaatcttctgcgttatgcctggcatggcgcagggagcgcacagggggcggccagtcgccgccgccccctgtccccccgggctccggccagcaaaatcgccgctacgcggtcccttcgacttatccctgcaggcttcgggtcgggccgaggcagcgtccgtgcaaaacacggccctcagcccgcatccatgcgggctgccccggccttccgggaacgtctcagcgattttgaggccgccagcaccggcagtttcagcaacaatggtgaataaattaacgacaagtcgcacggaccgtaggccgggtaagtcgcagccgccacccggcacaaaagcggctccgcacccgctgcccttgcccggcggcgctacgcttgcgcgggcctgcgaagggcgcgaattgagcgccaaatcaccgggtcgggtaaggcgtagctgccacccggcaaaaatacggcaccagagcgtagcccggataaggcgccatacgccgccatccgggtttttctctgctggcgctgtcatgccgctgacgcggctttcaaaagcttctcgatgttctaagtgtacgaatgctattccagaatttcatgtctgctgagtgccaaaagcggacgtggcttacatcaatgtattctggttgagcaggtgccagtcacaaatttttagcgccattgtataacttagtaaccacttcaataatttcagtcacgccctccgggtgagatgtcattcggggcgctgggatgtaaccatgaaatatacccacagcctgactagataaaatctaataaaaagcgatgaggtttcgttaactaatgaatcgcctgtgtgcgaaaggattaggctttaatcgtctttttttaagcctgcctgaaagtgttgatcacgataaattctgggggcgacgccataaacgcgcttgaaggcactactgaaggtactttctgaactgtagcccagcttaaaacaaatcagctttacagactcacgggtatatctcagggatttactcgcaagccgcatacgccagtttgtcagatacagaagaggcgtgagtcccgttacctccctgaatttttttgaaaagccagctcgtgacataccagatattgttgccagctcaagcaaactccagttgttttctggttcctgatgaattgcgctaagtaccttgtttatacgggcatcgctaaatttgtcgatgactacgcagccttcagatgacttttcgtatccacttctcagcacttcaatcatgatcaggtgcataaggtagtcacaggcctgaacagagcctggcttattagctaccttttccctaaagaacagcgacataagcgtgcacagcgcagaactgtcatcggtctgcgtattaaaatgaagaacaagcggcaggccgttaagcagaatatctgaagaagtaagatcaatttccatctttccagccagtaacaggttttcgtcacctccatagttgacggtctcgttaacgcgaggcctttttttctcagaggactcagctggcgggatgttaacgtccgtcgccattaaaaagcgggcatatcgggtcagcacgaggccttgcccctcactcagctgggtccattcaggttccgcttccagtctgaaccagaacatccctttttttataaaaatgaacttgagtccgttatatccgggaaaagacatagcccagtgattgccggcggaaagacctgcagtggcatagctgcgggcagacagcagattcaaaacatcagaaaagggatccattagactccagataaagttttttagactatacgttattaaaatgctaatcgagcccttgtaaaatagcaatgcttctggttgataaacggaaactatattggccgggaatttatctcatctttctggactgacaggacaatgctcatgaaatttactaccctcaataatggcgttcagatgcctatactcgggtttggcgtctatcagatgcaggacttgaaagaatgtcaggaagccgttcttggtgctcttcagacgggttatcgtcttattgatactgctgctgcttatgagaatgaaaccgccgttggcgcggccattcagcaaagcgggatcgcgcgagatgaattgtttatcactaccaaattatgggtacaggacgcgggttatgaaaaagcccgcagcgcgttcctgcgagcacttgatcgtcttaagctggattatctggatttataccttatccatcagccttactctgatgtacacggtgcatggcgcgccatggaagagttatatgatgaaggcctgatcaaggctatcggcgtgagtaattttgctccggaccgattgaccgatttggcaacgtttaatcgtattacgccagctgtcaatcagattgaaatgcaccctttcttgcagcagggacaaaacgttgagttcatgcagagtatgaacgtgcaggcacaatcctgggcatcatttgccgaaggaaaaaacaacctgttcagcaatccactgcttgcctcgatcgcacaggtttataataaaagcgtagcccaggttgttctgcgctggctgatccagcgtaatgttatcgttatacctaagtcagttaatctgccgcgcatccgtgagaactttaacgtatttgatttctcaatcagcgatgctgatatggagaaaatcagccagcttgataccggtaaaacgttgtttacagcacataccgatcctgagcgaattaaaaccgttggcacaaaaatctttaatacctgatttttaattctccgagaataagcgccttatcatgaaaaaaaaatttgatgcgtcaatcttgccattgatggcagcagctctgctgctgccatcggtcagcaacgcagcagatatctcccgctacgataaagcagcacggccccccattgtgctgacagacatgggtagcctgatgtttgcgggaaaaaccgatatggatgaggaaggtaatacttttcattacgatcatggttatgctcagtattttattcctcagagcagtcacagcctgcctgtagtgatgtggcatggtggaggtcaatcaggcaaatcatgggaaacaacgcctgatggacgtgacggtttctggcaaatgttcacccgtgcacactggccggtttttataattgaccagccgcgccgtgggagggcaggaagaacagagccgggctccgcagtatcagatattcccaccgaccataaagaatccatcgcatggaatacgttcagactgggtaaatggctcccgccacaaaaaccggtttttttcagcgactctcaatttcctcaaaacgagcgtgccattgagcaatttttaagatggcagaccccgaataccgggcctgagccctcaccggatattcaggaaaggcaatttatggcgaaatccatgactgctttgttgaaacaaacgggacctgccattctgatgactcattcactgagcggacagtatggatgggagactgcaatggagtctccgaagttggttcgaagcattattgctttcgagccaggggcgtttgcgtttccttcgaatgacctccctaaaaatgttaaaacctcactgtcatttgtaggaaaagcaacagccccgcaggttgtttcccctgagcgattcagagcattaacagccatccccgttatggtcatcattggggacaacgttgtacggtctgagagtgcgagttttggtgaggaactctggcgcgttaatgaaatacgtgcgcggcaattcgttgatactctcaaccgacatggtgggcaggctacgctctttattcttcccgagcatggaatacacgggaacactcattttgcgtttgcggataagaataatcagcagatagcagatattgtagagaatttcctccactccagaggcctggacagcacacaccagtatcattttcagcagaatttacagtgaaaatatcatacccatccgctccttctcaaactggccaatggagaaagttaaaatgcagcgtagagattttattaatgcaggtagcgcaatgctgggcgcaatagctttaggtatgtccgcaactgcaaacgcagataacgaaataaaagaatctaataatcccggattatcaggaagcagcaaaatggataacaggttcagcgttgaaaaagatgatgccgtttttatctttgctgatttacatcccggcctggtaagtacatgtaatacgatatctcccgagtctttgactgcaaatgtaggggggcttgcaaaatgtgcaaaagttgtttccgccccttcttactttctgacggttactcaaaatggtaaaccgggcgagctggtaccttcgctcagggagtatgccgatacgcacaacaccatttttcgtaaaatagccgatccattccaggtttctgagattactgacgccattaaacgttctggccgaaaaacccttatagtggctggctacactgctgaagtggctgtcttacttacaaccctgggtggaattcaggctggttacaatgtattcattccagtagactgcatcggtagccgctcttcgagaacagaagacgcagcgctcaggcaggctgagcaggctggaggtgtgattacttctttaagcactcttgcagcgcagtttgctccagatttttctcaggagcccggtaagactattctctctgtgattgcattaattaaagcctgacacctgttataaaacagagcagccttgggctgcttcgcatgaaatcaaactgcgagatttgcaatgtccgaagatcgctcatagcggacctacaactcagtcgctcgtccgatccgcgtcagcagcggacgttacgcatgaactctaatgatcaatgggtggggtagttcccctacttagcgcgttgttccactcatccagagtcacagtaaaaagcatgcttgcgggctcatttttcacgtcatgaatatttcgtgaaaaccggagacctgctttcgtcaggatcttttgggatgccagatggtttggtcttactaccgcagaaatctcagccagttttaaaacatcaaacccgtacccgaccgcatatttagcgaactctgtcgccagacctttcccccatgattctgtagagaaacgataccccaggttcattatcggtgtatcgtcataactgataatgctaagccctccaaaaccgataattctatcgggattctctttcagtgagatagcccagtttccgaacctataattctcccagtggttaagccagcgggccattacattacgtgcgtgactaatatcgggatacgggcctgctggattgaacgtatttgttgcagggtcgtcataaatcctgaagagatcatctatatctgatgcgtttacgcggcgaagataaagtcttgagcgatctggttgcaaagtaatctcctgatctacggtttataaagtggagtatattgctgatatatagatgttagatccagatttctcaacagggttgttatgctcgtgtgacaaaatattcaatcgcacacagtgacaggtagctcttcgctcaaagcatactttcatcccagccagattgccacgttgtgctgaagcgtaagtgacaacgccagagactttcaaatatcgttgctgtgttttgcacgaagctcacacccaaaccaaaaaaaagcccctgcgcgaaagcagtggcaagccatgtcagagctttttttattagttaaacaccatcccgccgtcgatcagcaatgactgaccggtcatataatcagaatccgggctggcaagataggagacgcaggcggcgacatcttccggctcggacaggcggccgagggtgatgcgtttggcgaactcggcggtaccgtagcccagcggtttaccggcggcttcggacacctggcggtcaatttcggcccacatcggcgttttgacaatccccgggcagtagccgttgaccgtgatgcccagcggcgcgaggtcgcgagcggcggtctgggttaagccgcgtacggcgaatttactcgagctatataccgccagctccgggttgccgacgtggccggcctgggaacaggcgttgatgattttcccgccgtgaccctctttcttaaaggcctcgaccgccgcctgaatgccccagatcacccctttaacgttgatattgtagactttatcgacaatctccggggtaatggactcgatcggcgtggatggcgccacgccggcgttgttgacgatgacgtcgaagccgcccagcgttttgcgcgactgttcgacggcggcaaatacctggtcgcggtcggagacatccactttcaccgccatggcgcggccgccggcctggttgatttcggaggcgaccgctttggcggtggcgtcgttataatcggcaatggccacggcaaatccatccttcaccagacgaagggcgatagctttaccaatcccctggccggcgccggtaacaagtgcgacttttttcattttcctttccttattgtgatgactcacagaatctgactcagatgcagctggcccatcagcagcgggttatcgcgataatccaccgggatggccactaccgccgggccgtcgacgtccatcgccgcgcgcagggtcggctccagcgcctcggcgctttccacggcaaaccctttcgcgccgaaggattcggcataggctttaaaatccatcggcccgaactcgacgccggacaggcgctggtattttttctcttcctggatagcgaccatgttgtagccgttatcgacccagatcaggtgcagcacgttggctttcaggcggacggcggtctccagctccatgctcgactgcaggaagcctccgtcgccggagacggagaccactttgcgctcaggattgaccagccaggcgccgatggcccagggcagggcgacgcccatggtctgctggccgttggagatcatcacctggcgggcgcggaagctgtacaggtagcgggcaatccagatatggaagctgcccatgtccacggtcagcgtgacgtcgctgttgacgatgtcctgcatggcgcgaacgatgcgcaggggatgcagggcaaactggttgagctgcgcgccgcggcggtccagcagctcgcgctggtgctggcggtcgcggaggatctccgccgcctgcggggagagcaccagccgatgatcgatattttgcgccagcttgttgagagtgccggcgatatcgcccaccagctcgacatccggggtatagttgcgctcttcataggcgggcagcacgtcgatgtgcaccagcgtcgcgttgccgctgttccacatcgccggttcgtattccaccgggctgtagccgatgcagatcaccaggtcggcgagctgcagcagacggtccccggcctggttgttaaacagcccaacccggccggcgaagcgagagaagttatcctgattcaccgctccggcggcctgataggtgctggtgactggaatatggctggtctccagcaaacggcgcagcgccttgctgttttccggctggctggccatcaggccgagcaggaagatcgggttcttcgcctgggcgataagcttcgccccctggtcgatggcatcatccggcgcggcgcccatctgcggggccccgctggccggcagcactttgccgctgaccgggccatcgaccacatcctgcggcaggctaacgaacgcgctgcccggccggccctgctcggccgcgcggaaggcgttggagaccacttccgccagcgcatccggcgccgtcacctcgacggcgtatttggtgaccgggctgaacatcgccaccgtatccatactctggtggacctgcttcgctttatcggcgcgttttaccgcgccgcccagggccaccaccgggtcgccttcgctgttcgcggtggccatgccggtgatcaggttagaacaacccggaccggaggtgaccagcgccacgcccgctttgccggtaatacgtccgacggcggcggccataaatgcggcgttggcttcgtggcgtaccggaataatgcgaatcgaggaatccagcagtgaatcgaagaccttgtcgattttggcgccggggatgccgaacacctggcgtaccccctgagcttccagctgactgacgacgagatcggcgccgtgcgcccactggcgtaccggatactgtttgtccatgtgacccccttaactttctacggaacggatggcggcatcgagattatcgggatgcagattagcctgcaggaacgcgctgtcggcgggcaggtcgatcatcagcttgtgaatttcgccgaaggtcagcaccccgtggtcgagctggtaatccagcaggtgaccgccgcctttgcggtcatcggtaataaaatgctcgtgatacccggcgacgttgatcccctgcatatgctgcggggtccggaagccgaccagcaccccttcgcgctggttaaagcggaacaccggctgatcgtcgaggacgtcggtcatcgcccggtacggcggtgtctggcgcggcacggtgcgggtatgggcatggcggaaatggccgtcgatgcgcagggcgcagaacaggttgtcagaggggatttgctggtcgatcaccgcgtgcagttgctggcggctcaccggatggtcaaaggttttccggtactgcggctggaaccaggtcatcaccgcgaacggcgttttctgctccggctgggctttgcgcgcgctgccgtcggcgcgcagctgatagacctgactgctgaaggcgatcagctccccgtccagctcattaaaggtgccgaggccgaaatcgccgtgtttcagcaggtccgcgatggtggtgctgccttcgtaaaccccgctcagcagggcgctcatgagcgatgtctgatagagcacgctctcgggatgctgcgcggaaaacgcccgcagggtttcgcataaactctcttcgcaggtgcattcagcagaatgattcatataccacttcctcgttcaacaaatataagaaaggttaaataaatgttgacccgattcagctcacagttccaatatagaaaccatgctggtttgagacgttttcgatatggaacttcgttatcttcgctattttgtcgccgtcgccaggacgcggcacttcacccaggccgccaaggagctgggtatttcacagcctccgttaagtcagcaaattcagcggcttgagcgcgaagtggggaccccgctgttccggcgtttaacccgcggggtggagctgacggaagcgggagagtctttctatgaggatgcccgccagatcctcgccatgagcgatgcggcgctggagaaggccaagggcattgcgcgcgggatgaacggcagcctgtcgctaggcattaccagttctgatgctttccatccgcaaatcttcacgctgctgcaccgttttcagctcgaccaccccggggtgaccctgcaccagatggaagacaatatggccaatctgatgaccgccctgagcgaggccgagctggatatcgccttcgtccgcctgccgtgcgagagcagtaaagcctttaatctgcggattatcgatgaggagccgatggttatcgcgctgccgcgcgataatccgctggcgacgcagccgaccctggccctggagcagctgcgcgacgtggcgccgatcctcttcccgcgggaggtggcccccgggctgtatgagctggtgtataacagttgcctgcgcgccgggatcgatatggagcgcgcctggcagtcgtcgcaaatttcatcgtcgctgagcatggtcaatgcaggcttcggcttcgcgctggttccgcagtcgatgacctgcatccagcagccgaacgtcagctatcacccgcttagcggggcgccgctgaagaccgatatcgccatcgcctggcggcgcttcgagcgctcgcgtacggtgaaacgctttctggcgatgttctgatcttcgcggcgccagcggcttactgcgccacccagccgccatccatgttccatgcggcgccgcgcacctgggcggcggcgtcgctgcacagaaacagcgccatttcgcccagctgttgcggggtgacaaactccccggagggctgtttttccgccagcagctgggcgctggcctgctccgggtcgaccccctcggcgatgcgcttatcgatctgctgctgcaccagcggggttagcacccagcccgggcagatggcgttgcaggtgatgccgctgcgcgcggtttccagggccacggttttggtcagcccgaccaccgcgtgcttggcggcgacgtaggccgatttctctttcgacgccaccaggccatgcactgaggcaatgttgatgatgcgcccccagttgcgctggcgcatacccggcagcgccaggcgggtggtgtggaagacgctggagagattgatggcgagaatatcgttccatttgtccaccgggaactgctccaccggggccacgtgctggatgccggcgttattgatcacgatatcgacgccgccgaaggtgctttcggcatagtgcatcatcgcctcgatctgcccgacgtcgcgcaggtcggcgtcgtgatagccggggatcttgcccagcgcggcgacttcagcccgggcgtggctgctgtcgccgaagccattgagcaccagctgggcgcctgcctgcgccagcactttggcgatccctaaaccgatgccgctggtggagccggtgaccagcgccgttttaccgtgtaagttcattgtattactccttcaatctggtatcagacaatgccggtcacatagaacgtggcaatgacaaacagtaccgcgaggcttttgatcaccgtgatggcgaaaatgccgccgtaggcctggcgatggctcaggccggtgatcgccagcagggtgatcaccgccccgttgtgcggcagggtgtccatgccgccgctggccatggcggcgacacggtgcagtacctcgagcggaatattggcggcgtgggcggcggcgacaaaggtctcggacatcgccgccagggcgatgctcattcccccggaggccgagccagtgatcccggccagcaccgtgacgctgatcgcctcgtttaacagcggattgggaatggccgcgagggcttttgacagcaccaggaaacccggcagggcggcgataaccgcgccgaagccatactcagaggcggtgttcatcgccgcgagaatagccccgcccaccgccgtccgacttccctccgccagccggccgcggatattgcgatagccgcaaaccagcaccagcacaatgccggagagcagcgccgcctgcaccgcccagatggcggtgattttccccacttcggtgacgacaggcttcgccaggcccggcaggttgagctcatggctggcgccgtaccactgcgggatccagtgggtgaacagcaaattcagcacccccaccagcagcaacggggcgatagcgattagcggatgcggcagatcgatgtcatccggggtctgcggctcattttgcaggtcggtcccatagccttcgccgcgggcctgcgctttgcggcgctgacgctccagccacagcaaaccgaagatgataatgaacagcgagccgataagccccagccagggggccgcccaggcgttggtgccgaagaagctggtgggaataatattctggatctgcggcgtgccgggcagggcgtccatggtaaacgagaatgccccgagggcgacggtggcggggatcagccgtttggggatcccgctctggcgaaatagttcggcggcgaaagggtagacggcaaaggccaccacaaacagcgacaccccgccgtaggtcagcagggcgcacaccagcacgatcaccgggatcgcgtggcggcgcccaaggatgcggatggcggcggcgacaatcgaacgtgagaatcccgacagctcaatcagcttgccgaataccgcgcccagcagaaacaccgggaaatagagcttcacaaagccgaccattttttccataaacaggccggtaaaggccgggccgaccgcgcccgggtcggtgaggagcaccgcgccgagggcggcgatcggcgcaaagaggatcacgctgtatccacggtaggctgccagcatcagtaacgccagcgcggccagggctattatcacactcatcacgacgtctcactctcattgttattgtaggggtacagaacgcgatactagggtttcagggcgaagcgcagctggtgttcccggcgcgactggatgcgctggtgccgggcctcgtcccagcggtaaaagccttgcccgctgcgggcgccggtgtcgcctcgcgccactttctccgccaccagcgacatcatctccgtgccgctggccagctccggcagcaggtgctggcagatatcctggaccgtcgccaggccggtcatgtccgcagcctccagcgggccgaccatcgcatagcggcggcccagcgaggcgcgcatcacctggtccaccacctccggggaagcgatgccgctgtggacgatatgcagtgcttcgcgcagcagggcgaactgcagccggttgccgacaaagcccggcgcggcgcggttgagcaccaccgcctccagcgcgcaggcggcgcaaaagtcgctcacctggcgtgccagatgaggcagcgtggcgctcccgggcaccacttccaccagcgggatcaggtgcggcggatgccagaaatgggcgatcagcaaccgttcagggtggcgcatgccctgcgccagccgatccggcggcaggccgctggtgttgctggcgataatcgtctcgtcggcgatcagcgtttccagctcggcgtacagggcgtgcttcagcgccagccgctcggggatcgcttcaatcagcagcgtggcatcggccagggcattcagcgtcggggtgggggtcagacgggccagcaccgcgtcgcggtcggcgggatcctgttgaccgctggcctccagctcgcgcaggatggcgctggccaccgccggaacctcagcgagacgctgcgggtcggtgtcatacaggcggacggcgtgaccgtgacgggcgaaatggcaggcgataccgacgcccatcagtcccgcgccgagtaccgccaggcgtggtgtaaacatagtggctcctgttaacgttgtagggtcatggcgatgccctggccgccgccgacgcacagggttgccagccctttgctggcgccccggcgctgcatctcatgcaccaggctgacgaggatccggcagccggaggcgccgatgggatggcccagggcgatggcgccgccgttgacgttgaccttctcgctatcccactcaagcagctgaccgacggccagcgcctggacggcaaaagcctcgttggcttcgataaggtccacctcgtccagcgtccagccggcgcgctgcagcgcctggcggcaggcgctcaccgggccgatgcccatcaccgacgggtcgaccccggcgaccgctgagctgacaatgcgcgccagcaccggcagcccaagctcgcgcgctttatcgacacgcatcagcaggaccgccgcggcgccgtcgttcagcgacgaggcattcccggcggtgacgctgccgtcagccgggcgaaacgccgggcgcagctgggccagctgctgctcgctggtctccgggcgcggttgctcatcgtcagtcacgactcgcggcggctttttgccctgcgggacgctgaccggaacgatctcctcgcgaaagcgcccggcggcgatagcggccgccgctttgcgctgggagctggcggcgaaggcgtcctggcgctcgcggctgatgtcgaaggcgtcggcgaggttctcggcggtaatgcccatgtggtagtcgttaaaggcgtcccacaggccgtcctggatcatgctgtcctgcaggctggcgtggccgaaacgcaggccgtcgcgggcgccatgcatcagatagggagcattgctcatgctctcctggccgccggcgataacgatcccggcgtcgccgcagcggatcgcctgcaccgcctgctgaaccgctttcagtccggagccgcagaccagattgacggtgaccgccggagtgtcgaccggcaggccggcccgcagcgcggtctggcgcgccgggttttgcccgcagccggcggtaagcacctggccgaaaattagttcgtcgaccgctgcggcgggcagctggcagcgttcaagcaggccgcgcaccaccgctgcgccgaggtcgacggcggaaagaggggcgaaggcgccgcgaaagctgcctaccggggtgcgtactgcagcaacaatggcaatatcggtcatggtctctccttaactgaagcgcatttcgcgcacgtcgtcggcgacgatcagccgtcccgccgttttacgtatcacctcgtcggggctgacccccggggccacttcgcgcaggacaaacgcgccgtcgacaatctccagcagggccagatcggtgagtacccggcgaatacagcccacgccggtgagcggcagggtgcactgcggcagcagtttggattcgccgttttttgaggcgtgggtcatcaccccgatgatgttctgcgcgccggccaccaggtccatggcgccgcccatccccttgaccatttttccagggatcatccatgaggcgatgttgcccgcgacgtcgacctcaaaagcgccaagaacggtcaggtcgacgtggccgccgcggatcatggcgaacgactgggcggaatcgaagatcgccgccccggtttgcgcggtgacggtttgtttaccggcgttaatcatgtcggcgtcgatggtttcctcatcgggaaattcgcccatccccagcaggccgttctccgactggagcatcacttcaatgccggcgggaatgtagttggccaccagcgtcgggataccgatcccgaggttgacgtagtcgccgtcgcgcagctcctgggcgacgcgcatcgccatttgttcacgggtcagcatctcagtgccctccggcgcgcagggtgcgctgttcaatacgtttttcgaattgcccgacgatcagccggtcgacatagatccccggagtatggatggcggaggggggcagttcgcccggcggcacaatctcttccacctccaccaccgtaatgcgcccggcggtggccatcagcgggttgaaattctgcgcggtgtggcgatagaccacgttgccgtaccagtcggctttccagcctttgaccagcgcgaaatcgccgcggatcgcctcttcaaggatgtagtgtcggccgtcgaactggcgcacctctttgccttcggcgaccggggtgccatacccggtggcggtgtaaaagccggggatgccagcgccgccggcgcggattttttccgccagcgttccctgcggggtgagttctaccgccagctcgccgctgagcaccagctgttcaaacagcgcgttttccccgacgtaagaggccaccaccttgctgacctggcgcgactccagcagcatgccgagaccgaaaccgtcgaccccgcagttgttggagaccaccgtcagcccctgcacctggcgacgctgcacctcggcgatcaagttctcgggaatgccgcacaggccgaagccgccggcgagcagcgtcatgccgtccgttaacccttccagcgccgcttcgtaactggcgacgcgtttatccagtcctgccatcttgtctctcctgccttgcgatagccttatcattggcgcaggcgactgatttgataattttgaatttgtgactcactcatttggaattttaattaatttcctgttaaataatttttttcaattagttaacagctgtctcttataaacatatgctaaccaacgagaacaaagaggagctcgaaggcgggcgtcggcggga

SEQ ID NO: 152 - DNA, 62913 bp, Unknown
  source: /note="Description of Unknown: MKP2_2161_1 Mutant Bacteria sequence"
cctccggccgccgtgtccgtcccccttgcgccacggtatctctttgtgtcttgctcttagtatcgcctatgcgctcgatcttcatgagccctactgggcgatgacgtccgcggcggtggtcagctttcccaccgtcggcggcgtgatcagtaaaagttttggccgcatcgcaggcagcctgctcggcgcctgcgccgccctgctgcttgccggtcatacactcaacgatccctggctgtttctgttcagtatctccggctggctggcgctctgcacctgggcctgcgccctgttcaccaacaacgtcgcctacgcctttcagctggcgggctatacctgcgccatcatcgcctttccggtgattaacatcagcgacagctacgaactgtgggtcatcgcccagtcgcgcgtctgcgaagtcatcgtcgggatcctatgcggcgggctaatgatgatgatcctgccaagcacctccgacggcagcaacctgctgacggccctgaaaaccatgcacgcccggctgctggagcacgccagcctgctgtgggtgccggagacgacggatgccattcgcaccgcccatgagagcgtgattggccagatcctgaccatgaacctgctgcgtatccaggccttctggagccactaccgtttccgtcggcagaatcctctgctgaactacctcctgcatcagcagctcaggatgaccagcgtcatctccagtctgcgacggatgctgctgaactggcctgacgcgccggcgaacactcgccaggtactggagtcgctgctcgccgagctcgccacccctcatgccgacagctatcacgttgcgcggatcctggcgccgctggcgccgcggcaggatgccgattaccggcacatcgctttctgggcgcgattgcgctatttctgtcgcatttacctggagagcagccgctggatccgccgcgttgaaaatgcctcggcgatcgccgagttcaatgtgcccgccgccccgccgttagcccgccataccgatcaggcggaggcgttgctcaacggtgtccgtaccttttgcgcgctggtggcgattggcgcatgggggatcagtacccagtggaccagctgcgcggcggccctgaccctggcctccatctgctgcgtgctctactccgtatccgcctcgccgtttcgctcgctgacattgctgatgcagactctggtcctgctgtcgctattcagtttcgtggtgaagttcggcctgatggtgcaggtaaccgacctgtggcagtttctgctgttcctgttcccgctcctgaccaccatgcagttactcaaactgcagtggcccaaatacgccggcctgtggggacagcttatcgtctttatgggctcgtttatcgccgtcaccaacccgccggtgtacgattatgcggcctttttcaatgataatttgagcaagattgtcggggtaggctttgcctggctggcctttgcggtactgagtccgggctcggacgcccgcaaagggcgacgccatatcagagcgttacggcgtcactttgtcgatcagcttagccgtcatcctcagcacagtgagcatgaatttgaatcgctggtctatcaccacgtcagtcagctcagccagagtaaggatgccctggcgcgccgctggctgttgcgttggggcgtcgtgctgctcaattgctcgcacgtcgtctggcagcttcgcgaatgggaaacccgctccgatcctctcgcccaggtgcgcgacctgtgcatcaacctgttacgcgatgtgatgagcgagcgcggcgtgcaacagcgtccgctggcctccaccctgcaggagctgcagcggatctgcgacgccctgaaccaccatcatcagccggcggcgcgggaactggccgccgcgatttggcgactgtactgcgccttgtcgcagctggaacaggccccggtggccggcacaattggcgaaggaactacttaatcaccccgcaggcaaaccgttcgccgccgccgcccagcggctgcggactgtcggccatgttatccccgcctacgtggaccatcagcgctttccctttcacctccgccagcgttttcaggcgcggagcaataatcggctggtcggctacgcccgcatcgttgaccaccagcaggggcaggtcgccaagatgcccggctcccaacggcccttcgtgtttgccggtatgctgcggatcgtaatgtccgcccgccgccccggcggccacggctttaccttctttcatcgccggctggcagctgccttcggcatgaatatgaaacccgtgcttacccggcggtagcgcccgcagagtgggggcgaactcgagtccgcggtcggtttcggtgattttgacgctgccgatggtctgaccgacgccctgggtggtcacgagattaagttgcacatcttcactaacggcctgtgcgccagcgcaaaatgcgagggataagatcgcgagaatacatcgttgcataacacctccggatggctgtctccctgttaagtgtaaaccaggaacgcctttccggaggggaaatgcccgttacggtacgtcgtacccgagcgcggctttacggatgcggaaccactgctgacgggtcatgctgagtttttcagccacaatcgccgagcgcacgcgctcgattttgcccgagccaataatcggcagcggctgcgacggcagacgcagcacccaggcataaactacctgttcgatgctgtcggcgttaagctcgtgcgccacctgcgccagctcatcgcgcagcgcctggaagccctcttcgttaaacaggcgaccaccgccaagacaagaccacgccatcggacgaatacgcagttgctgcagctgatcgagagtaccgtcgagcagcagcggctgatgcaccggtgaaatttcgacctggttggtggccagggtaaacggcagacgtgactgcagcaaggtgaactgggcgggggtaaagttcgagacgccaaaatggcgcactttaccgctatgatgcagcgcgagaaaagcttcggctacctcgtcggcgtccatcagtgggtccggccggtggatcagcagcaagtcgagatggtccgtcgccagattacgcagcgattgctcggcgctgagcacgatgtgatcgcggtcggtaatgtagtggccaatggtgttctcagcgcgcgcccgggtggcgataccgcatttgctgacgatttccatccggctacgcagatgcggcgctcgcttcagcgcttcgccaaaggcagcctcacactgataatcgccatagatatcggcgtgatcgacggtggttacgcctaaatcgagatgctgctcaataaagctgaccagctcgccaggcgacattttccagtccatcagacgccagtagcccatcacaaaacgtgaaaattccggcccctggggagccatagcaatacgctgaaccataaccgcttcctcaataaaaaagtgctctgagtatacgtaatttttggcttaaaacagtgagggttgctgcggttcttccgccggctccggcctgttcgcgcgtattttgcgcagcagccgttggcggcaaagacgcaaaacctcctgtttctgcgcatcgctcatcgtttgccagttaaaacgttcctcacggctacggaaacagccgcgacagtagccgcgctcatcggtctgacatattccccggcacgggctctgcaccgggaaaaattctaactgctctgccaccacacgcctcctgtcccctcgtctcctttcattgaagacgtttccccgcgccgacgcaaattttgttcactacgtgctgcgccagctaacatttttccgctgacgcttgcattagaccaatcggtctactacagtgtgcagcatgaacagacacagcgattgcgatacccgagaacatatcctggccaccggcgagcagctttgcatgcatcgcggttttaccggaatgggcttgagcgaacttctgaagacggcggaggtgcccaagggctccttctaccactactttcgctctaaggaagccttcggcgtcgcgctgcttgaacatcactacaccggatatctgcagcgcctggtggaccacttcgatcatggcgacggtaactatcgcgatcgcctgctggcctactatcagcacacgctgaatcagttctgccagcaggggattattagcgggtgtcttactgtcaagctatccgcggaggtttgcgatctgtcggaagatatgcgcgccgccatggatcgcggagccagccagattatcgccctgctgggcgacgcgctggagaaaggacgtcaggaaggcagtctcgcatttgacggcgaggccatgaccctgtcgcaggtgctgtattccctgtggctcggggccaacctgcaggccaaaattacgcgtagcgcaacgccgctggaaagcgcccttgcccacgccaaacagattattgcggcgcctgcggtataacaggcgtttttatttcatcagttactagacgaccggtctactcaggagtcactatgtcggaagcaaaattattcagcccactgaaagtcggtgcggtcaccgtccctaatcgcgtatttatggcgccgttgacgcgtctgcgcagcattgagccgggcgatatccctactccgctgatgggcgaatactaccgccagcgcgccagttccgggctgatcatcaccgaagcgacgcagatctccgcgcaggccaaaggctacgccggcgcgcctgggctgcacagcccggagcagattgccgcctggcagaaaatcaccgccggcgttcatgccgaaaatggtcatatcgccgtccagctgtggcacacaggccgaatttcccatagtagcctgcagcctggcggcgccgccccggtagcgccttccgcgctgagcgcgggcacccgtacctcactgcgtgacgaaaacggccacgccattcgcgtcgacacctcaatgccccgcgccctggaaaccgcagagatcccagggatcgtcaacgatttccgtcaggcggtcggcaatgcccgtgacgccggcttcgatctggtcgagctgcactcagcccacggctatctgctgcaccaattcctctcgccatcggcgaaccagcgtaccgatcagtacggcggcagcgtggagaaccgtgcccgtctggtgctggaagtggttgacgccgtgagtcaagagtggagcgccgagcgcattggcatccgcgtgtcgccgattggcagcttccaaaatgtggataatggcccgaacgaagaagaagacgcgctgtatctgattagcgagctggcgaaacgcggtatcgcctatctgcacatgtccgagccggactgggcgggcggcaaaccttacagtgaagctttccgtcagaaagtccgcgaccgcttcccgggggtgatcattggcgctggcgcttacacagtagaaaaagccaacgatcttatcaataaagggctgattgatgccgtggcatttggccgcgattacatcgccaacccggatctggtggctcgcctgcagaaaaaagcggcgcttaacccgcaacgcccggaatccttctacggcggcggcgcggaaggctacaccgattacccgactctgtaatccctccattgatagcggcgacgtatcgccgctatactcaacgttctgatctatcaaataaactgcataggggacattatgcgcttactccacaccatgctgcgcgttggcgacctgcaacgttctatcgacttctataccaacgtgttgggcatgaagctgctgcgcaccagcgaaaacccggagtacaagtactccctcgcctttgtcggctacggcgaagagagcgaaaccgcggtaatcgaactgacctacaactggggcgtggacagctatgagctgggcaccgcctacggccatatcgcgctgagcgtcgataacgccgccgaagcctgcgaactgatccgtcagaacgggggcaacgtcacccgtgaagccgggccggtaaaaggcggcaccaccgtcatcgccttcgtggaagatccggacggttacaaaatcgagctcattgaagagaaagatgccggcaaaggtctgggcaactaacgcttccccacgctggcatatttaatgccatggctcgcccgggcgctacggcgcccgttgttttcacccctgcctgctgcaagccgcggcaaaatttgccataatgcgcgctacttttttccagctaagagaatctgatgtccgagaacgctcaactgaatggtctgtgcgaccgtttccgcggtttttatccggtggtgatcgatgttgaaaccgcaggatttaacgccaaaaccgacgccctgctggagatcgccgccattacgttgaagatggatgagcacggctggctgatgcccgatgaaacgctgcatttccatgttgaacctttcgagggcgccaatctgcagcccgaagcgctggcttttaacgggattaacccgcatgacccgcagcgcggggccgtcagcgaatacgatgccctgcatgccatcttcaaaatggtgcgcaaagggatgaaagagagcgactgcagccgggcaatcatggtggcgcacaatgccacctttgaccacagcttcaccatgaccgccgccgaacgcgcgggacttaaacgtaaccctttccatccgtttgttaccttcgacaccgccgcgctaagcgggctggcgctgggccagacggtgctgtcgaaagcctgtattgccgcgggtatgccgttcgacggcgcgcaggctcactccgccctgtatgataccgagcagacggcgcagctgttttgcgagatcgtgaaccgctggaagcgtctgggcggctggccgctgccagtggccaccccggagtgataaaaaaagcgacttccaggaagtcgctttttcactgatggcgggaattattccgcttttggctcgtcggtatggtactttgccgccgtctctttgatcagctgctgcagttcaccgcgctggtacatttcgatgacgatatcgcagccgcccaccagttcaccgtctacccacagctgcgggaaagtcggccagttggcgtatttaggcagctcggcgcggatatccgggttctgcaggatatcaacgtaagcaaaacgttcgccacaggcggacagcgcctgaacggcctgggcagagaaaccacagcttggcagcttcggcgaccctttcatgtacaacaggatcgggttttcagcgatttggcgttggatcttttctaaagtcgagctcattgtcgtgcttccttaaacttctttctacggcagtaacttgtcattgtagcgtcctgtaggcaggacggataataacatttttttcactattcatattttatcttctgttgcgcgaagttgccttaaaaatatcattttgcggtcacaggcgggcgctcattgcgcattttctgtgcgaggcggtcaatgtctgacgcgttttcttgcaatcgttaaccaatcgacatttttgatacaaaagaatattaactttccggctttttatgctttagaatcattccggtttgtcattcatcgtcaggcatttgtacatgtctgtaattaatcaggggattgctcagtggcgcggctaaacaaaatcgcgatatcgctctgtgcattactgttcacgtctatctcattcacgccactggctcaggcgtcagggcatacgcacgcctccgcttcgccaaaagcgttgcccgcgaaaagtggctcagagcgcaagaaaaaagcaaccagtcaaaaaactaaaaccaccgctaaaaccaccagtaaaaagtcctcgcgcacccggctccctacccgcactaccgcagcaagccaaaccgcacttcatcgtcaggccgctggcgcgacgaaaaaatgcgtgctgcgtaaaggttataaaaagcagtgcgcgaaaacggtcgccgccagcgccgagccgaccctggcgctaaacagcgtcaaaagcaagtgcgtggtgcgcaagggctataaaaaacgctgtaagcccgaggccagcgaagcgaatttaacgatcgccgacgcccacaaggtccgggtgcaaaaagcgcaaagtaccgcgatgaacaaactgatgggccagttgggtaaaccctatcgctggggcggcacctcgccgcgcaccgggtttgactgcagcgggctggtctattacgcctataaggacctggtcaagatccacatcccgcgtacggccaacgaaatgtaccacctgcgcgatgcgcgtccggtggatcgtgatgaactgcagagcggcgatttagtcttcttccgcacccgcggacggggcgctgccgaccatgtcggcgtctacgtcggcaacggaaaattcattcagtcgccgcgcacaggtcgtgatattcaaatcacctccctgagcgaggattactgggttcgccattatgttggcgctcgtcgcgtcatgacgccgaaaaccattcgctgatcccggtctgccgctgcggcggcagaccgcctctcctgctccatctccatccccacccgcaagggatattgcagattgctctctttgcccggcgtatcacgacgatagcgggtcggcgacatgccaaagtgacggtgaaaggtccggcagaaagcggcttgtccctcgtatcccaggcactgagaaatactctgtatcgacgcctgcgtctgcgttaaatagattgtcgcaatcgtcatctttcgtcggctgacgtagctcgccagcgtgcagcccgttaccatggcgaattgtcgctggaagtaccagtgtgagtagccggactttttcgcaatcgcgctcaccgacagggtgtcgaaaatatgtgcttcgatccagtcaacgatcccctgcaccaccgggatcattttcgcgctcaccacctcatctgtttttgccatcgtcgtcatcctggggaaattactgctggcggccatatttgtcatacaaattaaaaaatagacaatgaattattggcatagcgacgattgcctgagcgcatatttttattaatcgtttgatattaaagttttattttttgttcagcgcattgcgtgacagcggcgaagcagagtagttaatcgccatgcgagttcgcaaatccgcagagggcatctccttatacatggttgcaacaattttggcggcttatcacccactcctgcagaaaacgattaagccttcaccacatgcaccggtgataatagcctttatcgttgtaaggcttttcactgcttgcggcaaatgttaacattctcaatacaataacacgcccgggacgcgacagcgtcgggcggtcagaacacgattcaggtgaaaacctcatcctgtcaatgtgagataaaacaaaaagttataaggagagtagcaatgtcgtttgaattacctgcattaccatatgcaaaagacgccctggcgccgcacatttccgcagaaaccctggaatatcactacggtaaacaccaccaggcgtatgtcactaacctcaacaacctgatcaaaggcactgcgttcgaaggcaaatccctcgaagagatcgtccgcacgtctgaaggcggcgtattcaacaacgcagcgcaggtctggaatcacaccttctactggaactgcctggcgcctaacgccggcggcgaaccggaaggcgaactggcggccgcaatcgccaaatctttcggcagcttcgcggattttaaagccaaatttaccgatgccgcggcgaaaaatttcggcgctggctggacctggctggtcaaaaatgccgacggcagcctggctatcgtctccaccagcaacgccggcaccccgctgaccgccgacgcgaagccgctgctgaccgttgacgtttgggaacacgcctactacatcgactaccgcaacgcccgtccaagctacctggaccacttctgggcgctggtaaactggaagtttgttgcggctaacctggcggcataaacgacaaaccgcagcggggtctccccggctgcggttttttttgcccttgcccagccgatggttactggctggcgaaagcctcttccggctgcgctcgcccgctaaaccagaccagcagcagcgccagaccagcgataatcgcgcccatcaccggcacaaacgcatagcccagtccgccagagatcaccgccccaccggcggcggcgcccagcgcattgccgaggttgaacgcgccgatattcaccgaagaagagagccccggcgcctcatgcgctacgcgcataacccgcatctgcagcggcggaaccaccgcaaaggttgctgcgccccagacaatcatgctgatggccgccccggcctgggattgcgccagcagcgggatcgccagcatgatcgccatcagcagcagcagaaagcccttcagcgtgccggagaccgaccggtcagcaaatttgccgcccagatagttgcctagcgaaaaaccgacgccaatcagcaccagcatcgcggttataaacagcgatgaagcgtgggtcagcgtattgagcactggcgaaatgtaggtatacagcgtaaacatcgccccggcgcccagcacggtggtcagcaacgcggagagcacctgcgggcgcagcaggacagaaagctcttttttgacatcaggacgttcccccgcgctgcccttcggcagggagaaccacaggctaaccatcgccagcaggcctaatcccgcagtagcaaggaaggacatccgccaaccgatggtttcgccaagccaggtggccgccggcacgccgccaatgttggcgatggtcaggcccataaacatagtggctaccgcgctggcctgcttatgctttggcacgacgctggccgccaccaccgatcccaggccgaaaaaagcgccgtggttgaggctggtaataatccgcgacagcagcagcgtggtgtaatccggcgcgatggatgacaacaggttgccgacggtgaagatccccatcagaaaaatcagcgcattgcgccgtgcgcgatgcgacaacagcagcgtcatcagcggtgcgccgaccatgacgccgatggcatacgcactgatcagcattcccgctaccggtatcgagacgtccacacctttcgcaatcaccggcagcaatcccatcggggagaactcggtggtaccgatgccaaaggcgccgatcgccagcgcaagtaaaggaaagttgattttcattcaatgactccatcagaccgtcagagaggacggcgtaacatcagaagtcaaaagcatgacatcaatcacaaaaaaacaaaagtgaacgaaatgacaaaagatttttgcagaattgataataatagcgggatatggggaggaagcggcgctcctccctcagcgaaacattagtgcagtatggcggtcaggctgaaagcgacaatcacgccgagagcaataatcgtggtgatcagcgaaaactttaaattggtatccatcatttttccctcttgttatccccacaccaaaagtgagcttgctcatttttgcacaaaaaatcgcaaaaatcttccgggatttagggcgatgcacatttttgctcttccactttgccccaagatcggacaaaatcccacgctaatttaaaagcgtatcggccattgaccccttcctgtcgttctgtgtcgttttcccgacgtgatgcaatgttgaaaattgtattcagggtgtgtgtaggcaaacgtttacgtatcgatgatcaggcgatcaggtcaaggcatggagtgagatgtaatggcaactattaaagatgtagcgaaacgcgcaaacgtttccactacaactgtgtcacatgtaattaacaaaacccgtttcgttgccgaagagacgcgtaatgcggtatgggcggcgatcaaagagctgcactactcgccgagcgccgtggcgcgcagcctgaaagtcaatcacaccaaatcgattggcctgctggcgaccagtagcgaagccgcctatttcgctgaaattattgagtccgttgaaaagagctgcttccagaagggctatactctgatcctcggtaacgcgtggaacgatctggaaaaacagcgcgcctatctgtcgatgatggcgcaaaagcgcgtagacggtctgctggtgatgtgttccgagtatccggattcggtattgagcatgctggaagagtaccgccatatcccgatggtggtgatggactggggcgaggcgaaagccgacttcaccgatgcggtgatcgataacgccttccagggcggctatatcgccggacgctacctgattgaacgcggccatcgcgaaatcggcgtgatcccgggcccgctggagcgcaacaccggcgcggggcgactggccggcttcatgcaggcgatgaaagaggcgcatatcagcgtgccggaaaactggattgtgcagggcgacttcgagccggagtccggctaccgcgcaatgcagcagatcctaaaccagcagcaccgcccgacggcggtcttctgcggcggcgatatcatggcgatgggcgctatctgcgcggcggatgaaatgggactgcgggtgccgcaggacatttcgctgatcggttatgataatgtgcgcaacgcccgctatttcagcccggcgttaaccaccattcatcagccgaaagattccctgggcgaggccgcatttaacatgctgttggatcgtatcgtcaacaagcgtgaagagtcgcagtctatcgaagtgcaccctcgtctggttgagcgccgctcggtagcggatggcccgtttgtcgattatcgtcgttaaggcatctggcgggcgcggatctctccggcgcccgcagccactcccgattcagcgtgtcgctgtcccccagatagtcaagcatccagttcagcgccggtgaggcatcgttctgctgccacgtcaggcagcaggcggcatccgggaacggattttccagcgccagcgcagtccactcgccgcgatctatccatggacgggcgaaatggctcggcaccatgccgacgcagagtcctgccgacaaacaggttgctgatgattcccagtcagggacgactaccctcttctggttatccagcaaccatgttgtccgtttaggcaacgagcgcgaggtatcctcccgcaccagcgacggccagttacgcaggacgtcgtcgctcaggggtccatccatctttgccagcggatgatcgctcgccaccacgcagtcccagctcagcatccccatatcgcggaacgcatagcgaccgccgaccggaatagatcgcgttgcgccaatcgccagctcaacgcggccgtcggccagcgcatcccatacaccattgaatacttcctgaaagacgatcagctcgacgtcgggaaaatggcgatagaaatcgacgatcatctgacgcatccgcgccggtttcacaatatcatccactgcgatcgacaactgtccgcgccagccgttcgcaatttgctgacactgctggcgggtgatctgcatttttttgataacagagcgcccttcctgtaaaaaccagaccccggcgggggtcaactccacatcacgatggcgacgctcaaataagggaacggcgagccactcttcgagctgacgcacggtatagctgaccgcggaaggcacccggtgaagctcctgcgcggccgcgctgaagctgccgttacgggcgacggcatcaaccacttccagagagtattcagaccacattttctgcctgcaaaatttttgaatgcatgtgacaaatattagcgtttcacaagccacaatgcactccctacactctgcggcatcgtacctgtacaccaactatgagaacgttatgtcacaacccgggaaaggatttttagtctggctggccggcctgagcgtgctgggctttctggccaccgatatgtacctgccggcgtttgccgccatgcagcaggatctcaacacctccgccgcctccattagcgccagcctgagcctgttcctcgccggcttcgcgctgggccagctgttctggggaccgctgtcggaccgctatggacgtaaaccggtgctgctgggcggcctggcgattttcgcggccggctgtctggggatgctgtgggtgcacaacgccaccctgatgctggcgctgcgctttctgcaggcgattggcgtctgtgccgcggccgttacctggcaggcgatggtcgccgattactatcctgcccagcgcacgaaccgcatcttcgccaccattatgccgctggtaggactgtcgccggcgctggccccgctgctgggcagctggctgctggtgcacttcgagtggcaagccatcttcgccaccctgttcgccatcactctgctgctgatgctgcctgccctgcgcctgaaggcagccgcgaagtcagtagtagtgacgcagcaaaagatcacctttctcgcgctgctgcgctcccgggaatacagcggcaacgtcctgatctacgccgcctgttccgccagcttcttcgcctggcttaccggttcaccttttatcctgcatgaaatgggctatggcccaaccgctatcggcctgagctatattccgcagaccatcgcctttctggtgggaggctatggctgtcgcgcgctgctgcagaaatggtccggtcaacagatgctgccgtggctgctggtgatttttgccgtcagcgtagccgccacctggctggtgggcctgcaaacccatgcctcgctggtggcgttaatgatcccgttctgcatgatggcggtggtcaacggcgggatctaccccatcgtggttgctcaggcgttgaagccttttccgcaggcgaccggccgcgcggcggcgctgcaaaataccctgcagcttggcctgtgcttcctgaccagtctgctggtatccgcgctgatcgccacgccgctgctgactaccaccagcgtaatgctggtttcgattggcttagccggaataggctatcgcctgcagcagacgccggagctgacaccccactcttcccacgcgtaatgcccgtcgccagggcccggaccagtcgttagcatgctaagaaatttttattgaaagccagtacttagcgtcctatactggatccgggttcacataaatagaaaatagttacagattaacggatgcaggatgcctccgtttcaccatggaaggcctttcggcaagggttatctcccttcctctgtttacgtcggatagcgacttcacggattatccgtgagatttctcacaaagccaaaaaagcgtctacgctgttttaaggttctgatcacttgggcgtgatggagaagctatgagttcatcgtgtatagaagaagtaagtgtaccaaatgatgactggtaccggattgcagctgaattattaggccgtgcgggaattgaaatcaatggctccgcgccgtccgacctgcgggttaaaaatcctctcttttttaaacgggttttgcaggaaggttcgctgggtttaggcgaaagctatatggacggctggtgggaatgcgagcgtctggatatattcttccacaaggtgttacgcgccgggttggaaaagcagctcccacaccatttcaaagacacactccgcatcgcaggcgctcgtctgtttaatctacaaagtaaaaaacgtgcctggattgtcggtaaagagcactacgacctcggcaacgatctcttcagccggatgcttgatccctatatgcagtattcctgcggttactggaaagaggcgcagagcctcgaggccgcccagcaggctaagctggatctcatctgccgcaaactggagctggagccaggcatgcgggtactggatattggctgtggatggggcggtctcgccgaatatatggcgcgaaattatcaggtcagcgtcgtgggtgtaaccatctccgccgagcaacaaaaaatggcccaggcgcgctgcgccgatctcgatgtagagattcgtctccaggattatcgcgatctgcacgacagctttgaccgcatcgtctccgttggcatgtttgagcacgtggggccgaaaaattacgctacctactttgaggttgccgaccgtaatttgaaacccaacggccgctttttactgcataccattggttccaaggtcaccgaccataacgttgacccgtggatcgataaatatatcttcccgaacggctgcctgccttccgtgcgtcacattgccgaagccagcgaaaagcattttgtgatggaagactggcacaacttcggcgccgattatgacacgaccctgatggcctggtatgagcgtttcctcgccagctggccggaaattgccgataactattctgagcgtttcaaacgcatgtttacctattatctgaacgcctgcgccggcgccttccgcgcccgcgacattcagctctggcaggtggtgttctcgcgcggtattgaacatggactgcgcgtcgcccgttaaataacactcccccgcttatcggcgggggattttttttcaggcttcattgaccttagccgccatctctttcgcggccagcacgcgttcgaccgtatcgacaaccgcctgggtctgcggatcaatctcaatattgacgcgatcgcccagttttttcgctcccagggtggtccgctgcagcgtctccggaataagatgcacgcagaaacgggtcgccgtcacctcacccaccgtcagactaatgccgtcaataccgatgaatcctttatagaggatgtatttcatcagcgttggatcctgcactttaaaccagatctgacggttattttcggaagtcagaatcttcacgatttccgcggtggtcataatgtggccggacattaaatgcccgccgatttcatcactaaatttcgccgctcgctcgacgttcacttcatcgccgacctgaatatcgccaagattggtaatccgcagcgtctctttcatcagatcgaagctgatgcgcgcgccgttgatttcggtcaccgtcaggcagcagccgttgttggctaccgaggcgccggtttccagcccctccagcatatgtgccggtaactcaaccacgtgagtgcgaaaattgggtttatcatcaatggagaccactttcgcggttccctgaacaataccagtaaacatgtttggctcctgttgaaaatcatgacggtatcattaccgctttcgctatcgggaacaataacaggagggcaaagcggttgccagcgcgcttcgtgcctcgactcttttttcactggcttaatagccaatcctcgctacaatagactggaaattcctcatttttatccccttgctgccagttacggcggcttttttagtctcaaaataacaacaattcgaaggtgttcacgtgcagaagtatttcgttgaagcgcgtcagttattagctctggctatacccgtcatccttgcgcaggtagcgcagacggcgatgggttttgtcgataccgtgatggcaggtggctacagcgccacggatatggccgccgtggccatcgggacctccatctggctgccggcgatcctcttcggccacggccttctgctggcgctgaccccggtggtggcgcagcttaacggatccgggcggcgagagcgtatcgcgccgcaggtgcgtcagggcttctggctggccggctttgtctcggtgctgatcatggtcgtgctgtggaacgccggatacatcatcagctccatgcataacatcgatccgctgttggcagagaaggcggttggctacctgcgcgcgctgctgtggggcgctccgggctatctgttcttccaggtcgcccgtaaccagtgtgaagggctggcaaaaaccaagcccgggatggtcatgggctttattggattactggtcaacattccggtgaactatatttttatctatggtcatttcggcatgcccgagctgggcggcgtcggctgcggtgtggcgacggcctccgtttactgggtgatgttcgccagcatgctgtggtgggtgcgccgggcgcgtacgatgcgcgatatccgctgcgccgagcgcttcagcggccctgattttgccgtcctgttacggctggtgcagctggggctgcccattgctctggcgctgttctttgaagtcactctgtttgccgtcgtcgcgctgctggtctccccgctcgggatcattgacgtcgctggtcaccagatcgcgcttaatttcagctcgctgatgttcgttctgccgctgtcgctggcggcggcggtcaccattcgcgtcggcttccgccttggccagggctcaacgatcgatgcccaggtttcggcccgcaccggcgtgggcgtggggatctgcctggcagtatttaccgctatctttaccgtcctgatgcgtaagcagattgcgctgctgtataacgataatcccgaagtggtgacgctggcctcgcacctgatgctgctggcagctatctatcagatctccgactctattcaggtgatcggcagcggcattctgcgcggctataaagatacgcggtctatctttttcattacctttaccgcgtactgggtgctgggtttgccgagcggctatctgctggcgctgaccgatatgattgtgccccgcatgggacctgccggtttctggtgcggatttatcatcggtctgacctccgccgccatcatgatgatgctgcggatgcgttttctgcagcgccagccttccagcatcatcttacagcgcgctgcgcgctaacttgtctaagcccgccgctccggcgggctttttcgttcttcgctataacggcgcgttgtacattccgttactccctgacaccaaagactcactgatagcctcccggcaggcgcttatagtgttgccaacagccccgcagtggggttactcaagaaaccaagtcgaggatttcagaatgaaaaaagtattagctctggtcgttgccgctgctatgggtctgtcatcagttgctttcgctgccgatgcggcaagcaccaccccgagtgcagcagccagccatactaccgttcaccataagaaacatcacaaagcggccgcgaaaccggcagccgagcagaaagcgcaggcggcgaagaaacaccacaaagccgctgcaaaaccggctgctgagcaaaaagcccaggcggcgaagaaacaccataaagccgctgctaaaccggcagtagcgcagaaagcgcaggcggcgaagaaacaccacaaaaccgctgcgaaaccggcagtcgcgcagaaagcgcaggctgcaaagaaacatcataaagcggcacaccacgcagctaaaccggcggttaaaccggcggcataatggtcagggcgttaaggtgataaaccggcgctgaacagcgccggttttttttcaggaggacatcatgctgcaacgctatcgcttcgaattgctgctgttactgctcatcgtctgcgcgctgtttaccctgcgcttgatgtttaaatagctggctgctgaacccatttacgggccggcggcgtatagtcgcgaaaaccggcgataatctcgtctgccgaggtagcgaacggcagcatttccgcgtagcgcgggtgcataaacccttcctgtaccatgttatcgaccatcgcctgaagcggatcgtaataacccttaatattcaggaacgcgcacggtttctcatggatccccagctgcgcccaggtccattgttcgaaaatctcctcgagcgtccccgccccgcccggcagggcaataaagccatccgccagcgccgccattttggttttccgctcgtgcatatcctcgaccacatgcagctccgtcaagccgcggtgggcaatttcccgctccaccaggccgcgcggcatcacgccgatcaccacgccaccggcctccagcgccgcatcggcgaccgcccccatcagaccaactttgccgccgccatagacaagcgccaacccctgctgcgccagcgtacgtccaaccagacgggcggtttcgaggtacagcggatgttcgccagctgaagaaccgcaaaaaataccaatcgatttcatcttcgttatgactccttctcttctggtggccgataatttaacacatcggcaacccttccgcgcaggtttggactggctgaaaaataagagccgtgatgctcgctggcgaagaaatatccttgtggttcagtaaaatatatccggaatgagtaaaagttccgcaatcgcatgcaatgtgcaagaaaagtgacgtttacctcttgccacatcccctccctgccgctaatatgcgtccccgttgtcaccacaacattgcgttcgtagctcagttggttagagcaccaccttgacatggtgggggtcgttggttcgagtccaatcgaacgcaccataatgcgtttatagctcagttggttagagcaccaccttgacatggtgggggtcgttggttcgagtccaattaaacgcaccataatgcgtctgtagctcagttggttagagcaccaccttgacatggtgggggtcgatggttcgagtccattcagacgcaccaatcatttttccttctgtaattcctgaattttatcacctgctccccgttggtattgctgacttaaaatgttgtgtattggcaaagcgttttccttgcatagtccatactagtccacatgagtgctaaggaagccaacccttttaatgagcatcaaaaatcgatcaacagaccacgccgtttaatttcttaatgataataattccattcatcataaatatatgcatatgcaaatcgatatatcagataccccaccaggaatcccacaactgaaagtaaaccccagagaaatttatattcatttactgagaaaaaaaagaaccagccagccagcgcgatacctgaagcacctaatcccatcccagcccctctgataacacgggaaagcaggatgagtaatgttcgttttatattcatagtccaccaaagaaatattcacatattttgttaaattctgctggattcttatcactgaccatacacgctgtttcgaaaggttttacaatatcctcaacaagaaaatacagaagatccagatctcccagattttgcagtttatcatgcagtaccggatttctgcgcttcagatatcgggacgtgtatattgctctggatgtttcagctccaacggataataataatccggcaagacttcctgcaaaaaaagcggacactcctcttgaggcgttcccctcttcctcatcccgctccgcgtcaggtgctgcggcttcggtcctgccgccatatgggttaacagttgctgattcagcaggctgtcgatattgcgccctccggagaacaaccatccggtagcgtgactgccccggcggttgctttaccaaactggttgcatcgtttatcagcctgttcctcatcgcttcactccatcttttctggcgttaaaattcatcattacgtcctccattcgttacccttcgccaccccaccccctggccgcgctatcgcacccgcctgctttcgcgaacgctaccgcccgtcgctgtctccctacaggaacccaaagcgcactgggtaaggcagaacggtgatcttttatttaacgcccggaataacagtcgctcagcaataaatgtccaaggaaatcccgttcgtatccacatcctgccggagtaagtccagttttaattcagtggcatctcggttcagctcgggagtgactgcgtaatactgacaaagacgataaacagaataaaacaaataaactgataatattttgtcatgcgagagaaggaagctgtctggacgcagggcagaagcggtggcttcgcaacaacaatattccatactgataactattccctggtgtaaaaaagcgagcgcgcggtataacagggaggaaaccatgggcggcgctaaatgtctcccggccagctctgacttaacctgccgcaatctccgtctgcagccagcgctcaaacatctgcagcgctggctccccctccccgccgccgggtttgatcaagcagaagcgcttagccagcgtcggggagcccggccacggggcaaccagcgttccggcgctcagctcgctttccacatacatcttcggcaccagggccactccctgctgacttagtaccgcggcgatcgccatctcatgcagatcgtagcgcggcccctgggcggggttatccagcgccagaccgcactcgcgggcatagtgcagccaggcgtccgggttttgccgccggtgaatgcgcgttagccggttaagcagccccggaagatcgtcatccgtcagcagcgcagcatggcagaccggcagcaaatactccgcaaataaaaacgtcacctccattccggtccacgccgggtgttcaaaatggatggcggcatcaaatccgcttcccggcagaatgaagggatcgctgcgggcggcgatattgaccacgatatgcggatgctgcgccgcaaagcgcccgagccggggaattaaccagcggctggcgaaggtggggagcacggcgatctccaggctgcggccatcgacgggcatcccgctgacgtcatgggtgtcccgttccaggcgagcgaggatctcgcggacctgacgagcatagcgggcgcctgccggattgagccgcacccggctccccgtcctgtcaaagagtttactgtcgaggagcgcttccagacgggcaatctgccggctgatggccccttccgttaacgcgagctcagccgccgcgcgggcaaagttgccgtgacgagccgcggcctcaaaagccagtagcgcagcgctgctggggattttacgacgcatagccaatgctccttgtgcaggctcaccgaaagtcagtgacagaatatcactacgccttgaattaacatcgtttttcagcgccatttttagccgataggatgatgaaaactcactaaagcgccttgtgcgcacatcatctgttcatcgaggtcactatgctctatgtcgtcgaatgcgcctacaccgatccccaaagcgaagcggcgtggaataccttttacaatcaggaaaaactaccggcgctggtctctgtgcccggtttctacgcctcccagcgcttccgcgctctcagcgagggctgcccctgctacctggcgctgcacgatatccacgatgctaccgtcatcgacagcgacgcctaccgccgcaacggcggcggccattttgcccgctggcaatcggcgatcgccgactggcatcgccacctctatctaacgaataatacgctgcgggaggttgccccggatgaagtgctgctgctgggcgataccgcggaggacttgcccgtcgctgcgccgatacacctgcagccaggcggcctggcgaccgaacaaacccggtatgccgccatcctcccacgggacaacctgcatcacctggccacgactgccgccgtctttatctatcagcccatcaccgcccggttacgcaacccggcgcagcgcgcgtgaggtcgccatgtcacctgctcccttttatacgttgaccgctggcgacctgacggtgactgccgtgagtgatggtctgatgtcagcgccgctgtccttactctcgggtatctcgcgggaggaggcggagcatctgcagcggcattcaggattagcctcgccggagaccattgcgattggcgcctatctgatccgcggtcgcgggaatacggtgctggtggataccggcaccggcggagccaatggcgttggcggcgaacttatcgccaatctggcgcggctcggcgttggtcctgaggagatcgacgccatccttctcacccacgcccatccggaccatatcggcggcctgctgtccgccgctggtacgccagcgtatcccaacgccacggtgttcctgcctacgcgggaaagcgcttactggctggcaacatccacgttcgacaacgccagcgatcgcggtcggcgcaacgtgctgcttgttcgccgtgtactggcgaactgcgcggcgcaaatcagcggggttgatgatgaggaggtgatcgccgggatccgcccgtgccctctgcccggccatacgcccgggcataccgggtatcgcctcgaagcgggcgatacctcgctgctgatctggggggatatcgtccatttcccgtccattcagtctgcgcggccagaagcctcggtcgccttcgacgtcgatcctgaacaggcccggcgtaccagggagatcctgctgcgccaggccgccagcgaacggtggttgattgccggtatgcatcttggcctgccgggattcggcagagtggagaacaccgcctcaggctattgtctgcgctcggtgtgatcgttgagcagaacaatgaccacagtaaaaccccggtcgcggcatgagcacgaccggggcgttttgtccgggaaagtggacgagccgttaaccgcggctcttccagccttttttacttttgcagctagctttggtggcgacccacgggtgacgtagctgagtcaactgaagatcctgggaggccgggctggccgaccagcgtttgttgcacagaggcttacgagttgcaatgaccataaaaacgctcctgaaaagtaatgaaccattccctgggtagttccacaagttcagaattagcgtatcaccgcgtaacggaagttatttcaatctttgttttagaatgtaaatggtcatcgccctctgaaatagcttaaattgatccaaatcaatttaagtgcatttatttttcgatgccacctatattttcaagcgcttaccttcgccagtcgcctgattaagacttttcctataccgcataatacaacagaatcaagcgatattatcagatttttattctagttatgtatggctgtgtggttatttgttttgattattctaactgataaaattcacttggtcagtcagcagcgggcaggtactctgcaccggcaagaagaggatttgtcagggagtggtggatgactaaaggctataaactacttggctataagttagcggataatattttctactgcctgcatcatcgggaaattatcacgctgcgcgggacacggacgcaagtccagctacgcagcaccatggcctgtttactggagtacctgctggcgcacggcagagaacgtctggtcagcgatgaagagttaatgattaacgtttgggaaaaaaataatctccgcccttccgcgcagcgcctatggcaggttattcagagcttaaagtctcgcttacaccaggctggcgtggagagcgcgttaatcatccgcgttaagtgcgcggggtattatattaataacgtttacgtagccgaaatttattcatacaaaccgccggggatgatgaattatataaacacttcgcctgctgatatgaataagcttctggtacgcagctaatcccctccccgcgccgtttacatcgccagcaacagggtttattcgttgaatattttaattcacagcaataatatttattttaatatcggtatcgcccagtgttttcgggatattcagaaaacagcgcccgaattaaaggttattcactccctgcccctcagccatcttccagaactgtccgggctggatgtgattattttgtcactggaaaactatcatgattacctggctgccgctgaaatcgctcagcactttcagggcctggtcattggctttacgtcagccggcaacgtaaggcgcggacgcgcctttttcgcggataccctactgtgggtcagccagcgcgaagcggtacgtgaagtgagccgccttctgcgctgcctggccgagcgccgctggccactcgtgccgcgtcaccaacgtcagagcgtttctttccgtcaacgagccccgctcaaccgcctggagatgcggatgattgatgccaccatgaagggtcagtcggttcatcaaatggccgctacgctggggattaatcgcaagcgggtctataacggcctggaaaggattaaagtgaatttccgcctggtcagtcatagccattttcatcatttcatgaccgacaggctctcttttagtcgcctgtctgccgacctccgatgcctgaccacagcagctaatgcaaccctgccgccgcgcgcagcctcgcggctggcggaaaatcattcatattatttgaaagagtttcgcaaattgttttgattttaggctccagcaatcaagcgtattctttatcacatcagggcaacaggccctttatcagacaccaaattaaggaatacgaccatgaaattcatcaaaactttcgttgctgttgctgcgctatctctgttctctgctgccagctttgctcagagcgtcagcgccactgcctccacgctggaccgcgcggaagctaaaattgccgcccaggccgcagaacagggtgcatcctataaaattaccagcgcccagtttaacaaccgtgttcatatgacggctgaactgagcaaataaacccttgcccctaaacgtttcctaaagcgccgcctggacggcgctttagtttttcccccttcctgacctttcccggcaggtccatgcggcattcgccggatcccggacaatactgactctcagcacaaaaagagcctgatagcaataaatacccgattggctggattatctgcggcttgtcggcgtaaagcggagaggtctgtcgccgcgaatcagtcggaggccttccgctgtctgcaaagcggcgcccattttggcaaaatttgcgtggcgtggtgagggtttgcagggcctccgtgccctggaaagactttattcgaaaaagacgtccggattttccgacagcgaaacaaaggatttcgtgtttttatccagcgcctgaatatcgccggtttcgatgtcgtagaaccagccatgcaggcgcagggtatggtcgcgcagaccaaccgccaccgaaggatgggtcttgatgttattcagttgggcgatgacgttttcctgcaccatgccattgaccttatcggtttcgctagcccaggttttcttttccaccaccgctttcgcggcatcggcatagcgtagccagtgagacaccgccggcatcggctcaaggcactgacaggtggcgatcgctttcatcgcgccgcagttggaatggccgcagatcacgatatccgtcacgcccagcgcaaccactgcatattcgatggtcgcggaaacgccgcccggctccggcccgaaagacggcacgatattcccggcattacgaatgacaaagagctgtcccggctcctgctgggtaaccagttccggcaccagacggctgtcagaacaggagatgaaaagcgctttgggattctggctggaggccaggctgcggaagagttctttacgctgggggaagatctctttctggaagttgaggaagccctcaatgatatgttgcatagcagtgtctcttctctgtagttattacggtatgacaaagatcacagttattcagtttaccatcgatgacaagaatgggaatcgttattcaaacagttgcgcagaaaacgcgcgccgccaacgcctgcttctccccgtctaatacacacctttttgacgtgctttcctgaaccattttgctactctgtctgctccaaccgtccacacgttaccgaccgcctgcctgcggcggacataacaggagtcgctatgttcctatccagcctgatggccattgccgcggtgctgatcatgggcgtgatcagtcccggcccaagctttatttttgtcgcgcgcaatgccgtcgctcgctcgcgtctgcacggtatggtgaccgccctcggtactggcgccggtgcggccattttctccattatggcgatgctgggcctgcagaaggtgctcaccgcggtgccggagctgtttattggtttgaaggtggcgggcgggctctatctgctgtggctgggctataaaatttttcgcgggtcggcgcagccgatggacttttccgccagcgggatggccggcaaccgctctttgctgaagaccttccgcgacgggctgtatactcagctcagcaatcccaaaactgcgctggtgttcgcctcaatttttaccgccctgctgccggcgcagatccccaccgccttctattacatcgtgccgctgatgagctttctgatcgacgtcagctggtattcgctggtggcgctggtgctgtctgctgaccgcccgcggcgcgtctacctgcggctgaagcggcggatcgacatcgccaccgcgacggtgctgggggcgctgggcctgcggcttatcgccacctccctcacccgctagcgggttacacggtatagatgcgaatatcgtgctgctgaaaggcaacgcgatattcgcgactgatattctcttccaccaccagcacatcgatatcgctgctggcggccaccacaaaccgcgctgcggccggaattttatccgaagtcagaccaacaataatttcgctgcactgtttaatgaccgctttcttgaactcgcagtcggcatagtcaaagccggtcaggcccgactctggcgccatcgcgcagccgccgataaacccctggtcgaataacatgccctgcacctgagccaccgccgcggcgccgacgcaaccgccgctcgcgcgctgtacctggccgccaagcatcaccacgtcatacagcggttttttcaccagtaccgcggcgatctccggcgagttcgttaccaccgtcagcgccagctcggtgggcagcgcctcggccatcgccagattggtggtcccggtatcaatgaaaatagtgccgccgggcttcaccagccgggcacactgttgcgcgatcctgagctttatcgcgcggtttttatctttccgctcactgtaatcccccgcttccggcagactcagcaccgccccgccatacacctttttacagaatccctcgcggctgagctcatgcagatcgcggcggatggtatgctccgacacctgaagacgcgccgccagctccgcgcacaccactctgccgttttcctgcaggatctggcaaatcagcgcttgtcgctgttgagggaaagcagcataatcgagcataacacaatccttaaatgatcaaaaccgagcagtagcaagcatgatcgtctgccctgctctggttgtcaacgttcctgcccggaggtttaccatgaaaattgcccatttcgccctgtggacccaacagctcgacgtccaggcccgcttctgggtggacttctttgccgccagcatcaatgaaaaataccttagccagaccaaccccggctttgcctcctattttgttactatcgacgacgaggtggtgatagagttgatgagcaagcctggcctgcagcaggccagcgcggataataaccataccggctgggcgcatctggccctctcggtgggcggggcggaacaggtcgatgccatcgcccaacgcgccggggccgccggaatactgatttcgccgccgcgcaccaccggcgacggctattatgaggcggtgatcgccgatcccgatggcaacctgatcgaaatcgtcgcatagtcagcagaacgccagtattcaggaggcagccatggcacattaccggattatcgacaccgcatcctggccccgccgggaccatttcactttttaccgccaattcgccaaccccagctttaatctctgcgtgccgatagcggcgcagcgcctgtacgaatgtgcgaaggaccgtcgggtctcgttttttcagctcgcgctctatgccctgctgcgcgcggccaacggggtaccgcagctacgccagcgagtgcggaacgatgaggtgattgaatatgacagtctggcagtaatgacgccggtgatgaccgtcggagagggattccgtcaggtgtggtgcgacaatgctcccgagttcaccgccttcagcgccgcggccacgccgaagattgtcgcggcaagagagacatccccggcgccgctcatcgtcgatggcgagcattttatctgcgccagctgtctgccatggctccacttcacctcgatgacccatgcggaatatgccgtcggcgcggcggtccccgcgctcacctggggaaaattgcagaatggcgttatcccggtggccgggcggtttaaccatgccttcgtcgatggtctccacgccagccgcttttatgcccttgtcgaagagggatttaatgaccccgagcggctctggttgccgctaaccgaaaccgcaccctccctgcttcccccagcggcgagggagcgttaacgtctgcccggaactgaccgccagggaaccttactccctgcacggcggtcggtacggggccactatcatcgttccctttcagccggcgaataccgcgcaggtgtgacgcctgttcagaacctcgcgattgaaaagctgggtcgcagacagcatgctgaccaaccatcatcagacagcggaaaccactgcttcatagccataaaatgggattatattgccgatcctttgctaaggataattagttataaatcatagcgtttcagtgttagacagggcgaagtgcgcctcttatctttcgtcatgaattgtaaataaccacgcaatcatttgatgaggtagcacttttgtccagattacaacaaggattaaaaaccagacaaacccgcttcgccctggcgctaaaagtggccctgctcggcggcgtggtagcattttcttctgttgcccatgcggaagtgatcctgaaagaaggcatcaccccggccactgacgccagccagatcccggccagcgccaaactgcgcacagacacggtggtggccgggatctccgagccgcaggggatctttaacccctactttttcgtcaacggctgggatgagaacgtgactaacgtcattttttcacgcctgatcgactgggacagccagggcaagctggtcccgggactggcggagagctggacggtcagcccggataacaaagtctataccatcaaattgcgccctggtctcacctttagcgacggctcaccgctgacggcggaagatgtcgcctttaccctgacggtcctgctcgaccccagctatgatggcgataccgacatcaccctggccaatatcgccggcggggcggactacaaagccggcaaggctgacagcgtcagcggcctgaaggtcatcgacccgctcaccctgcaggtgaccaccacgcagccaggcgccaccacgctggccaaaattggcgggcctgtactgtcgaaagcctggtacggcaaagggtatcagcgggggaatctcgactatctgcgctcactgcacggcaagccgctgggcaacggcccttacgtgtacgacaaatatattcccggtcaggaaatacgcttccatgccaatagccatttttaccgtgggacgccgccaacgccgcgctttatctatcgcgtgaccaatccgtccaccaacttccagctgttccagaccggggagaccgactacgacgcctttacctcgcgccccgacgatattgagcaactgaagatgctcggcttcgccaatattaatctttacggctccagcgactacagccaggtggaattcaacgtgcatcgcccggcgctacaggataagcgggtgcgccaggcgctgatttacggcctggataggcagaagctgatcgacgtggtctatcagggatacggcaaagtcgccatcgaaccgatcgcgccgatctcctgggcctttaacgctgaaggcgtcgacccttacccttacgatccggcccaggccaaaaagctgctggatgaggccggctggaaaccaggagccgacggtatccgcgccaaagacggccagcgcctggagctgaccctgctggtgagcaagaaggtgctcaacgatgcgctgatccccatcgccaaggagaactggcggcagattggcgtgctgctgaagccgcaggtggtggatttcaacgccctgatggcgcagcgcaaagccggaaattacgatttggcctcgttcagcaccagcaccctcaacgacccgcacgacggggtatgggatttctacagcagcgaagctaaagagtccggctaccataacgcggaagtcgataagctgattaacgccggcaacgcggtgctcgacatcgaacagcgcaagccgatctaccaccagctgtataaagtgctggccgacgatccgccggtgatcctgctcggctatcgcgagatcctttccgccagcagcgcccgcgtcagcggctttaagccggatatctacaacggcctgaccggcagcctgccggatgtaaaaatcgtcaaataaatccctggccgccgggttaaccggcggctgatgtgagaccgtcatgagaaatttcatcctgaggcgcctgctgcaaacgctgccgatgctgctgctggcctccttcattatttttttgctgtttgccaaaacccccggcgactttatcgatggcaatatcaccctgaccgctgcccgcgccgcggagctgaaggcgatctacggcctcgaccagccgctattgacccgctacctccactggctgggacagttgctgcgcggtgatttaggcttttcgctgcagtatcagatcccggtcagccagttgctcaaccagtacatctggaactcttttctgctggccagcgtcgcgctggtcttttactggggcatcggcctggcggtgggcgtggtttctgccctgcgccctggctcctggtttgatcatctggtgagcgtcgcggtgtttgccgccatgtcgttccccacctttttcctctgcctgctgctgattaaatggttcgccgtcgatctccactggctgccggtaggcgggatgaccaataccggcagcgacgagagcggctggcagtatgtgctgcaggtggctgcccatctggcgctgccggtgctggcgctggtgatgctgcaggcgggcagcctgacgcgctatgtgcgcgccagtatgctcgacgtggtgaaaatggattttatccgtaccgcccgcgccaaggggttgcaggagcgcacggtgatcctcaaacatgccctgcgcaacgccctgctgccgattatcaccctgctgggcttcgagctgccggggctgttctccggggcgatcattaccgaaaaggtattcaactggccgggggcgggccacattcatatcgactcgctggccgcccgcgactatccggtactgatggggtttaccctgtttctggcggtgctgacgatcgtcgggaatctgctcgccgacgtgctgtacgcctgggccgatccgcgtattcgggtgaggtcataatgatcctgtcttacttagcttcccgtcgccgccagcggcaggcggctatcccggcgctggcgcacattactccctctccctggcgccaggggtggcgacagctgcgccgtaaccggctggccatgttctgcctgctcctgctggcggtgatggcggtgtggtgcgtgctggggcccgtctggtcgccgtggagtgatgatgccaccgacgccctgagcatcaaccagccgcccggggcggaacactggctggggaccgatttcctcggtcgcgatgtctacacccgcctgctgctggccgggcgcatctcgctgattatcggcctgctgaccatggtgatgtcggtgtgcctcggctacctgctcggcgccctctcgggttacgtcggcgggttaaccgacaaactgatcatgcgcgtggccgacctggtgatgactatccccgggttaccgctattgatcgtcgccggggcgatgctttctgagctcgatttttcgccggactcgcgcatttatatggtggtggtgatgctcagcctgctggagtggccccgactggcgcggctggtgcgcgggcaatgtctctccctgcgcgaacgcgattttatgctggccacccaggtgctgggcctgtcggcgcgtcgccggctgtttggccacctgctgccgaataccattccgattctggtggtgatggcgaccatggccgtcgccaacgccattctcagtgaatccgcgctgagctatctcggcctcggcgtggtgccgccgacgccgtcgtggggcaatatgatggatgccgctaacagcctgatcgatttccagcgccgcccctggctgtggatgccgccgggcatcgccatctttatcaccgtgatcgccatcaacgtgctgggcgatggcctgcgcgatgccatggatcccaatatgaaaccgaggctgaaatgaccacgccgttagtctcctttaatcatctctccgtctctttcgccggcgaacgctctcgcgtgcgcgcggtgcaggaggtctctttcaccattcaggccgggcaaaccgttggcgtggtgggtgaatccggctgcggcaaaagcgtcactgccatggcgctgatgggcctcctgccgccgcagacggcgcgcatcgacggcggcgagatccgcttcgcggaccgcgatctgctgcggctgaaagccagacagatggccgatctgcgcggtcaccagctggcaatgatttttcaggaaccgatgtcggccctcaacccggtgttgaccatcggggagcagctgtgcgaaccgccgatccgccacctcagcgccacgccgaaagccgcctggcatcaggccatccagctgttaagcgaggtcggcctggcgcgcggggacagcctgatgacccgctatcctcaccagctttccggcggcatgctgcagcgggtgatgatcgccatggcgctgagctgtcggcccaaactgctgatcgccgacgaacccaccaccgctctcgacgtgaccgtgcaggcgcagatcctacgcctgctgcgggatcgggcccgggccagccagatggcgatgatgctgattacccacgatctgggggtgatcgcgcagatggccgagcaggtggtggtgatgtatgccggacgaattgtggaacaaggcgccaccgcggaagtgctacggcatcctcagcatccctacacgcgggggctgatcgcctcccgaccggtgcccggtgagcggcgtcggcggctgtactcaattcccggccaggtgccggatctggccgccctaccggcgggctgcgcctttgccgggcgctgcgagcgggcgacggcgcgctgccgggaggcgattccgccgctgctcggcgaccgccaacgggctgcctgcttttatagcgaatttgcggaggtgacagcatgagcgaacgctatgtcattgaagtggatggattgaaaaaatattttccgctacgcgacggcctgtttggtcagcagaccggcgagcttcgcgcggtggacggcgtcagctttaatatccgtccgggcaccatttttggcctggtgggcgagtccggcagcggtaaaaccaccgtcggccggaccctgcttggcctgtacgagaagagcgccggcagcgtgaaatttcacggtcaggagctggccgacctgaccgcgcctgccctgcgcgctatccggcccaggatgcagctggtgtttcaggacccctatagctcgctgaacccgcggctgcgtattggcgacgcgattggcgaagccatgctgcagcacaaactgtgcgcccgcaatgagctatatgaccgggtaatcgacgtgatgaagatctgcggcctggcgccggaacactatgcccgcttcccgcatcagttttccggcggccagcgtcagcggatcggtattgcccgggcgctgatcctcaacccggattttatcgtcgccgatgaacccatctcggcccttgatgtgtcgattcaggcgcagatcatcaatttgttttccgacctgcgcgacaaccgcggcgtcacgtttctgtttatctcccacgacctcggggtggtggagcatttatgtgacgatgtggcggtgatgtatctcgggcaactggtggaaagcgccagccgcgatgcgctgttcagccgccccctccatccctatacccgcgccctgatggctgcggtgccgaccctcgacccgcacagcgaaccgcaggcgctggtgcaaggcgagatcccggatccggccaatccccccgccggctgccgcttttcatcccgctgcccgctggccagcgaacgttgccgcagagagcctccggcgctgcgcgaggtggccccgggccatcgggtcgcctgtcattgggtcgcatcctgagcgcggtcaatggggttatttatttctaaacaaccgaccgattgtgcgcggcagcgccaggatttactgtccgccccgtcttgtgagacgcgcgataaatgaagcggaacatctttgtactcttttgcccaatggcttcgggcattttttctccacgcccgggagcgatcctcccggcaagatatttagcggggcgcggtcgcccgtctgtcaaaacgcagcaatggaattgctcgtccgcgtcccgctacccttttcccgccgctaattaaataagggcaaaaaaataagacaacatgagattgcctggggtatagctttatcttattttttaagcgtgtactccctgttaaggtatcaacatcatgcttaagcgtcgcactctcaaaacagcactggcggcggttatttctcttgccgtcatggccgcgccagcgtatgccaacccgggtaatggcaatggcaacggcggtggtaatcacgggaacagtggtaaccatggcaatagcggcaatcatggtaacaacggtaacagtggcgaccatggcaataaagggcaaaataaaggccagtccactgaagatcacggcaaacggaaaaactacggcaagcccgaccacgtcgacagcgatattagcttctcacgggcgcgctcccttgccgtaaactacggtctggtcggctatcaggcgctgccgccgggtatcgccaaaaatgtcgctcgcggcaaaccgctccctccggggatcgccaaaaagaccctgccggcttccatgattaacgacctgccctattatccgggctatgaatggcgggcggtcggcgatgatctggtgctggtggccctgagcaccgcgatcgtcaccgccgtgattaacggtgtgtttgactaaatcatctgcttattgaaaagcctcgcctcggcgaggcttttttgtgcctgatgccggtgagtgacggctcaccggcataaccagtatgataacggttcaaccaacccgggaccgactatggacaaagacacagtagtaacgctgttgaaatacaagcgctggattgaccttgccaccttacaggcgatccgcgcgattgacggaacgggacatggcgaaaagcgtcacctgaccatcaggctgatgaaccatatccatgtcgttgatatgattttccgggcgaacctgcgcggcaggccgcacggctacaccgcgctgaatacccctgagacgccaaccgttgatgagctggaaacggccatgaccgcctgtacggacgaatacattcagtacgtcagcgccatgacccccgccgatttccacgaacgtatcgccttcaaatttgtcgacggcggcgacggcaatatgaccgcgatggagatgctgaaccacatgctctttcacggcgcctatcaccgcggcgcggtgggctggatgattggcgaatgcggcggcgtgccgccgaaagaggtgctgaccgttttcctgcgcgaccatcattcctgaccgagcgaaaccattcgccgtcgattacgcggagaatcagcaggagctctgcctgatgtcgagtatgggttttctggtacagggcgctaaggtgggttccgatcgtggcgatagatacgcccagatgtaaggctatcaagggggttcaggatccactgtcgcgggtttggatagcgccccccttccggcataacgtcagccagatcatcagggcgcacagcagggtgacgaccgccagcccgctaaacagtagcgtataagcagagtcatagctctcgcgcagcacccggagggaaaaatcaggcaaaagcgcagccgcctgcggcatattgccggcccccagccagcctgcggcgcggtcaatcacctcaggcgcatacccgtgaacgcgactctgcagggtcagggtattgcttgccgttaataccgcggagacgaccgccagggcgatcccctcgccagcaacgcgtacggtgttgaacaggcctgccgccataccggctttggcgaccggcacagcggatatcgccaggccatccatcagtccccagggaagcgccgcccccgccccacagaggatcagcgccagcaccagctgcgggaggtggttactgtgaaaagcgttccccagcaacagcaacccgacggaggccatcatcagtcccgccgtggacacgtgccccggtgaaaaccagcgggtgagcagggctgcaacggatgggaaaaccagcatcggcgtggtcagcgccatcagatacagcgcgctctgcgactcactcatcccctctccgcccataaaatgcaggggaacaataatcagcaggacaacgtagcaacagcaggtggcgacaggcagcaacagtacgccgacaaaacgcggatgacgcagcagggagagttccagcaccgggttgttcaccctccggcagcgcacgacaaacgccacgaacagcccccccgacgcgatgagcaaggccagcgtggtcagggataaaaaaccgcgggccggaatgaccatgagcgatgcagtaaacagcatcagggccagcgtaaacaggagtaagccgaggttgtcgggtgtccgcggctcgcttttttctgccgcgggcagatacgccagaccgataagcagaactatcgccgagagcagcgcaaacagggcgtatacgccgcgccaacccaccgcgtcggtcatgaagccgatcagcagcgggccaaacgccaggccggcgccgaacaccgtgcccaggatactgaatgcccgggtccgctgagcgccatcatacagctgggccagcgccgcactgccgctggctaaaatcatcgccgcggccaggccctgcagagccctcaacacgcctgacaggaagagattgtgcgtcaggcaaaacagcaggctgctcaggcaaaacagcgcggcgccggcgataaaaatacgttttctgtcgatggcatccgccgtcacccctgcggccagcaaaaagctgccgaaggtcaacataaagccattggtcagccacgacagcgcagcgggagagccgcccagcgactgctgtatcgcgggggtggtcatgacgccgccggtaaaacttaacggcagcagcaaggccgccataaagacagaaagcgcggccagggcgctggcgtatcgggaaggtgttctggcggtgagtaacatcgggcggccctcatcagtcggcaaggaatgaataaactgtcgccatcctattgcggatgttattgccgataaatagactgaaaatatcttcttaagagacataaggtttataatcaatggacagcctcacctcgctgacgtcctttgtccgcaccgccgaaacgctaagctttgttcaggccgccaggctgctgggcatatctgcctcggcggtgggtaagaatgtcgcccggcttgagcataaactgggggtccgactgttcaaccgcagcaccagaaacgtcagcctgacggcggagggggccgcatttctgacgcgctgccagagtatcctggagcagatccaggaggccgagtcagagctgaccagcagtctctcacagcccaccggcaaactgaggatttcactgcccgtcattggctaccgcctgttgctccccgccctcaccgcctttacccgtctttatccgcaggttgaactggatctcgactttagtgaccggctggtcaatctgatcgatgaaggatttgatgttgctatccgtagcggtgaattagcggactcccgcttgatcgccagaaagctgggaggctttcgttttgtgctctgtgccagcccggcctatctggcggaatacggcgcccccgactcgccagcggaattggcggcgcacaagtgcatttttttccgcttccccgcgacggggctgatccagccctgggaactgcgcgatatgcggctgacgggagatttcagggccacggccgtgatgacggtcaataacattgaggccgccattcgcttaagcgcggcggggatgggcatcgcttatgtgcctgattttgtcgtgcgcgaggccatggatgagggacaactgcaggaggtgttgcccggctgttgcgtcaaggatgggcatttctccgtcctgtggcccgccagccgctacctgtcaccgagaatacgctgttttatcgattttatggctgcggcagagatacccttgtcacccgcatcggcgccccctaccccttgtgtctaacaatttgtggtgattagctacccccactgaagcagagtgtgccgcccccttcccctaaggtcagaaaagtctgcaccgctgaatcttgatttgcagcacatggcccttcgctttacctttcacaccagttcatctgggtgaacggttacctgagttgaaggtccgctgcgagcgaacagcggaaattaacatacctttgaaagtggccaaatttagctatccactacacagaataagaaaaggcatcttctagcataaatgcccgtaaccgataaggtaccgggctattacgaaaccttatttctaagccatcgtgccagcccggtgtccagtatgagttctgcaagcctcgtgggcccaatcatagtgacgccttcagcacggagatcctcactcaatgtcccatgatgccagacaaagaacatccgatcatagctgtcactggtttggaaccgtgacagatagtcagagaatacagactgctcagcaacagacttcacttgcacaaatgcccgttctccggtggtgggcagttcaagctcaatatcgacagtcttctgtgtcctgccaaggctcccggttcttctccatccgctggcggagaaaatcagatctacgagcaactcaaagtcctgccaggtaagcaaactacacagcctggtaatagccttcaggtactgagctttagcaatatcagcgctgatgatttccggcgattgctcatcattgattgttcgcagggcgtaatcggccaaacgcacatcgcagatggtcccccggtaattctgtgtagcgagtaaagcaccgctcaggacgctgtgggatagaaggttcccggccagactatggctgtgccatccgctcaccgtggggcgggtcctactgccatcatccagttcgatgacctctccggaaggctggcaccaatgcaataatccctggctgaacgtaatgaagagtatatcgggggtggcggtgtaaaacgtccttatctgtctgacatcactggtggcagtggactggttatttttcctttcttctaaccagactttattcacatcctcccactttccctcaaggcacatctgatggggcgttttgtggtacccaaacttaataatgccagatgtcaggcactcatgttcccattcgcctccctctcccagcttgatatatttaacagcagtcgcctggatcttttccaaaatgcaatcactccgctaaaaaaaattcctaactgaatgttcttactttatctctgaacagggtgtaaaggcgcgcatttcctttaccgggataaatcagcgtggcgccagatggtggtgacaatacgcgtcataaagagataataggacgtacagtaaacggaattcccgtaccgggtgcagttggtctgcacaggtgctttcaagacatcattgagagactgggtctggcgttcctgttgctccagctggcgctgttggtcgacgctggccagtgcctgattctgcctgtaaatatcagcactcagatgattacaatctccttttgtgatcggtttattcgtaaacgttttgacagcctgttggcaacgttgctgatattccgcgctatcgtagttccacacgtccaagtattttccgataaaactttttccggtcccagctatctggtaatccataaggtcgttatttaaataaacgtcaatggcgcccgccatgcccgccacaaaattatattgactgtcatccacttctgattttggaatggcatacgagcaaagagaaagtggcattacgcccgaagatgcttttttatttcccaaacattccaccattttcatcaaatatctccaacagttcatgaactctcatgacttcatcaagaataggttgaacattatgtctttcccccaatacttgataaattccatcatttagatagtaggctctgaagatgtgatgcggcacatctgtttcttctggtttgttcaagattagacttgggaagatatttcctacaattccaccttcaagatacatatccagtcgttcatcaaagtgctctattgcattcctaagtttcttatcatgcaaagggctgctttctgtcacatcaaaaatttgcctcagaaactcagcacggttcttatgtaaaaccttctcaccttttccaccaatcattgatggaaagaagtaccgagctatagcagcactatgattgatgaagttttgtagacagtctagaagctcatctttccgatcttgtggccctagcttcccttcactgatagcttggatgtacttagatgctctatccacggcctgtagagccgatgttgtattgaacaacatcgattggatatagaagacatggtacggaggccatattgatggctcatttttatccattttctatcctttactagattgtagtggcataccgattttagccacattagcagaagtgtggaatgtccgcttctggcacagagcagacaagctacctgagttgaaggtctgctatgagcgagaagcggaagttggcaacgccaacagctacatgactaacattgaggaattttaatcatcggggagtaggtcaaatggaccagctccccatccgctaagactaaccacagtaacaacttacgcttttgaccagacctatcggttatttatgaccgatttcgacccaaagtcgcatgtggataatttaaagactcattgtgatttgacctgacagtagctgtcaaatgagtttgagctaccacagtttattgtgctatttaagagtggctatcgatgtcgaaaagtggtcactctttctggatgcctgcaattttctattagggccgcgagaaaattatcctcatgttcatcaggaaagagcacatgcgacgataaacgttcagactccggcagttcgaaatcgattcgaatcgctccaacaagatataagcccgcaagattaagtgcgtacggacctgatcggcagattacacatgattgcctctccggtctaagtggctgtaaaccatgaagaactcgatcgtgtgcatacaccgccatttcattttgtttatgcttaaacaagtacaggatggacttcgaaccgttacttccgacgaactggtaatgatcattgccagcattgggaacaaaacgatgactcgcaaaaaacattgccactcgcaaatcactgcttaaatccaaatacggcgaaaacagtccatagtgctgcagtagagtattaagtaggtcagccagattgtaattatggcccatactcaaatccaatcgaacgcggccaaagagactcactaaaggatcatctgaatcctccatatcttgtgctgaatatatcgactcacctcgttttatgagttcgtttattcgtcgatccacttcctcgatgtcgaattgtgaatagataatcttcgaccactcatacaagttaataccattgaaatggtgaaatgatcgcggatgattctggaggagatttcgccaaatagaaggaataaaagaagtctcgccaagcccttcgataagaaagtatggatttcttattgggcgagtaatctcgtaatgcataatctgcccacggaacaatagtttttgccctagagattcttggattttgttaacctgcctcgttaattcgtcatatgattttgctgtgtttaaaaaaatatctttacagaaggtcttaccggactttgctatctgataccactcggtaaaattatttttgtgaatacgtgtggcaagatccgaactggctagaggtccgccatagtaacgatctataattatgtcaccacccatattcacataccctgacgagattagcgcttcggcttctgcagtttggatgccaaggtcagaataaatctgtcgagtcttctctaaatttggggggtaaaaattatttggccaatcaaagtcattactgtagtaattccaatagttatcataattcgccatgagtttcttattttccaatagttgactaatactaacgccaatacataaaagctttttcttctaaattaaattttagcgaaagctttcgaataagctttattatcaccaatgtagacacttgtcaaataaaactggtcgccaagttagattttttcatgtgaaggttttccgattcgtttggtggtcagttgactcaacgttatattcatacagccatagaatactgtaatacttaacgataagtgaaccgccacggataatttagacatttccttgccagctcaatcacgctagtaaggttccccccatgtagccaatttgtcagatgtcgggtcaatacctttctgaacatatgaatctgaaccgatatcttctagtaacttgttcctcaaggaaacatcaacccggccaagtaaggatatattgtcaatatgttctgaaccacacttgcagtcttcctcatgaataacacgttcccaacagccgttactatcgattagatagtgcatcccacagaagcgaccaatactcatgatacgcaaccctggatgatcgataccatattcaaatacacatacaatattttcaggcatttttactattccaacgcccttcccatatcttgtgtccataccatggtaaacaagtccatcaagttcaattgatatctcattatacttttctaatagcttgttgatttcaggaagaacaaaacaagggtcacttacaccatgatacagggcgcttccacatagaatctgaactatttgtgaagagataatggccaaaccgtccggaggcggaaggtccctagtccaaaagggtctatacattgcacttctagaaggcatgcgtttttgaaggtgacaggaatactctggtaactccaatgacctcttgaacgcctcaagaccttcatccgaaaggtgtcgcatcttcacccatggcattgccaaaagttcgcgataaacaggatcctcacatggttctggaaatagccagccaacactatatccctccgcatatttacgcagaacctctgctggagcgctgatatgacaaataatacagtctccatctaacccttcacgaattaaaggccccaccatgtacgcatcctgtcgcacatatcttggagcgccatgatctgtcgcaatttcggatagatgaacagcttgaagattgtattgtcgtagtaacttctggcttattaaataaatgtggccaatatcttcggatggagcgaaacaagcatttagagtacgcaaccaaactggatcttcaaagcaatcctctaccaaattgaccacatacttagaatcaaatttattacatgcaaaccaagcagcaacacgcggatcgccactaacatcaaggaaaaaggaacgaaacccataatgctgaaggattgcttggttggttgcattatcgccggtatcattccaaccgcgtactaagtgttgcaaggctctctttgcataataggtccacataatcatcaaatctggtacgcacccttgacgctgaaatgacgtgggcattgagggcgagccatctgaagataggtaatgtttagtttgtcctctgtagagaactcctggcccatattgtttaataactattttgagttcttcgagcgtctcgcaatgacaatgttccatcccacctctccattccaactttaatagtcgaataaatgctcttgactcaaatttagtgtgccattatacctattcgtctaacatcatcccttgttaggtacaacctcgtcggatagaagcttcttggattgtaaattttggacccaactcaatctgtagcgcatttattctaagaccaaaaaaatcaaaatgctgaagatcggtttttaattcttcaataaatacggatttataagcatttgcatcaaacccttggaataacactccagcattatccaatgcagtaaaaactctagaaacagcagaattgaatatcggcaacaagtccaaatacacttgctttgcggggtatcgatctactttcgttttttcccacactttttcaaaggccaagccattttccagagagacgaatctggataaagcatttgctttacccattgggtttaagtagtccgattcgctgcgtggatctaagcgactataaacatcttctaactttatcaaatgcatcatcaacggaggattgccacctgtcgttcgatgcctagcaattaaatattcagccccaagtagacgctcaggtttcccatccaaccaaatagtctggagaaggctatggaatagaggatgatcgcggtgatgaagagcatttcgaattgaaattaagaggctagtctcaggatgctcatggaagtcaaatatcgcttgtgatacatcatataacgtatgaaaaccctcaagattttgctcaaatgctcgatctaggttgtggatagcctcttcacggtcgattgctaccaattctcggtatcttaaaaatgcttccccatagagtcgcatattgttggcaaaacgcccaagagcattagtaataattgatacatcgcccatatcaaccctcagcatcttagtatttatagactcttcttgtgagtcctcggttggattgcataatcatataatggcgtactgaacatagctatcaatagcgcagggaatgtccgctcctggcacagagcagacgttaacacctacagcatcgggaagcttctgaatgccgcgtcagcggcatggaggtgccagatgaggttacatgtgtctgtggagtcacatggcgccgaaagcccggtgtagccggttaccgagctataaattcggtccccctgccctggttagccttaacccactaacagcaataaagaagttaaggtaatccctttaaccccggtgagctggctttacggcgtttacgacgtaaaggacgtgattttcagggccttaaccaaggtagcttgctgctgacgcttaggggatattcttcagttatttcaacgacaccagggaacttaacacggtagctgaaaagctcagcgccggatatcctgccgcccggccagcgaaagccggcggcaggtatacctctcaaggcagcatcttaccctttggcaaaattggcctggatccgctgctgcagataatcctcggcgctgatgggcgggtacttcctctgcggcccgaggatctcgacatctttattggcctggcagaaaaacgccaggctgtagcgcggcccctgatattcgtggagcagcgggtttctcacccggtggaagttagacggcagctggtcgtcgctccagcgcatcagcatatcgccgatattacaggtgatcacctcctcgcgcggctcaatgctggtccactgctggctttcgcggtctttaccgggacaaacctgcaggccgccctggccggggcgctggaacagcagcgtcagacagtcaaaatcggtgtgcgcgccggcccgccacatcccctgctgcgactgctcggttgcatagtaatgcagcatgcgcaaggtgctctgataggtgtcacgctgcggatcgtgcgcggtggtgaaaaacgattccggaaaaccgagcttcaaagcaaagcaggagaggatcttcatccccagctgccagcactgcgattcaaacccgagcatcgtctgccggaaacctggcagctcccgatcgctgggccagcgcccagccatcaacggccgggttatctgatacgactctttttgatccggggtgcgggtcgacggccgaacctgcgctttgctttcccagccggcgttaccggccagcggatactggcgcttcacctcgtcgggctggtcgaaaaacgcctcggtcatgctgaacgcctggcggatatccgccagcggaataccgtgatggctgacctggaagaagccaatctccaccgccgcctcccacagttgttcggcaatgtcattttttcttgcggcaaagttcgacaggtcgatacagcgcacttcgcgggcgaaggtctcttcaccctcggcgcccatcagcgcctctttttccagttcctgtaaggcgtagcgttgattctgggtggttgcgttcatcgtcattatcctgttatcagttaaacagcggcgcgctgttggagggtacggacggccgccagcgcgtcgtgacgcatcgcgtcaaggtcgagaccgggaatggcgtcgtcttccacgatggggcggccattgagcagtagcgccttcagcgcggcgcgcccaccgcaggccaccggcccaatggccatatcgtgcaggccgaagtagcgcggatcgtccagccggtaaatggcaaggtccgcctgcatgccgacctgcagggtgccgctctgcgctaagccgaggatctgcgcccctccggcgctgccccagcgcactacatcctccaccgtggccgcatcggccccaccctcaaaggtgcccccggcgtagcgcggctgcgccagcatccccttgcgcgcgcgctgcagcagccatgcggcatgggcttcgctttgcatatccgccgcttcattcgaggcggcgccgtccacccccagcgagaccgggaccccggcctgctctaacgccagcagatcggcgatgccgctgcccagccggccgttgctttgcgggcagtgggcgatgccggttccggtacggcccagcagggcaatctcctccggcagcagcttcaccagatgggcaaaccacacgtcatttcccagccagtcgtgttccgcgcagaactgcaccggcgtcatggcgaatttctgccgcgcggcgtcgagataatcgacggtttccgataaatggctgtgcaaccggatccccagctggcgggccagcttcgccatctcccgcagctgggcgcccggcgcggagtgcaggacggtagtgggcgccatcaccacccggcgcagagactcgggccgggggtcgtgatagcggctgaccagccgtttgacatccgccatatagccgtcgaaggtttccggacgcagcgccaccggcagatcctgttccaccgcccggccctgggtcgccccaccccggcacaggacgatgcgcatccccagcgcttccccttcgctgaagacaatctccgaggtatcgaaaggcatatccggccagtacaggtagttgtgatccgccacgctggcgcagcccgagcgcagaagctccaccaggccaatgcgcaccgccagacgaaaggtatgttcatcgaaagccgcgcgaaagcggtacggcgtggcgctcagccaggccgtcaggctctggttcagcccctgcggctcgcccttcagcagcgactgaaaaagatggtggtgcgtgttcacccacgccggatagatcacgcagtcgcgggcatcgatctgtcgctcttccggcagcggcgtcaggctgccgatggcggcaatcttgccgtcgcggatgcgaatatccggcccggccagccgcgccgcctctccgggcagaccgctgaggatggcatgggcatttttaatcattaatgacatggcgtcgctcctcagggtttaacctgcatggcctgaacaaattcggtggtgtaggcctgtttccagtcggtagccgccgccagcagaccggcgctgaccataaagtcgcgggtcttctgccagcgcgcgtcggtcatcgtcccccagccctggctggcggcatccccgccgtcgatcaggtgatgctcacggatctgggtcacgccccaggcgagcagatcgtcggtcattttcgggttgtcctgcttaatcaacgcattgcccggcgccggatccttgagatagctcacccagccctccattgaggcgcggacaaacttcgccatcgccgctttacgctcggcgatggtatccgggcgggcgataaggatgccgccgtaggggggatagccgtgctcggaaaagaggaagaagttcgccttcactccggccttctgcacctggaacacctcggagctgacataggcctgctgggcgacagcgtcatcgacgacaaagggttgaatattgaaggtataggggcgaacctgcgcgtcgctcagctggtattgcgccttcagccacggccaccacgtcgcctgaccggagctggagaccagcagggttttgtctttcagcccctgcagggaggtgacatcggcatgggtcagcagcccctggggatcgtactgaaagggcgcggcaatggcctttgcctggaagccgcgctgaatgccttccagcagctgcaggtcgtaaccgatgatcacatcggcccgcttcgacaacagcaactgcatgccgttgacctgcggtccgccggagcggatctcgacgtcgagaccgtattttttgtacagcccggtggcctgagcctgataataccccccctgttccgcctgggcgtaccaggaggtcagcagaacgattttctcctcggcctgaacggccagcgagacaccgccgagagccatcaggcccagccagcgtatgccccggggaaggcgtgcgcctgttttcatatccctctcctctttacgccgggagggggagcgagcgaatgtggctcagcctcccatcccggtcaacattgaaccgcgacatggtgactgagcaatgtcccgtatggataacccgtactgaccgcttctactcacactcagctatacaaaaacaatgccagatttaaacgcctgcgagcggccgcgagaaatcgcctgcgccgccccccttgggcatgcaacctttgattcatgcccacaagaaacgcaccataatggtgcgctaatgaatgattttagtgcctgcccgacatttcacagctggctgaagagcatctccagctggttcagcatcatcgaggcggcaagggaaagctggcgggcgggcgagacgcacagcgccagggtgaaaggcttaagctgcggatcggttagcggcacaaacgccagctggccggactcgatctcatcgagaatatccagccgacacaggatgccgatgcccatctgctctttgatcagggtgcggatcatgtgaatgttattcgataccgccacctcctttacctcgttgccgctgatgttcaccagcgcctccaccggctcgctgatcatcaatggggcggacggcaggataaaggggtagtcgaggcactgactaaagcgcaccgcgctgcggctggccagcggatggccggtgggcaccacaatccccatattcatctcggcaaacgcccggacctgcagttcacgagaggtctggggattgagcatgatgccgaaatccgcctcgccggagatcagcgcctgctggatgtggatattgttgatggtggtcaatgtaaaagagatgttgggataatgtttatgcacctctttgagcatcgtcgaaaagaaatgccggttaatggcatcgatggtggcgatgcgcacatgcccccgccgcaacccgcgcagatcgtccagctgctcgcagacccgggtaaagtcctttttccagttattggccgcgtgcaggagcagctccccggcggcggtcagcctcagcccggtgggatggcgctcgaagagcggcatcgccagttcctgttccacgcgcaaaatctgacgatcgatggaagacgccgacacatgcagcgcctctgacgctttacgaaacgatccctgacgggccacttcagtgaaatagagcagaaatcgggagaaggcaaacatggtttgggtgctctcttttttgcaacgggttgtgcgaatcaaagctctggacgcaacagttttatcacaataccgtagcattcatagcggagaaacgatcgtttcacccattttcttgcatgccggacagttcaccgcgaaggggagttatctcttcgccgcccctggccgccctgcagacagcggaatgagggagagtaaacggtaatgcacagccacgatcttatttcggtctcggtcggggaaatacgccccaacggacagggaaatctatccataattttgcagacggcggccggggaaatattaccggcctactccgccggggcgcatatcgatattattattcccggcgtcggtccgcggcagtattccctgtgcggcacgcctgaccgcagtaatacttatgaaatttgcgtcaggctgactgacacctccaccggcggctcacgctatttgcaccagcagctcaaagccggcgatcggctcgccatttcgccgccgcgcaaccattttcccctgccgcaggccgggcgctacctgctgtttgccggcggtatcggcatcacgcctttgctggcgatggctgaagcgattgccgccagaaagggggcgctggagctgcattattatgtcgccagttcgcgccagaccgccttctccccgcgcctgaaccagctgactgcgaacggcacggtggccattcactgcagcgaggaaggcgcgtcgtttcgccagcgggtccccgaatgcttaaccgtgccccaccctgataccgcagtaatagcctgcggcccggagggttttattcagcgactgcggtcggtcatggaggaatatcgctggtcgccgtcgcaattcgtcttcgagcgttttactcccgcggcggaaaataatactgcggcgaaaaatgcgttttatattgagctggcctccagcgggcagcgcctgcaggtggccgcggatcaaaccattgctcaggtattacagcacgccggggtggaggtaatgctctcctgcgaacagggaatgtgcggctcctgtattaccggggtcctcgacgggatccccgagcaccgggacagcgtgctgacggcggaagagaaagccggcaacgaccagatcacgctctgctgttcgcgggcgaaatccccgcttctggttttggatctgtgaggagactgacgatgacgttcccctcctcttccgcgccgctcgtcgggatcagccgcgcccgactcccggcctgggcgctgcccgacggctggccgacgcgggccaacggtgagccgctgctggcggacctggcctttcgcgacggccggattgccgcattgaccccaaccgaccagccgactcccggcctgtgggacctggcgggagccctgacgctccccggcctggtggaaccccatgcccatctggacaagacattcaccattgaacgctgccgtccggcgcaggccgggctgctggcggcaatccacgccatgcacgaggatcgccgacactggaccagggcggatattcaacgtcgggcgtccgccgcgctggcccgggcggcagcgaatggcgtgacccatttgcgcagccatgtcgactggtttaccgccgacgcgccggacgcctggcaggagatcgcccgcctcgataccgtcggcatcaccctggagcgggtggcgctgatcccgctgcccttgtttcgcgagctggcgcaagcggaggccatcgcccggacggtcgccaacagcggagagcgctgcctgctgggcggcttcatccactcctccaactgggacgccgccgccatggaaaatctgctgtgcagcgcagcccgctgggatctggatctggatttgcatatcgatgaggagctcagcgaagtgtctcaggggctgacctggctggcggatcatctctcccgccacccttttcccggacatatctgctgcagccacggctgcgcgctggccgccggcagcgacgaacaggcggcgccgatcctgcgccagctggcggcgcacggcgtcacccttatcgctctgccgatgaccaacctgctgctgcaggatgcgacgttcggccgcacgccgcgccagcgggggatcaccctgctgcacgaggcgcaggccgccggcgtggccaccctgctcggctgcgacaacgtgcaggatgccttctgcccggcggggagctacgacccgctggacaccctggcctgcggtctgttcggcgctcagctcagcgacctgttcgaccagcagtcgcggctgatctgcgatcgcgcggcgctaaccggttcgccggcagacgcggcgccctttgccgtcggggcggcggccagcgtagtgattttcccgggtagcgaccgttttacctggcctttaaacagcgccgcccgtctggtggttaaccacggcaggttaacccaccgacgcgtgtggcaggaggagatggcacatgagtcttgaagcaggcgccggggcgccgctggcgcggtatgccgcctggcgcagagccggcgattttatctttctctccggcattattccggtcaatcccctgaccggcaccatcgtcaacggctttcaggatgtgcctgagccggtgcgggagctgctgggggcgaccggcgaattttcaaccgatgcgaaacagggcccgatcctcgcccagagctggtacgtcctggagagcatccgccgcaccgtggcgtccgcgggagggcaaatgagcgacgttatcaaactggtgcagtactttcgcaaccttgaccattttccctattacagccgggtcaggaagctgttttaccccgaccagccgcccgtttccaccgtggtgcaggtcagcgaaatgctgcccgacgccacggtactgattgaagtcgaagcgaccgtctggttacccccgtcatttaactccgaggcaccgcgatgattaacggttacattcctgccgcgcgctttcttccttttctgagctggacggacgtggccgccctgccggataaaagcaatacggttatcgtcctccccaccggggcgatcgaacagcacggcccgcatttgccctgctcggtggacagcgtgatatcttccggcgtggcgggccatgccctcgccaggctgccggcgacgatcccggcctacgccattccgccgatcgtctacggtaagtccgaggagcatctgcattttcccggcaccctgacccttagcggcgatacgctgctgcataccctgctggagatcgccgaatctctctatcgggccggttttcgcaagctgctgatgatcaacggccacggcggccagccgcagatcctgcagatagcctgccgggaaatgcgcctgcgccacggggatttcatcgccatcccccacgacgtgttcaacgtgcccaactgcgaaaaacagtttctcagcccgcatgaacagcggatggcgatgcacgccgggcatagcgaaacggcgctgatgctggcgctggcgccggagtgcgtccatatggaacgggccgtcgctaatttccccccggaattcccctgcccaaccctgtcgaaaggccgtccggcggcggcgtgggcgtcgtatgactttggccccagcggggtgattggcgacccgaccccggcgacgcgggagcaaggcgaagggcttctcgactccctcgccgccagctgggcgcaagcgatcatcgagatccaccgcatggcctgggtcgaacgtcgcgaaccgacctggggcaaacagcactggcacggctttgtgcagtccctaccaccttctttcgctgctgaatccagggagccctgatgaataccagattgacgcccgtttttaccctgctgaccgtggccgccctcgcgacctcagcctcctgcttcgcggcggagaagtttacctttctcaccaactggtatgcccaggccgaacacggcgggttttaccaggcccaggccaccgggctgtatcaacacgccggtctcgatgtcgaaattaaaatgggcggcccgcagatcaacgtcatgcagctgatggcggccggtcaggcggactgcacccttggcgacaacggccaggcgctggagacctggcaggccggggtgcacgcggtgaccgtcgccaccgtgttccagcactcgccgacggtgtttatcacccatgacaaagtggagaacccggcggaacttaaagacaaaaccttcctgctcgccaccgaggcctatacctccttctggccgtgggcgaaaagcgagctgggtctggctggcagcaaagtgcgcccctatacctttaacgttcagccgttcctcgccgataaaaatctggtgcagcagggctacgtgacctcggagccgttctccgtcgccaaaggcggacagccgttctatgtctatccgctcagcgactggggctacccgccctacggcaactcgattatctgtatggccgacaccatccgcaaacgtccggcggcggtggcggccttcgtcaaagcctccatggaaggctggaaaagctacctgcaggatcccgcccccggcaacagcctgatcggtaaagcgaatccgcagatgggcgccgagcagatcgcctttggcattgcccagatgaagcagtaccagctggtgaccggcggcgatgctaagtccggcggtatcggcatcatcaccgagccgcggctgaagaaaacctgggacatgctggtgaaaaacaaactgatcgacgccagcaaggtgccgtttgagcagacttacaccctggagatggtcaaagacgccggagtgatgccatgaataccgccccgaaactgaccgtgatgagcgatacccgctttatacccgccgctgccaccccggccatcgaggtgctgtcggcggagaaaatctacagcaacggcacccgggcgctgctgcccgtcaacctgaccatcaatcagggggagtttattaccctgctcggcccgtccggctgcggtaaaagcaccctgctgaagatggtcgccggcctggtggagcccagcgacggcaagctgatgctgtggcggcgcgacagtcgggaaaaggcccagcatccgctgtcgttcgtcttccaggaagccaccctgatgccgtggagcagcgtgcgcaataacgtcaggctgccgctggatctggccggcgtgccgcgggcggagggcaatacccgggtgagtgaagtccttgagctggtgggcctcggcaagttcgccgacgtcctgccgcgcgaactctccggcggcatgcaaatgcgcgtctccatcgcccgcggcctggtcacccgaccaaagctgctgctgatggatgagcccttcggcgcgctggatgaaattacgcgtaacaaactcgacagcgacctgctgcgtctctggcaggagcaaaacctgacggtagtgttcgtcacccactcgatccacgaagcggtgtttctctcccagcgggtgatcatgatggcggcccgtcccggacgggtggtcgaagatatccccatccgcgagccgttcccgcgcagcgaggcgttccgcgtcagcccggccttttccctgtatgcccgtcagctgcaggacagtctgttgcaggccagccagtccggtatggagtcataatatgaaaaatacaaccgcaacgccgtggatccagcatccgcgttttctcaaaattctctatccgaccctcgtcgcggtggcgatggtgctcctgtggcagggcgcggtgagctatttccgtatcccggcctttctggtgccgtcgccgctggtgatgctggaaagcctgtggacgcatctcacgccgctgctgctggcgctgctgttcaccctcaagatcaccctgatctcgtttctactgtcgattgtcatcggcgccgcggtggcgtttatcctggtgcagaaccgctttgtggaaaccgccctgtttccctacatcgtgtttttgcaggtgacgccgatcgtcgccatcgccccgctgatcatcatctgggtgaaggatgccacgctctcgctggtggtgtgcgccaccctgatggcggtgtttcccatcatctccaataccactcagggactgcgcagcgtctcccccggcctgctgagctattttcgcctcaatcacgccagccgctggcaaacgctggtgcggctgcgtatcccctcggcgctgccctatttcttcggcgcgctgcgtatttccagtgggctgtcgctgattggcgcggtggtggcggagtttgtcgccgggaccggcgggaccaataccgggctggcctatcagatcctgcaggccggctaccagctggatatcccgctgatgtttgccgcgctgctgctgatctctctcgccggtatcgcgctgtttggcgtgatgtcctgggtttcgcgccgggcgcttagcgcctggcatgaaagcgaagccgtgcaatctcattaatgttctgctgacgaacaggaaaaagaatgatgactgatgaacagcgtcaacacgcggtcgcggcgatccagcaggcactcccggcgctggagtggaccttacagccggcgaagatcaaacggctctcccgcgattttcactggttcagtccgctactcaccgagcaactggcggggaaacaggcggacgcagtggttcgcccgcgcgatgaagaggagctgcgccagctggtctccgcctgcgcgcagcaccagctgccgctgaccctgcgcggcagcgccaccggcaactacggacagctggtccccctcgaaggcgggctgctggtggatatgaccgggctcaaccagatcgtcgccctcggcaacggcacagtgagggcccaggccggcattcgcctggcggacatcgaaaccgccgcccgcccgacgggctgggagctgcgctgtatgccatcgacctatcgactggcgagtctgggcggtctctacggcggcgggttcggcggcatcggctccatcaactatgggccgctggcggcgcccggcaatgtgctcagcgtcaaagtaatgaccgtcgagccggtcccccgcgtgctgaccgtcccggctcccgaagcgctgctgctgcatcacgcctacggcaccaacggcattatcctggaggttgagctggcgctggcgcctgcgcaccagtggattgaacgtctggacgtgtttgacgatttcgccgatgcgctgaactatgccaacgcctgcgtccgctcgccggggctggtgaagcgccaggtggcgctgctggccacgccgatcgctgactattttagccacctcaacgatcgttaccgcgccgggcagcatgcggttatcagcctgatcgccgaggagagcgaaggactctgcgccagcctgttaccgcgccatcgcgggagcaacgccatccggcaggccagcgaggaggcccggacgcgcaacggctcgttaatggaatactgctggaaccacaccaccctgcatgcgctcaaggtggacaatacgctgacctatctgcagacggcgtttgatccgctgcgctatccgcagcaaattttacagatggagcagcacttcgccggggaggtgatgtcccatattgaattcctgcgcgatatcgagggcaatctcaccgccagcggtctgcagctggtgcgctataccacgcccgaacgtcttaacgccatcatgcagatatttcgcgacaacgacgtcaagattaacaacccccacgtgctgcaggttgaggacggcaaacagggcgtgattcgtcccgacgtcgtggcggtgaaacagtctctcgacccggcgggattgcttaaccccggcaagctgcgcggctgggcgctgcgcgaccagctggaactcgacagcaacccgctgacgcgggccacccgcgaaagccccacgacctgatggtccccggtccggttgggcgctaacgggtcgctggcccgttgccgcccaacctcatcctgcgccggacagtcccgccatatggacgataaagcccaccgcggcggcggcggccatcggcaccagtcacagcagtatcccggcgctggtgctgttcgccctgatggaatggggccaccagcacgtgctgcatagcgcgtcgcctattgcattggtggacagcgccagcggcgagaccgtccatccggggttcgtcaccgccagcggcagcgtggcgagccccagcgcgctacagatcgtcaaagccggtacccatgccgaaacctgaggaatgtattcctggcactgcttgccggacgcgcggcctcgccattttcgaccggccacaaaagccctgggataggatgaaatctggctggaaacgcgccagtgaagaaaggatatcgtcaggcgggcagcagccccctgctgcccgcctgacgtgtgagtggcgttaattcacccgcgcagacaaggtaatttgctgcagggcattcgccatattaatctgaatcagctctttaagaccttcgcgcttaataaactggctccggtgcttacttttcacctcttcaatactctttttgatctcttgcgccggcagtttataccagccgcgagcctgtttctcaccgcccatttccagccacagcgatgaataactggctttcaccagatcgcttttcacgtggtaatcagaatcgatggcgtagaccgtggagatgttgaaatatcgcagcaaaccatacagcacgctcatgatgatatttttcggccgcgcgccatgcagctctttagtcagcaccttcacttcgtcattggtgatatctttcccgccctggatgccgccgatataagcgcggccatcgtcggtgcaggaaaaacagacgctatagacgcgccggtcgccaagaaacagctgcagcatcagctccccttcctcctgaaacggcgaggccagcagcttaacgtcaagcttatcgccatttttcaaggcaatagaaaacatctcgcggccaaaatccgcgacattgtagagctgcggcaggacatcagggtgaaacgttttctcgatgaaattcagtgaaccatgggcaatatccagtttgcgtcgttttgacatccgtttattgagatacgctttaaacggtttatcctcaaaaggcaccagtcctttggtcaccgcggtcaaccgcgcgcactgatatttcgcacaaagtccttgatattctctgtatttacctcctgcgagcgagagctctctgcattttcgtaaaatttttttatagcttattttgacctgaccgatcactttattatgtttacgccattctttgatggcgcctgcaacagtatgttccattgattaagatccatagattcatccataatcgcggccatattaacataaaagcgtttcgtcaacgcttaattactccttcgttgtcctttcatttaatatttaggcaggaaattatcctggcgacgttatttgtcgctaaacttattctgtcaacgattatttatggtaggtaacgccctccgctcagcgacttaacgctctgtgccttcggcgcgaagcgcggctacatctactggcggttatgccctatacttgaccctgattcaaaaccagcaacgataggtaacttatggaaattgatctcgacaacctggtcttcagcggcctggatgaagcggaagagcgcaacgcggagcgtctggaagaagcggacaaaaaagcccaggcgatcgttgccgacgacgactgcggcgacgcctgcaaaatctgattgtcaaaccggccagcaggccggttttttttgacgcccacacctcaggtgggtaaaaaccctttcagcgtatccagcagcgcctgcgccgccttcgacagcggcagatgtccggcatggatcgcgccgacgcacttctcaatcggcggatcgctgagcgggatgcagacggcgcccaacgatgccatctgcgttttacacagcgccggcaccgcgctgccccccaggccgctggccaccatcctccccaccgtcaccagctgatgactctccagcgccacgtccagctgacgtccgctgcgcgccagcgcctcctccagcatcaggcgtaccgccgaggggcgctgcagggtaataaagtcgagggtcaacagctcctgccagctgagctgctttttcttcgccagcggggattgttggggaacgatcgccacgaagcggtccaccgccagcggggtaaacagcaggttgtggttgggcgatggctcgaaagcgatgcccatctccacccgcccctcgcgcaccatctcgatcacctgctcattaatcacgtcatgcaccgtaacgttcaccccggcatagcggtcgcgaaaggctttcagcgcctccggcagaacgttggcggcaaacgacggcatcgcggcgaccgagattttaccccgctgcagggtaaagctctgacgcatggcctcctcgacgttatcccagtcggccagcagctgacgggccatcggcagaaagagttccccctcctgggtgagggtcactttgcgggtgctgcgctgcagcagcgcgccgcccagcgcctcctccaaccctttgatggtcaggctgagagctggctgcgacagattcagcctttcgctggcgtgggcgaaattcagagtgtgagctaccgctaaaaacgcgcgtaactgtttgacactcattctcatttttcatcctgttaacttgacgcttatacccaagggaggcggccgacgagcgagatagggtaggaggggggggggcgggggcgaggcgaaaaagatgggagggggggagggggggggggggcggggaggga

SEQ ID NO: 153 - DNA, 60199 bp, Unknown
  source: /note="Description of Unknown: MKP2_2161_1 Mutant Bacteria sequence"
tctggccgccatgcgcgaggcggtgaaacgccttggcggcgatacggcgaaggttaatccgctatcgccggttgacctggttatcgaccactcggtgaccgttgaccgcttcggcgacgacgaggccttcgaagacaacgtccgcctggaaatggagcggaaccacgaacgctacgcttttctgcgctgggggcagcaggccttcagccgcttcagcgtggtgccgccgggcaccggtatttgccaccaggtgaacctggaatacctcggccgggcggtctggagcgaggaggtgaacggccagtggatggcgtggccggatacgctggtgggcaccgactcccataccaccatgattaatggtcttggcgtgctgggctggggcgtgggcgggattgaagcggaagccgctatgctgggccagccggtgtcaatgctgatccccgatgttgtgggctttaagctcagcggcaaactgcgcgaaggcatcaccgccactgacctggtactgacggttacccaaatgctgcgtcagcatggcgtcgtcggcaagtttgttgaattctacggtgacggcctggataccttaccccttgccgacagggcgaccatcgccaatatggcgccggagtatggcgccacctgtggctttttccctatcgatgacgtaacgctcagctatatgcgtctcagcggccgtagcgaagaacaggtcgcgctggtggaagcctacgctaaagcccagggcatgtggcgccagcctggcgatgagccggtctttaccagtaccctggcgctggatatgagcagcgtcgaagcgagcctcgccgggccgaagcgaccgcaggatcgcgtggcgctgggcgatgttccgaaagccttcgccgccagcggcgagctggaggttaaccaccttcagcgtcagcgtcagccggttgactatacgctgaacgggcatcactattcgctaccggatggcgcggtggctattgcagcgattacctcctgcaccaatacctctaaccccagcgtgttgatggccgccggcctgctggcgaaaaaagccgtcgaacgcggcctgcagccgcagccgtgggtgaaagcttccctggccccaggctcgaaagtggtgtcggattatctggcccatgccggcctgacgccttacctcgaccagctcggcttcaatctggtgggatatggttgcaccacctgtatcggtaactccggtccattgcctgaacctatcgaagaagcgatcaaaaaaggcgatctgaccgtcggggcagtgctctccggtaaccgtaacttcgaagggcgtattcatccgctggtgaaaaccaactggctggcctcgccgccgttggtggtcgcctattcgctggcggggaacatgaatatcgacctcacccgcgagccgttgggacagggcaagaatggcgagccggtctatctgaaagatatctggccgagcggggaggagattgcccgcgcggtggaacaggtctccaccgagatgttccgcaaagagtacgcagaagtgttttccggcactgaggagtggaaggcgatcaaggtggaggcgtcagatacttacgactggcaggaggattcgacctatattcgcttgtcgccgttctttgacgagatgggcgccgagccgctgccggtagaggatattcgcggcgcgcggatcctcgccatgctgggcgactcagtcaccacggaccacatttcgccggcggggagcatcaaagccgatagtccggcaggccgctatctgcaggagcatggggttgcccggcgcgactttaactcctatggttcccgtcgcggtaaccatgaggtgatgatgcgtggcaccttcgccaatatccgcatccgtaacgaaatggtcccaggggtggaagggggcatgacccgccatctgccggatcctgaaccgatggcgatttacgatgcggcgatgctgtacaaggctgagggcacaccgctggcggtgattgccggtaaggagtatggctcaggttccagccgtgactgggcggcgaaggggccgcgcctgctggggattcgggtagtgatcgccgagtccttcgagcgtatccaccgttccaacctaatcggaatgggcatcttgccgctggagttcccgcagggcgtcacccgcaaaacgctgcggttgaccggggaagagcggattgatatcagcaatctgcagtcgcttcagcctggcgctacggtgccggtgaccctgactcgcgctgacggctcgcaggaagcgatcccttgtcggtgccgtatcgacacggcgaccgaactcacctactaccgcaacgacggcatcctgcactacgttattcgtaatatgctgtgaaacaaagggccagcatcgctggccctttttcggttattccaccagtttattccgtcggcttgctgttcagcagatggcccatcttggcggctttggtgtccagatagtgagcgtttttcgggttacgcccgacgatcagcggcacccgctccacaatgttgatcccggcttcggtaagaatttccacttttttcgggttattggttaataaccgcacctgctcaacgttgagcaatttgaacatgtcggcgcacaaggtgaaatcgcgctcatcggcggcaaagccaagctgatggttcgcttcgacagtgtcgtagccctgatcctgcagcgcgtaggcgcggatcttattcaataaaccaatgttgcgtccttcctggcggtgatacagcaggatcccccgaccttcttcagcgatatgcgacagagccgcttccagttgaaagccgcaatcacagcgcaggctaaacagggcatcgcccgtcaaacactctgaatgtacgcgggcgaggaccggcgactgccctgatatatcgccatctaccagcgcgacatgatcctgtccggttgccagttcttcaaaacccaccatcaggaaatcgccccagggggttggcagtttggcttctgccacacgtttaagctgcatgtgattctccagattctgtcagcacctgactgtgctttctgtttcccgctattttgccacaacgcctggacgttctcctaatcgcgaacggttagccgtgtggaaagcgcacaaacgatctactttccgctatgatgttcatctacaaggagaaggagagaaaatgctgttgatagcccgacgaactgctctcgcggcggcgctgctgctggttatgcccctcacggtctggctttccgggtggctgtggcagcctggactgccggttgccatgttgaaaagcctgtggtgggtgacggaaacggtgacccagccgtggggaattatcactcatgtcgtgctttgcggctggttcctctggtgtctgcgctttcggctgcgcgcggcgttgatcctgttccttatccttgccgccgctatcctggcgggacagggggcgaaatcctgggtcaaggcgcgggtccaggagccgagaccgttcgtcatctggctggaaaacacaaggcaggtgccggtgacgcaattctacgcgttaaagcgtaaagaacgcgctaaactggtgcatgaacagctggcgcaggcgcaggacattccgtcatttttacgcaaacactggcagaaggagacggggtttgctttcccgtcaggtcacaccatgtttgccgccagctgggcgttactcgctgcggggctgctgtggccgcgtcgccgctggggcacaatcgcggtgctgctggtgtgggcgacggcggtgatgggcagtcgcctggcgctgggcatgcactggccgctggatctcatcgtcgccacgctgatctcctggctgctggtcacggtggcctgctggctgacgcagcgcctttgtgggccgctctcgccgcccggagaagaggcgcaggatattaaaaaacggatgcctgaagcggaataatgttgattttagcggcatccgaccgcatatcctgaagagttgccatgctttttcattccaccgctgcggcgaaaatgatactttatagggctgaaagcgggcttttttcgcgcaacccacataacgggaagtcatgtgaaatatttactcattttcttactggtgttagcaatcttcgtcatttcagtgacgctgggggcgcagaatgaccaacaggtcactttcaactatttactcgctcagggtgaattccgcatatcgacgctgctggcggtgctgtttgccgcgggctttgccattggctggctgatctgcggcctgttctggctgcgggtgcgtgtctcactggcgcgcgcggagcggaaaattaagcgtcttgagcatcagattgcccccgtcagcccggcggctgtcgacgcaggcgtgcctgcggtgaaggaataacctcttatgctggagttgttgtttctgcttttacccgttgctgccgcttacggctggtacatggggcgcagaagtgcacaacagtccaaacaggacgatgcgagccgcctgtcgcgagattacgtggcgggggttaacttcctgctcagcaaccagcaggataaagccgtcgacctgttccttgatatgctgaaagaggataccggtaccgttgaggcgcacctgacgctcggtaatttgttccgttcgcgcggcgaagtcgaccgcgcgatccgaattcaccagagcctgatggaaagcgcgtcgttaacctacgatcagcgcctgttagcggtgcagcagctgggacgggattatatggccgccggactgtatgaccgcgcggaagacatgttcaaacagctggtggatgagaccgatttccgcctcggcgcgctgcagcaactgctgcagatttaccaggcgaccagcgactggcagtcggctattgaagtggctgaacggctggtgaagctggggaaagagaaacatcgtggcgaaatcgccaacttctggtgcgaactggccctgcagcagatggcagccaacgatctggataaagcgatggcgttgttgagaaaaggcgccgccgcggaccgcaacagcgcccgggtatcgatcatgatgggccgggtgtggatggaaaagggcgactacgccaaagcggtggagagcctcgagcgggttatcgatcaggataaagagctggtgggtgaaacgctggagatgctgcagacctgctaccagcagctcggcaaaaccgatgaatgggaagtttttctgcgccgctgcgtggaggagaacgccggggcgaccgccgaactgatgctggcgcagatccttgagcagcgggaaggcgtcgaagcggcgcaaaactacgtcacccggcagctggaacgccacccaaccatgcgcgtcttccataagctgatggactaccatctcaacgaagcggaagaagggcgggcgaaagaaagccttggggtgctgcgaaacatggttggtgagcaggtgcgcagcaaaccacgctatcgctgccagaaatgcgggtttaccgctcatacactctactggcattgtccgtcctgccgctcgtgggcgaccattaaacccattcgcggtctcgacggccagtaaagccaaaaaaaagccctccattagttacaacatacttatcgcttcactcctctccaggcgcggcctcggcagcgccatcgtccggtcagggcaggtacggcagtctgttattttgttcgcttcacaggtagaatgctgcccgtttaccttttttgcgccaccccggcgcccatcaacactaaggtctggtcatgacgtctacagctatcccatcttcccgcgctgtcacatcctctcccgttgtggttgcgctcgactatgataatcgcgataaagcgctggcatttgtcgaccgcatcgacccgcgcgactgccgcctgaaggtgggcaaagagatgttcaccctgctgggcccgcagtttgtccgcgatctgcatcagcgtgggtttgaggtgttcctggaccttaagtttcacgatattcccaacaccaccgcccgcgcggtggccgcagcggctgagctgggcgtatggatggtgaatgtccatgcttccggcggcgcgcgaatgatgaccgccgcgcgcgaagcgctgctgccgtttggcaaagatgtgccgctgctgatcgctgtcacggtactcaccagcatggagtccagcgatctacaggatctgggcattaccttatctccggctgactacgcggcgaagctggcggcgctgacccaacgctgcggccttgatggggtggtgtgttcagcccaggaggcggtgcgctttaagcatgagctggggcaggcgtttaagctggtgaccccggggattcgtccgcagggcagcgacgctggcgatcagcggcgaattatgactcctgagcaggctcaggaagctggggtagactatatggtgattggtcgcccggttactcagtcggcggatccagccgcgacgctgcgggcgatcaacgattctctgcgcaagggggcataatgagcgattccaacagccgtctggtctactccaccgaaaccgggcgtatcgacgaggcgaaaccggcgccggtgcgcccgaaaggcgacggcattgtgcggatccagcgccagaccagcggccgcaagggcaaaggcgtctgtctgattagcgggattgatgccgatgatgctgcgctaaccgctctggcggcagagttgaaaaagaagtgcggctgcggcggcgcggtgaaagacggcgtgatcgagatccagggcgataagcgggatttactcaagtcgctgcttgaggcgaaagggatgaaggtcaagttagccggtggctgatcgctattttccctctgctccagtggtctggttgaaataacaaggccgcggtaaatgccgcggccttgaatgatttaacgtgcgtaagtcaattcgtgtgaattattcttttatttcgtcagataattaaattatttgccgacctggtgaccaataataccaccgactgctgcgccacccagggtaccgagcgcgctaccgtcagttaacaccgcaccaccgatagcgccggcgccagcgccgatagccgtgttacgatcgcgtttagacatgttagagcaagcgctcagagacattgctacagtgacagccagaacgacagcagccatttttttgctcgttgaagtcatcattttttttctcctgaataatctattcatggattacagcgctcctctaagcatagcctgataaagcagctttagggcaattccatgaagttaaggtgcgcaggtgtcacgaaaatcacgcaggtgatagtcacttcctgttatatcgctaataataattttactttttttaaaatttatcgtcaggtaaaaagtcttaattagcggctcggaatactctcagagcgataaagcgccccttccggcgctttggcaggagatggggcggcggaggatcagatgtagggcacgatatcgacggtcaggccgctgcggagcaattgttcgcgacaggcgtccggtaagcgatcgtcggtaataacgcgattaaagcggccggcgggaccgagcggatagggatgtaccgcgctgaattttgaactgtcgctaagaataattgcctcacaatgcttctccagcacggcgttcaccacgtccgcacgcatcatatcgcggccggtaaagccggtttccgcctgccaaccgtcgatcccgatgaaggctttgctgaaatgcacctgctggatgaactgacgggttagcggaccgaccatactctcactgcgtttctgataaattccgcccagcaggatcacctctcctggggtctctttcagcagatgggcgatatagctgctgacggtaatgatggtgatatcgccgcgctcggccagcgtacgcgccagcagggcattgctgctgccgttttcgataaataccgtttcaccggtattcactagcgccgcagcccggctggccagctcacgcttaatggcgaaatgggtcatcatgcgggtttcgacatcttcgctgtccagcggtacggcatagccatgagtacggcgcaaatagctctgcttttccagcaaattcaaatcctgacgaatagtaacctcagagacaccggtcatcttcgccagatcggcgacgctcatgcggcctttatcgatgaccacttgcaaaatactttgttgtcgggcgttcatagcaacatcactgttagggggctatatggcgagcaaccggtccatatggccggctgcggcatggctgatattcagatttcccagggcgccttgggttggttttgttgttcagcatcgtccgccgccagcgccagcagctccgctttgaggatctccagattatggatcgcagaatggtaatcaccggcaaccagaatatccagcacggtatcgatacgttgagcgagcaggtgggcattcacatctgacatggcattatcctggtaacaaaaacgaatgaaatcaatgatgctaaaaatgaatgaaaaagagaagcgaaaaaaacgcacaaccttaatcggtgcgacggaaatggctggatagagaggaaagaagcagcggttcccgcaggaaccgctgtgaaggggcgtcagaccgccggacgcgcaataatgctgcgggtttccatgcgaacttcagcgatagtgacatcgataacgtcagtcactttatagactacttcacctttgatctgcacggtaccgttctcctggctgcacaccagttcgtcgcgcacggcgtggaggaacggggccggaataaaggcgaccgcgccattgtccaccagacgcacgcgcatcccgccgcggctgacgtcgatgatctccgccgcgaagcgggtatcggtcccggctttatcgttgaggaaacgggcgtacagccagtcggcgacgtcgcgctcggccatccggttgagacgacggcgctccgccatctgcacggtggcttcatcctggggacgcgcaatggtctcgcctttaatgatggctttcagcagacggtggttgatcatgtcgccatacttacggatcggcgaggtccaggtggcataggcttcaagcccaagaccaaagcgcgggcccggctcggtgctgatttccgcaaacgactggaagcggcgaatgcggctgtcgaggaaaccggtcggctgagcgtccagttcccggcgcagcttgcagaacccttccagggtgagtacttccgtcgggtcgacgtgcacatcatgggttttcagcagggcggccaactgctcggtattcgccgggtcgaaaccggtatgaacgttataaacgccgaagccgagcttgtcgcgcagaacgcgggcggcacagatgttggcggcgatcatcgactcttcgacaatgcggttggcaatgcgacgcggttccgcgacgatatccagcacttcccctttttcgccgagaacgaaacggtagtccggacggtctttgaacaccagcgcatgggtctgacgccattcgctacgacgctggcacacgtccttcagcagcgtaatttgctgcgcgatcgcctcgctgtccggctgccagctgccgcggccttccagccagtcagagacgtcgtcataggccagcttggctttcgattcgatggtggcggcaaagaactcgatattgtcttcgatggtgccatcggcccccagagtcatccggcaggccagcaccgggcgcacttcgttagcgcgcagggagcagagatcgtccgacagctcgcgcggcagcattggaatgttgaagcccggcagatagttggtaaaggcgcgcacttttgcggcgttatccagcttgctgccttcggcaatccaggcggtcgggtcggcaatggcgaccgtcagcagcagtttgccatcagcagtggactcggcatacaacgcatcgtccatatcttcggtgctggcgctgtcaatggtgacgaagtcgagggtggttaggtcgcggcgcgtcagcccctcgtcgagcatctcggtggcgacgccgtccggtgcctctttctcaagattatggcgcgccagggttacccaccatgggacgaagtggtcgtcgctaaaagtgatgaactgggtcaactccgcgtaaaatccgcggtcgccttttaatggatgacggcgcatctcggcgacggcccagtcaccctgtttaaaatcgtgctcaacgccgcgggcggcgcggcagggaatggcgtctttcagcagcggatggtcaggaacgatagcgaggcgatcgtctttcttctggactttaccgacaaaacgagtcaggaagggctcaaccagcgattccggctcggcgctttcgcgttctttttcagaatggatcaccgcgacgatacggtcgccatgcatcacttttttcatctgcggcggcggaatgaagtagctcttctgagcgtccacttcgaggaagccaaagcccttttccgtgcccttaacgaccccttccgcgcgcggcgtctgggaatgcagttgctgtttaagctgcgctagcagcgggttatcctgaaacataattaggtattttcgtggctaaaagagcggctgacatttttacgcgaatatgcctgccgcagcaagcgctgtttcagcaatttacgtctgctgacgcacattgccgagggcgattttcagacgattcatccatccgcacagcccgctccagatcaacagatcgattgcttgttgcgcagagagtcgatattccgcgaggggcgttaactgggcggcgctaaaacggtcaggcgagcgggttaacagctgcaccgcggtcacgagagaccgggcctgaggatgctgctggagccagtgatggagggcctggtcgccctcccgcaaatggctggcgaactcctcttcaccctgccagtgggggagccaggcgtcaaaacaggtggggctgccattggtgcgcgccgtgagtaaggcgacctgcgggccaaaggtatcatccgtgctgagctggcggatcaaggtctccagaggcgcgaataactgtgggtcgcaggccagcagcggcgccagctcgcccagaccgggcagcgactgccagccggcgatgcgccgctgacgctcatcatcggcatactgcaggtcgggatccgcaatgtctgcctgccatgctcccggcggcggggcgaacagttccgcgggtgcctcctcttgctggggcataccggggatccagcgcaccggaaagccctgggccgcctgcaggacggcaatcgcccgcgcctggaagccgacgaatccgataatctggttgaacagaataatgtcccgactggttaagcccacttcgtccagctggctacgggagagagcgttaataaccgagggcgaaccggcaagctgacgagcatattgcgtgatttgcgccagacgacggttgctctcgcgcgaggagtcggggcctggcaggggagcaaggcgggcggcgtagtggttacacagccgctggacgccgtagacctgggcgacggtgagcgcggtgctgagtcgatcgtaagcggtaaaggtctgcaggcgactcaccgccacctggtcgggaaatagcagttcggccagctggcgtgcggggtgtagccagtcagcgtgggcacttagccaggcggccggcagcgtcaggtccagcaaaaagcggtcttcaacatgggcggcttcagggacgagcggcaggacatccaccgggcagattgttgactgggtttcgtgataccagtgatttttgccattcacgcggcgtggctccatgggctttccttgttcggtatgtggcgaaccgccgttccgcggatcgtttatgcagaactatcctggcgtaacccggaagcaggagaaaatattgatacgtgctaacaaatagccgattggaataacaggtggggtgtaaggcgtgggggagggaagaaccctcctcaccggggcgaggaggggaaggaacttatttcagttccagctcgttcatggcggcgatattgaacccgccgtcaacgtgaacgacttcaccggagatccccgcagacaggttggagcacaggaaggctgcgctgttacccacatcttcaatggtgacggtgcgacggatcggggtgaccgcttcgcagtgcgccagcattttacggaaatctttaataccggacgcggccagcgtacggataggaccggcagagatggcattgacgcgaacgccttccggacccatggcgttagccatatagcggacgttagcttccagagaggctttggccagacccatcacgttatagttcgggatcgcgcgctctgcgcccaggtaggagagcgtcagcagagccgaacccgggttcagcatgccgcggcaggctttggccattgccacgaagctgtaagcgctgatgtcgtgcgcgattttaaagccgtcgcgagtgacaacgtcaacgtagtcgccgtctaactggtcagccggggcaaaaccgattgagtggacgaaaccatcgaattttggccagactttttccagctcggtgaacagcgcggtgatgctctcatcttcagcaacgtcgcacggcagcacaatgtcagaacccagcgcggcagcaaactcttctacgcgacctttcagtttctcattctgataggtgaatgccagttccgcgccttcgcggtgcattgcctgcgcgatgccgtaggcgatggacagtttgctggcgacgccagtgatcaaaatgcgcttaccggaaagaaaacccatagctttaatccttatcgttattgcttatttttactttaacaatcataacgttaacattgttatttcaaaataactcaaatttagccgggaattatatcccactgacgaccccttgtgtcacgatatttttcagccggtccgcgccgcgcggggcaaaagtacatcgcgatagctgcagtatatcatctctcctgacgattatttgagcgcgatctccgccagcagcaggcgtccattgctgcccaggggacgcagattccgcggggatccaccgcgccagcagaggccgctgccggccgcgcagcgtcgcccggccagatcccactcgccttgtagaacataagctaccccctcgctggcagggcattgcaggtcgctaacgacctgaactgtcgccgacgcgcgcccgcgcggagtcatgatattgaagtccagccctggcgcaacgatcccgacgctggacagcgcccattcgccggggaaagcccacggctgccagagcgccagcggttggtcgatattctcgccacacagccgtagcggctgccccgccagcagagtaatgacccggtcgacgccaggaaagggggagaaagggccatccgcctgcagggtggcaatactcgctcgccagagaaaaggggcatctggagcgggtacgcagatgatttcgcgcgtctctccgccaccgtttttccacggcgtgacggggagcgtcgaaagttgaaaagggaccatcatgggcagcataccttagttaatcgcttccggcgtcaacaataagcaccgccttgagctagttcagtaactttctgcagtacaaatattttacatattcgtcacaaaatgagagtgcatgcaaggcggtgagttgtcaatgcttgtatatacaagaacgattgagtgaggtgatattaataacttgagtgaggaacctatgtcttcgttttcgtctacagacgggcagtcaaagagcaattatgctggaatgagtgaaaggcggtcgattgattacatcccggaaagcgaacggcatggacacccttttagccagttcaccctttggtttggcggcaatctgcaaattacggcgattgtcactggcgctttagccgttgtgctgggcggcgatgtagtgtggtctctggtcgggcttctggtcggtcagatgctgggggcggcggtgatgtctctgcatgcgctgcagggaccgcgactgggacttccgcaaatgatccttagccgcgcccagtttggggtttttggcgcggtggtgccgctggtgctggtttgcgtcatgtatatcggtttttctgccagcggcaccgtattggccgggcaggcaatggccaaactactgaatatcagccacgtagccgggatgctgatattcagtgcgattattatcgttatcgccgtcctcggttataaggtgatccacaagctgggcaaactggcgagtatcgtcggaattctcgccttcgtttatatgttcatcacgctgctactttcggccgatctcagtgcgctcgcgcacaataaccatttttcgctgccgacgtttttattagccgtatcgctatcctcatcgtggcagatcgctttttgcccctatgtatccgactattcgcgctacctgccatgcgatgtttccgccacgaaaacgtggtgctcagtgtttttcggcaccgtatttggtacccaaacgtcgatgacgctcggggttctgacagcggccattgccggcagcgcgttccctggtcatgaggtgagctatctggtgggattacgtaagagtcaggcgatggccatggttatctatttcgccatctgttttggtaaaattaccttcactaccctcaatgcgtacggcagctttatgtcgctgaccaccattgtttccgccttccgccggcaaaccgtgctgtcgcaaaagtgtcgcattgcattcgtggtgctgatggtgacggcttcctgcattatcgcgttgcttagcgaacccgctttcttaaagcatttcacgcattttcttctgtttctgctggcgttcttcgtgccgtggagcgccatctgtctgacggattattatcttatctcgaagggcgccatcgatattccggcgctaagcgacccgcagcaacgctacgggttctggaacctgtacgcgatcaccctgtatatcgtcggtgtgcttatccagttgccgttcattgagaacccgttgttccatggttcgctcacgtggatcttcgccggtaacgatgtctcatggataataggctggtttggcaccggggttctttactacgcgctgcgccgctttgaccgccggtcgctgccggcgcagagtcttttcccttccacctgaatgacaagggcggcgtgagggccgcccctgccgttgcctgccagctatttcccgtctttgcgccaggcgtcggcggtgagggcttccccgaagtggccggcgatcaggcgccgggtcaggtcgtgcagcggcgaggccagcacatcggcagtgctgccgcgctcgaccacttcgccgttatgcatcaccagcacctgatcgctgatgtgtttcatcattcccaggtgctgggtgacatagatataggagatgccctgtttctcctgcagctccagcatcaggttgataagctgggagcgcatcgacatatccagcgaggccagcgcctcatcgcagatgataaccttcgggcgcaggatcagcgccctggcgaggccgagacgctgcttctgaccgggcgccagcatatgggggtagtagctgacgtggtccggcagcagaccgaccatgcgcagggtgtcgattatctgcttctgccgcgcctcggcgtcgagatcggtattcagtcgcagtggaaaatcgaggatctgcgagatgcgctggcgcgggtttagcgaggtcgacggatcctgaaagatcatgcgaatcttctggctgcggtaggagtaatccccaaaagtcagcggatgatcatcaatcagcagttcgccgctggtgggttccaccatgcccgccagcatcttcgcgagggtcgatttcccggagccgttctcgccgataatcgccagcgtctgccgttcacgcagggtaaaactcagcggcttaaccgcctcaaccgtctgacggtgaaaccagccggtgcggtagcgaaaggtcttactgagttggcgaacttccagcaatgtttcgaccatttcactctttctccatgttcaacgggaaatgacaggcgtacagatggttgcgcgccccggtaagacgcggcgtttcgatacactcgcgctgggcgtacgggcagcgcggccctagccgacagccgataggcaactgctccagcagcgggatcgctccaggcagggtgttgaggcgacttttatgcggcatggcgctaccgaaatccgggatcgcgcggattaacgcctgggtgtaggggtgatgtgggagggtgatcagctcttcgctgggcccactctccaccgtctgcccgcagtacatgacgttgattttatccgcccatttgctgagcatttgcaggtcatggctgatcagcaagatggtggtgttgttgttctggttgagccgcgtcagcaggcgaataatctgcgcctgggtggtcggctccatggcgttggtcggctcgtcggcaatcagcagacgcggctggttggccagggcgatggcgatcatcaccttctggcactcgccctcggtcagctgataggggaagctgcgcatggcatctttgtgatctttaatgccgacgcggtgcaacagctcgatggcccggcgcttgcgccagcccagccgttgccaccagcggcccttgtaggtccagccggggatactctgaatcagctgctggccgatgcgctcagagggatcgaggcacgactggggctcctgaaaaatcatcgacacgttatggccgatcagcttccggcgctcgcggttcgacagtcgcagcaggtcgatgtcatcgaagcgcatgcggtcggccgtgacccgccagttgtctttggtcacgccgcagatagctttggcaataaggcttttcccggagccggattcccccaccaggccgcggatttcgccttcggtcagcgtcaggctgacgcgatcgacggcttttacccagccttcgctggttttaaattcaatggttaagtgacgaatatcgagtaacggcattattctaccccggcaatgatcgcccggcgaataccgtcgcccagcaggttgaccagcagtacgctgagcataatcgccgccccggggagcatcacggtccacggcgccacatagataagctccagcgcatcgcccagcatggctccccattccggcgaaggcagctgggcgccgagatcaagaaagcccagtgcggcaatatccagaatggccatcgacagggcgcgagtgatctcggtcaccaggccggaggcgatattgggcaggatggcgaacagcagaatattcagcgtcgaggcgccgtcgaggcgggcggcgatgatgtactctttctccagctcatcgtggaccatgctgtagacggagcgcaccatgcgcggcagcagcgccagccagacggcgaacatcgcatggctcagatgcggcccggcaaaggcgacgacgataatcgccagcagcagcgaggggatggagagcagggtgtcgaggatatggttcatcaccgccgagcgcaggccgtgggtcgatccggcaatcacgcccagcaccagaccaaacagcgtggcgccgagggtgacgacaaaagcgccgccgacggtgggcgccgcgccgctcagcagtcggctcagcacatcgcggccgaggtcatcggttcccagaaagaaggagacttcgccatagcgcgaccacgacggcggcaacagctggtagccgaagaactgctggtcgatgccgtagggggcgaaccagccgccgaagacgcagagcagcaacaggcccgcgcagccgtacaaaccgatcatcgccgtggtgtcgccatagaacttacgccatacggtgcgcagcgcgccgggcggacgcttttccagataaacgctatcgtagggcatatgaatccgttttaagtttgttagtcatgctttaagtcttttcaaaaatcccgctaataccaataccttgctagcatagagtgctttaattttgtgtgttctgcattgatttgaaggttatcaatttaaccaaaatgtgtacactgatgtgtatatcatcttccggagtgtacacattgcttaccgacacaaaattaagaaaagctcttggcaaaaagagagaccagatcgaggtcatatcggacgcccatggtctgaatgtccggttgtctacttccggcagtataacattcttttaccgctacagatggaacgggaaagccgctcagctaacgattggcgattatcccaccacctccttatctcaagctcgcgaacgtagacagcagttcagggcctggttgacagaaggactcgatccgagacggcaaacagttctggagaaacagaaaaaagtcgaagcgctcaccgttaaagaggctttcgattattgggaaaagtattactgcatccccgaaggtcttgtgaaaatcaaggttaaccgacgggacttcaataaccatatagcgcctgtgctggggaacatgattgttgatcagaccactaaagcgcactggcttaacctttttgatggcatggggcgaagagttgtcactggtcagatgcttgggctgatgcagcgtacgttccgtttttgctccaatcgaggggtaattaatgtgaacccaattgagagccttaggcgctctgacgtaggtctcacagcatccgtcaaagatcgcagattgagtgatgaggaaatcaaaacagtttggaatatccttcctgaattgaagtacagacaacagctgataatgaagtttctcatcatgactggctgccggagtacggagatcaggacggcaagatgggagtggttcgattttcatgagcaaacgtggaccattccggcaagcgattataaaaccgggaaatcggtcagaagggcacttcccgaggcagtagtaagaatgatgttagcagagaaggaaacgtcagtttcaaaacacgttgtgacactgtcacgctacagagggccagaagatgacagaccgccactacaaccaaacgtcgctctgttttctgctcagattatagctaaaacaggcatgaagccctggtctctccatgacctcaggcgaacagtggcgacacgcctttctgaattaggtgcgccgccacatgttgtggaaaaactgcttggccatcatatggcaggtgtcatggcacgttataacctgcatgattatctggatgatcagcgtcactggcttgctgtttggcaggatcaccttgagaagctggttggtcagcctctggtttgatccccacgttatcttcccaggccaacaagtctgaaagtctccaccttttagggctgccatttattttaggctgcgggaatggctgagcaaagtaagagggcatccgggatggggtgctccagaaataaagtgtgctgcgcgatattttgtatctggacagaacgtcatcggttatcaaaatttcatctgatttatgagatgtattagtcataaaaaccccttagttacattgtccaggcagatggtgtagccggcgcgcgcagctcatggctgtggccacatagctactttttctgttaacaacttctacagtgatctttgagccttgaaccaccaccgtataagttctctttgttttctgtcgcccgtaggctccataaagctcaacgtgttttgccagtgccgcatcgcacgcttggcggcccagaggggagtgtctgcttcggttaatcaatcgcatatacattcctttatcgggagagtttcccctcccaatctggttaacccacgtattccggtttcatgtcgtccagggtgatgcggaactggtcatacagttcatcaccgaggtggcggcgcgatgaggtcaaggtgctttctgccttcgcgaataatgcttctgcttccggatcccccgggttagggagtgaatttatggcggcctcaactttgttcttcgcatcaacaaggtagtagcgtttcaccgccttactcttcagttcggtatacaaagcagtacccagcagagctttctgtgattcgatgtctgcacgaatggctttggcctggtccactgagtcagctgtatcaatccggtctcggagttcgtcagcaacagagtcaacgttagatgcaggctcttgcgtgctggtggaatcgccaacggagtgtgttatctcattcagcgtgaccttttctgtctgcgccgggttgataaccctttcttcgcgttcgtcaatttcatcggcggtatagaccccgaggatcacatccgggcagtacagtcgcgcccaacgtttaacggcgagataggccagttgctgacgggggtcgctcgcccacagtgtagagttgcggacttgtgcctgcgaaagcatcagcacaagctcgcgaggttctgattctcctttgagggttgcccaggcgcggacgcccacgccagcttcatcttgcaaatcccagcccggcgcgatgtagtcgttacctttgccgctggtttttttaatgaagcggccaacgatattttcccatgcaccaaaccattcaaagtgaatacggtcttttgtcggagccatggtgttaattaccgcattcaccagttgtgcctcatagccaagcacacctgagttacccacgatgaaggttttctgtgccactgcaaacggatccataccccaacgcgctgcctgcatcactacagccatgcacgcatctggtttcccgcgataatgctcaggcacgaagtttccactattggccattacttccgagagcgtgcgcaggcggttgaacaattcaccgttcgtcaggatagaaacgttgtcgatcttctgggtctggttttcagtagttgcgactaaattggacattgttattcccccttatgcctgcacgcgcagcgcttcgagacggcgcatatcaaaatcgttaagttcttcggtgtagtcttcggtaatcggcgccggccattcgccagtgtcgaaaccgttcgcaatggcgcgcatagctttgcggtattccagcatgccgagttccagcagttcttcggatgcctcgatgatggcgatccagtggtagttctcgtctttgttaacgaatatccagaagaactggtcaagggctgcggtttcgcagtacatagccgcgctcaggtggtaatcgcgctcgatgatttcccggtgcagcttcgcgcgcaggccttcctgcttgatgttccacatactgatggttttcaggtccgcaccgatgcgcaggccgcccatgtctatctcaaggtcagggcgcacgcgaacttccagcccggtttcctcatcaatgccgaaatagctcacctcgacggcacggctcgggtgcgtcaacaacttgccagcggtcgggtgattcaacagtgctttctgaatggccagtgccgtagccagctgctggcgggtaaccagcacttttccttccgggttctcgcgccatgcatccagcaactcgtcggcaaacacggcatccggttttaccgatttcacggcctgaatcagatcggcctttgcgccagagactttcagcggctgcgccttctgtgcttcctgagcaaccatgtcaggattaataagcgccagctgttccagtaaggaatcgcggctgccgctggttttcacctgggcgggcagggtcgcgttgtattccttgatgcatgccttcatagcggtggcagtttgcttctgaccgtcttcaatgcgctggaactcagcaggtaaagacatatacccctggccggtttcttcaactgaagtacccaagggaacctgggcgggcagggtcgcgttgtattcctccaggaatctcttgatgtcatctgcgctgagcaaaaccggaagcccgttgttgtactcgtcgataaacgcgcggatcgtcgcagtcgtggtgaatgcgccttccgggatttcgggctcgatgctgaattctttttccagctgatcaggctgcagcgccagtgcatgcaccagatttcccatatccagaacaggggagcgtaccttctggatggtcttggatacgtggcgcgcctcgaaatacatcagcgatacccgcgcatctttaaccatcgtggagctgatgccgttagcggcgtggtagacctcatttggcacgccttcatatcgacccggctcgaaatactccggccatgctggcgctatttgttcagcctcttcctcatcatcaatgtgagcattctcagaaacctggcttttcagcacttcggctgtaaggtccgggcaacgttcagccagtatttcgctcatgttcacggcagttgtttgcgcaggaggttcatcagcgctttcgcctgttgataccgaactatcaatttcgtttttgactgactgatccgcttccatctgcacattgctggtggttccttcttcggtggcatttgtagccggtgaagtcataaggccttcaattgaaaacattccgccgccgagatttgcaatttccggggctctgggtttggtcaggtcttcggttatccacttcggatccgtggggtcactgataccttcgacatattcgccacgttcggcggccagaacctgattagcgtcaggacgtttcttttgcgcttctttcaccagttcggtgccaattacctgaaagtcagttgggagagtttccaggtccggcacaccttcatctccatcgatagcctttttcacagcgtccagagtgacggcggcagatgaaacatgaccagctttttcaagcgtctcagcagaaggggcgtcatgcttatgctcggtcaggttcgcattgatataggtctgcagacttaccgggaaatgatgaatatcgctggtggcgccacgaataagggcaaaaatcgcggcgcgggaataatccaggatgcctgcaaccttgcgcagcgcagccgaccattccttgaacggactttctttcttctgaacgatctctttggcccggcggtgaatagatgccgggaaattgtagatatcgaaatccattggcattgtggccagggctatttctacatcgagcgtatcaagggtatgggtgtagtcagggttgcgatcggttttattaccgccgccagcattagttcctgcatcagttttcaaaaccgaagaaatgcagttaccggcagcccattccctggtgagaatgccgcggtcgatcgcgttcgtggcgaaccacagctttgcaaactgaatacgtttgccgagctcatgccgtttcccttccgggaagacttttttattggcgctggtgaatttccagagcgccggcatatcgtattttttgatttcagggacattctcggcggccaggatcagatcctggacggctgcgttatcagtgtccatttcaagagctgacagctcctgccggtgaggcatgctgatatgataaacgtgacgttcttcggccatgtactgcgccagcagctgagcgcgaaaagggagttctgccacattaaatagcgcgctcgaatcgtcctggtattcatcgctaccgaaagtttccacggtctcatcttgtgccgcgtcgccagtagtattggcatcaaccaactctccagtaacggcctcagaggatactccggcattatcgccgtgatgaacatcagcaggcgccagtcctggcttaagagtccaggtgcggccatcgtcgccgagctggtagcgttcgcaccatgagtaatcgagaacaccctccgctggcaggtcgttgaataccgggaaatcggtgcgaattggtttttggtaatccttaccgcggcctgtttcgatcccagcgtcttccagatcgacgtccagctgcagaagggcgcgagcttctgttttattagtgcgccagattacggcatcagctttacccgatttttgagtcgcttttatcagataaaaatattccatgtgatagcctctattttggatgtagaatcccccgggccattggtagcgcccattcagggtggtcattggttttggtaatttccggtgtaactttggtcggtggcaccggacgtacagcccgcttcggcgggtttacgttagccctcgtgagccatctggtcgtgagaggcgcaacgttcagagcaatactctttttctttccgtgcgagctggttcccctggaggtacaacagggtgcttaccactggttttccctcgattgctttacggcagtaaccgcattttttctgcattcctccccctacatttgcaccgtgaacccggccggatgcttgtccagtacacctttcagcggataacattcagctttcacgtgttgctcttctgcagctgccttgcagtcattctcagtgtcgtaaacgccgagcaggacatcctgattaccgcccgtcagcatgctgacggtgagaaccagggcaaacatcgtgctcatgaagggtctcctttttgcgcgagcatgtagcacactcggcggatgaaagctgacagcggatttaaacgaacagcctgctgacgagcgggtttgcgtgcgaaatcattcatagaaacaatcccctcagtgcgctgaaaagcgcgatccagatgaagagcccaattactgctgaaatgaccatggctctgataccgtgcttgctcatttcaactcctcatgtatgcctgtcttttaaccacttcaggctcggtggtatgctggtagttctcacacagccagcaaggaaataaaaatgtcaaaactgacaacgatgaaagttgcttgccctgattgcggaagcgagatgctcaagcgtcccgatgatttcgactttgatacaaattttgttggcgtcagttgtgccaactgtggtcgagaaatcactaaggacgatgtcgttaagcaagggacggatgttgtcaaaaagcaggttgacgacattctcagggatgccttcaagggaacgggctggaagctcaagtaaccccagtagttcctcgacctgattgattacttccgtggcgtctatttcgagttcaataggcgccacctttaccttactcatctcatcctcattgccttgtcgccggccagcggaacgttactacctactgcgcattgatatttccacctcatcccggcattcgtatgctccgggcagctacttcgtgggcgtcctgccttggtggggtgttgctggagttaattaaacacaatgtttaatgttgtgtcaacattgtgagtaattaaacgtaaacaaaaagtttataacgagaggtgggttagtgcagggagtatgtttatgggtctattctttggttttaaaaacatctatgagggctaatggtatgcggtatgacgatgagtttttcgcgaagatgcacccgcaaatagcgcaggttatcggggtagcggttatgcagctactggttgagaagcaagagccgtcaagagaggctctgatagagatgatttaggtgttgtggcaggaagaccatgtcgatctggctgtggaattggcccttgacgttctgtcgctaccgaaagagtaggggcaataaaactcgacgcgtggccgggctactggcgctgacaatacggcaatattttttcaatcgctgattgaataaatgaagggctatgaaagtcaggatctttcaacgggtcactgacatcaatactgttttgcagggagcgctgatattcactccagagttccgaaaggtgtttcttgttcttggggctgcagatatcaatgaacgtatcaatctctcgctgtgatattgatacatttccgccaccgggaaacactccattctcaataagtcgcaattgatctcttaatttttgtcttattatatcgcttattgcattgaactctttgcgtttttccccttttactgcatatctgtagctaaagtaaccgcttgcaggaactgctgtgatagatacaatcattgcaatagttgcaacgatgtcgctatagctcatggaggttttcctatgtctggctctgatatcttggccacagttgccttgattatttcagttacaaacctctccgtaattctctacgggatatggcgcttacgtgattaaaccgttgtgatgattattcttcatcgcccttaatccttcgccccatgtacttggcatacagctcatcgagttctttgagacgcagagatacgatccgcagcatgttctgttgctcttcttcgttggggagttggttatagagttccagcaaccgtttctcgtccgggcgtaaaccatcatttgcatcgacgtcctgacctaaaacccactcaaggcttacgccaagagcatcagcgagctttatggcagagctctttccaatcgctccccgcacaaaccagttgttaaccgattgcgaacttacaccacaaattctcgctatatccgctttggatatgcgcttcatctcaattatttcattgagcctttggacctgtgggttgtcggactggtgcgtattttttctcatatatcacgattttaaactaaatgtttaccgtctcaacattcataaagttgacattaaaataaacataatgtttaatccactctgtaactttaatggagtggtttatgaacgcattagaaaaagccatacacatcgctggtgacgcaacgaagctagcagaaaaactggacgtctcatctatgacgattagccattggaagcatcgccatgggggagccgttcctcagtctcgggttttccaaatcttccgggtaaccggcgttactccgcatgaacttcgcccagatctttacccaaatccaaacgacggtttgtcttcacaaaatctggtgggatgaccatgcaaacactttcctttcaacaaaataccggattcaaccccggcgctctgataaagcgaaatcaggcgaaagtggcagatcacgacggcattcgttctgccgttcgcgcctgggctgcagctgaaggtcaggatgttgtatcggcgtacatcatcgatgagtggcgccagcagggcggggaagaaattgaatttcctgcggacatcagccgcgcccgacagaagcttttccgttatctggataacgaggtcgattctgaaaagtatcgcgcgaatgtgcgtcttctgacgccagccatcatggccgtcctcccgttggaatttcgccaccgcctgttgcctgaagacaatttcatgtcccgactggcacggctggagaaagagaccagcgaagcgaaggttgccgttgccatgggagctccacgtcatcaaaagctgaaagaactgagcgagggaattgtcgagatgttccgggttgacccagaactaacggcgccactgatggccatcgtcacttcaatgctgggggttttgtaatgtcgggtatcaaaaaggcgaaagccgcggtgctgtaacaccaacggctttcaggtgcaaaaacgaagaggtaattgcgaggtaagtatgtcagaaacaaagactgaggtaaacgcccaagcgacccataaatgctccttttgcggagcgagcaatattgaggtttcgggcgttctaatcgccggccccggcgtatccatctgtcaaaaatgtgtctttcagtgggttgatattgtctttcaacacgcagaaaagaccgataaaccaacgtcataagttcaggggtatctatgcgtgactatgcaacagtcgcaccgcaattctggctggggaaaacaggtcgggaactgcggaaaaaaggcgctgaagcgcaggtggtttcgttttatctcatgacctcgccacacgcaaacatgctcggtttgtattacctgccaattctctatatcgcccatgaaacagggctgggcttagaaggggcttcgaaggggcttaaaagcaccatcgaagcggggttttgtagctatgacgaggacacagagatggtctgggtgcatgaaatggccgcctaccaggtaggcaaggcattaaagccaggtgataaccgttgtgcgggggtcaggagtgagtatgcatcactttcagaaaacccttttctttcatcattttacgagcgttataaggatgattttcatctgaatgtcaaacgcgaatcgtgcccaacgccagaaggggcttcgaaggggctaggaagccaagatcaggaacaggatcaggaacaagatcaggataaagatatttcggggcatggcgacgccacacccccagatggtggatcctccgatgaagctccatctgaaaagccgaaaagcagttacccggaggaatttgaactggcctggagggaatacccaaaacgtgccggaggcaatagcaaggtcgatgcgttcaaagcctggacagcccgaattaaatcaggcgcaacagcgcaggagcttaccgatggtgttcgacgatatgcggattacgtcactgctgccggaaaactcaacactgagtacgtgaaacaagcgtccacgtttttcggtccctcaaagcactacgaggagttgtggagcttcgaagtaccaaccggtaaacgggatccgaactcaatatcccagccagataaattaattccgagtgggttcagggggtagtgatgaaaaatatgattggtactggtagtgcgctggagcggctgaaaaaactcatccctccgggtgtagagcctaagtttggcagtgtagaggagtggagaacctggcaggccgaggaagggcgcaaacgctgcgaagaactggaaaaacaaaaccagcgtacccgtgctgaaaaaatattcggacgagcgggaattcaagatctgcatcggagctgcacgttcgcaaattaccaggtggcaggagatggtcagcgccgggcgctcacgatggcgaaaagttacgcacagaacttcggttcagggttcgccagtttcgtattcagcggagcgccgggaaccgggaaaaaccatctggcggccgcaatcggaaatcacctgctggctggtggtcgctctgtgctggtggtgactattcctgacctgatgctacgtgttcgcgagtgctacgacgacgggcagtcagaggcttcgcttctggacgacctttgccaggtagatctgctcatcctggacgaagtaggcattcagcgcggcagcagcggcgaaaaggtcattctgaaccaggttatcgatcgccgcctgtcgtcgatgcgtccggtcggcatcctgacgaacctgaactacgaatctctgacgggcaccctcggcgcgcgcattctcgaccgtctccagatggacggcggcatgtgggtgaacttcgactgggatagttatcgcaaaaacgtccgccatctgcgcgtcgttaagtgaggaaaacatggctagagcattttctgctattgagcgccgggagtatgtccgcgcagtgattcgtatcaccagacatcaggggcgactcacgaccgccgaggcaatgaaaaaactggggctgagccgcgctactgtccaacggtatttttccgaagcagaagcgactggtgaggttgtccggcatggtcgtttggggctgttccgcgatcagcgggccgtcatcgactttgacatgaagcgttttggcctggtgccgaaagttgctgttgggatgaattacagcctgcttggcagtcctgtttttcagcgagttttagatgttcaggaggctattcatggctaagaattcaatcgatgtatacggtgccagcggcaaaacaaacgtgctcaatttcgagcctgaaaacctgcacctggtcaccgataagacccacccactttacgatgagcgagtacacctgccgatcgaggaagggatggtactgaacattgcggagctgggtgtactggagccaatcatcgtctggaaagaccctgaaacggggctcacttgcgtagttgttggccgtcagcgcgttaaacatacccttgaggcaaataaactccgtctgaaagaaggcaaagacccactgcttgttcccggagtcgttaagcgcggatcagcaaatcagatggctaaatacatggtcagcgaaaacgaaattcgccgacctgatacaccgcttggccgggctaaaaaaatgtcagacgcgctcgaccgcggactcgatgaggacgacattgcggtgttgtttggctgcagcgttcaaaccgttcgtgcaacgctctcccttctcgatgccacccaggccgtccgggaagcagtggagtcgggcacagttaccgttacccaagcccgccagcttggcacacttcccccggaagagcagcgggaaaaagtgaaagagattgaatctgcgaccgctgggactaccggtcatgaaaaagcccggcgtcagcgtcagatcctcggtgaggcaaagccgcgcctgaaaacccgcaaagaaattactaaagccctggaatctgccgagggtgagtatgcgagcgcactccgttgggtgcttggggaggccgtatgacaatcgtaaaaacccataccggcaccgtgatcaccaaagacggtccgaaggtaaaaaaactgcaccagacagagcggatgtgggtcgtcggcaaaagcgagttttaccacaaagaaacagggcgccgtcactttgcagaaaatacgcgccgccggctgctgctcgacaccatcaagcctatcgaggtgaagcatgtttaaaaagaacaaaaaggctatttcacagattgcggaatatatcccgcgcgcctgccggggtatgcagctgcatgaagcgaaagcgcgtctggagaaaaaaatcgcgctctataccgatgacggctgtgatgttgccgttcttaatgcggcctttgcgccagctcttaacagtcatacgcgggagtcttttttttcgagcatcgcagcgcagctgcatgagggggccaaatgaccgagcaaaccatcctcgacatgtgctgtggctcccgcatgttctggttcaacaaacgagatactcgcgcggtattcgctgacattcgagccgaagagcacaagctgtgcgacggccgccgtctggttatcagtcctgatctcgttgctgacttccgtgcgctgccgttcgctgatgcctcatttccggttgttgtgtttgacccgccacatcttgagcgcgtcggccagaccgcgtggatgggcaaaaagtacgggcgcctgaacaaaaaaacatggcgtgccgacattcgcgcaggattcaaagaggcgtttcgcgtactgcggccacatggtgtgctcatattcaaatggaatgaaacccaaatccccgttagccaaattatagctttaacagacgagaaaccggcgatcggccagcgcaccggaaagaacgataaaacccactggatcatcttcgtgaagggagctgcggtatgaaaattaaatgcatcaaagacacagagggatactggactgaaggtgaaatgtatccggcccgtgtagttgctggcggttttgttcaagttggcgacgattacgatcgcattggcgagggctggagcgctatgcctatcgaataccgggatgacggctcgatcgtttatgaattggggggtattgaagatgacgttcagtttgaggaacgtgcagcatgcgcaaatcattaaccgcacgctgtatgtggatgggaagttgagtttaaaccgtattgcgactcgaaggttagaccgaagtagtgcaaaaccccacgcaccgaccagcagcgcgcggcatgaaggactttgccgcgctaggcttctacgtggtggcgctgcatagcaaagcggtgggggaaattattcccccacaatgaaattaaggctttttgggaggtggtgccggttgagaagtttgcttagcaggctgaaaaccattattagccaaatcatttttaggttgataacccttttctaggggcttgtaaccatcttccttataagtttttttagtttctgacatatacaaaatcctctatttctatgggtaggtagtttgctgctgttcaaagcggaaaaactctaagtgctcgatatccttacttaaaatcagtattcctaaagtggaagtgcgctgacgttcaaaaccaccgtcgctgtttaattcccaatgttcctcaagatagatctgttcaggttctggagcgctggacgcaaacgagttagctccatacttacccgctattttcttcccatcttttagcgtgataatcatccagcatggaactttcagaccaaaaaaataatcccatgccctacctgtggggtgaggcatgtatttacatagccaatcccattcgcgcatcctcgaaaacaaaaaagccaacagtgtcgggctagcaaataatataaacaagtaaaataaaaagtaagcgaaaggatgcgctgcataaaccttgttagattctataaaatacacagggataaaccagattgcataattaatacagctatacgagacaatttcaataattgctttagatgtatcaaaaaaagcattgggtctaagtacgctatacatcttcatacttatgaagccaggtataacgaatagtaaaaatattacaattttgctcttatcccagatatccattttgttttccaaggcgtagaggtcacataggtcacccctcatatgatatcctttaaacctacaagttaccaatcccttctcatgaaccacgaaatggatatcgcgcgttgcgacatatgggtggacatagcatgggtaaaaccgtggcgacgctgatctcgttggaaggtatctttttgggcagagcagagacacagtcagcgaaagtacttgcttcgctgttacggctaggacattgcaggatgaggccttgtcatagggtgacctgcgcaatatcgaagtgtagctattgaaaacgcgcactgcggcaacgctgtctcgcctccttttgctgaggcgctggtgagggctaatttaccggagatgtgcctgaaaaaagacattgcagcatgataaaacccgcttcggcgggttttttaatatggaaaaacatcaatctaaacataagcatggtgttagcaaaaagtgctgcagaggggttgaacatttcatgcaaccggtatactgtttatttatacagtatccatgtgaggtgctaaccatgaaagttgaagtcacaattgataaacataaaaaactccctgatggcgccatacctgcgcttgagcaagaattgctgcgccgcttgtcccagtcttatgatgactgcaaattaactattagacgcacaagcaacgatggccttagcgttttgggcggcgctgatggcgataaaaaacgcgttgagcaaattctgcaagagacgtgggaaagcgcggacgactggttttactgattcaccttttggtggctggcatttcccaaagcatcgcaataagcgtgtccctttgatgctgtcaccggacttttttttgcgtctgtatgtcgctcagggggtagtgtgagtgatggtattgaggttcctactaatcattcctggtacgatgttgtcaggagatcagatggcgccattatttgtagcttcccggccgaaggaaggcatctgatttacagggttaatggcataatttcaatgcgacctttattgcctgaagaagaaatttttactctaaacggatttatgaaatttgcggaacgacttggctaccgagttctcccaccttctgataatatgaaatcaacggcctgaacaaccgttacctactgcgccacggagagaagccatggcgcaattgcacttaataaaacaatctcaaggtatcctgatccccgcgacgccggagaccagtgattttctgcaatcaaaatgcaagctcggatccgttctggaagccgattataagcttgtccgcaatccggcgtttcaccgccgttactttgctttactcaatctcggctttgaatattgggaacctaccggcggggcgatttcgtctaacgagcgcaggcttatcacaggttacgccaaataccttgctgcatatggcgggagtgaatcggcgttgcttgatgccgccgggcaatatctcgaccggatagctgagaagcgatccggctatatcagtatttgcaaatccttcgatgcttaccgggcgtgggtcatcgttgaagccggccactatgacgccatacagctgccggacggcacgctgaaaaaacaccctcgcagcatttctttcgcaagcatggacgaatgcgagttccaggaactgtacaaagcatcgctggatgttctctggcggtggatcctctctcgttcattcaacagcctgcaggaagctgagaacgccgccaaccagcttttaagcttcgcggggtgatgccgatgaaatactcatggtttcagcatcccgaatgcactgcggagcaggcagaacagttggtgtccagatatcaggcgcgtggcatcgtcaccgagaaaagccttaacccggattatctgagctggacggtcagcgccaggctgccggtttgtgctcgaccggagtatacgccgcgatcacttcgtcaacggatttgggggtaagcatggctaatcttcgcaaagcggcgcgcggccgcgaatgtcaggttcgtatcccgggcgtctgcaacggtaaccctgaaaccacggtattggcccatatccgcattgctggattgtgcgggaccgggattaagccgcctgatctgatcgccgctatcgcctgttcatcctgtcacgatgaaatagaccgccgcacgcgcctggtagatgcggagtatgcgaaggagtgcgcgctggagggaatggccagaacgcaggttatctggatgaaagaggggctgataaaagcatgaaccaatatcgaatttcattaccctggccaccaagcaacaaccgctactaccggcataaccgggggcgcacacacatcagcgcggaagggcaggcataccgcgacagtgtcgccagaatcatcaaagacttgatgcttgatatcggcctttccacgccactgagaatccgtattgagtgccacatgccggatcgccggcgccgtgacctggacaacctgcaaaaagctgcattcgacgccctgacgaaatcgggtttctggctcgatgaccagcaggttgactactacagcgtgaagagaatgcctgtcgtcaaaggtgggcggcttgagctaaccattaccgaaatggaggccgcatgagccgtgacgttatcgaacgcatccacgaccgctggcaaaagctccgcctcctgcgtagccgcggcaccgtgctggttgactacaaaatattacgcaatttcgtccgtatctataagcgcctgggagaagaagcatgacagctcaatacttggaatttgttcgccagcagctgatagtggccaccgccgatctgagcggcgcgacgaaagggcaactggtggctttcgcagaaaatgcgcaattcaccgctacggcgcgcagccggggaaggaagaaagtagccgacccggtaaccggccgcatggtaaacccatccagcccgccaattcccgggcagcagtcccgcgctaagggttcatcaatcgctctcgttcttcccgttgagtattcgacggcaagctggcgccgggctctgctgtcgctggaagagcatcagaaagcctggttgctctggaactacagcgacaatatccgctgggagcaccaggagacaatcacccggtgggcatgggagcaattcagcgagaagctggctggcgtgcgcattgcaaagaaaacggttgatcgcctccgtcaacttatctggctggcagcgcaggacgtcaaagccgagctggcgggtaagtatgtataccagcaccaggatcttgcagccctgtgtggcgttaaacctgataactggtgccataactacgctgattactggcggactatgtgcgccatttttaagcggcttgatagcgactctcttctctgtgtcgtgagaacacgatcacaacaaaaagcgactttttcgcagcagggtcttgcaaaagtcaattaaatgcgtcatatttgagtctactttgatatgctgccttaactttaagtggcggcatgaagatgatagtcacataccagtttgtaaaattagcctcggcatcccgccggggcttttttatgcctgcgatccggtcagggctcttgggtagagacgtgccgcacgacacgttaaagccctccgcgcagagccctgaaccagatttctggtttagctcagcaataagaaaactgcatgccatcatttgcttacatcttattgaccagaaaaataacatcttgttaatctattcatgtggtgaatccccctgtgcggtggggcgaccagtcacttacagtgatctgtaaatgcagcgcgagtcatgtcggctgggacatgctcaccgggaggcacccggcaccatgcaatactactaagacattaggttgtgggttgccgtttcggcttctccagctatgtttaaaaggcagtaacggaaaaagcgagcgctctcctggtaaatcggtagctcggactattaggtgcgttttcgtttgttactacctagaatgcctactttctgcccgttcctctgagcgggctttttttcgccatgaataaggctcctcggcaagctgaggaacaaatcatttgaggctgcgcttatgcgcggccttttcattttcccctcaattctgagaggactcacagcaataagagggggcttaatgtccgatcctttaactggtaccggcctgatttttggtggcggtttaattggttccgtcatatatggcgttatcacccataccgattttggtgtggtatttggggcttttggcggcgcagtgttttacgtggctacgaccgcaaacctgacacgtggaaggcaaatagcttacttcatgacgtcgtttattgtcggtgttctggctgcaggattattaggctcaaaatttactgcatggacaggctatacggatcgtccgcttgatgcgctcggtgcggtggtggcatctgctgtaactatcaaggtcctgactttcattaacagccaggacttgagcagcctgttcggattactttcccgattaaggggaggaggttcgagtggtaataaatgacccggcagcgctggtcaatgcggtgatatgtgccgttattgtctgcgctttgatgttttatcaacgtcgcggtgccaggcatcgccctggtatctccattcttgcttacttgctggtattgatttacgcgagcattcctttccaatttatcttcggtctttacgtacagtcccactggctggtggtaatggcaaacgtaatgatatgcgccgccgtgctgtgggcacggggtaacgtggcgcgtctggtcgatacactgaggcactaatgaatcaaacacaattccagaaggcggctggtatcagcgccgggttagctgcgcgctggtttccgcatattacagccgcgatgaaagagtttggcataacagcagctatcgatcaggcgatgttcattgcccaggtagggcatgaaagcacgggatttacccagcttgttgagagcttcaattatagcgtggccgggttgaatagttttgtccgcgccgggcggctgacgcagggtcaggctaattcgctcggccgccgtcagggtgagccctctttgccactggagaggcaaagagcgatcgccaacctggtgtacagcaaacgcatgggtaataacggggcaacagacggctggttttaccgagggcgtgggctcatccagatcaccggcctgaacaattaccgcgactgcgggaatgctctgaagattgatctggttaaacagcctgaattgctggcccaggatgagtatgcggcgcgcagtgctgcttggttttatgcctcacgcggctgtttgcgttatcccggtgaccttgcacgcgtcacgcagattatcaacggcggacagaacggcatagatgaccggcgcgcccgcttcctgaaagcaaaagcggtactggtggtgtgatcatgggaatcgaagcaatcgcggggctggtggttgtcatcctgggtgctatcgctggcgcgttcggcatcggccacgctcgcgggaccagtaaggcggaagccaaagccgatcagcagcgtaccgaagagaacgccgccgccaccgtcgccgcggcagaacgtaaggcggaagttgtgaaaggggccagtgatgtacaggaagacgttaagcgtatgggcgatgacgatgttgatcgcgagctgcgcgaaagatttacccgccccggtagtcgttgatacggcctgcaactgggtgagggtcatctacctgaccgaccacgatattgacgtgatggatatgcagaccaagcgcgacattctggcgcacaacaaatcggtacaggccaactgtccgaaattatgactaaccaaggcctcgcaatagcggggctttttattaccagaagcaggagaagaagcatgttaacagtaaaagtgatgtcaccagatggtggcgaagaaatccattgtggcctgagtgttggtttcaaccccaaccagcagagtattgccgtatcgggaatggaccagaacgtattcctgaagcagggagaggttgcctatgtgatgaacgcaaacggcaagaccatttcccgttacgaacacagggtccagcagtaggcattacagaagctcctgagctaggggcttcgataatgctaaaccgaaagatcgggttaaagcctgataaaaaaccccgtggaggaaatcccaaaactacggggtgctgaacagccagccaatggcggattgtagccacatagttggtttattatctactggttgagaataaaactgagagcctagaaggcttgagagtggctcatccctgagctcacgggtagaacggcagactttgtcatggcagagcaaagtcataacttagtttaggtaacatttcggatataacaagcgtagcgggcgtgtatcaattagcggagttcagcaactgaggaatcgagcattcactgagtgccatagataatgctatagttcaccaggaaaagcagattgcatgctgtcatgagatgcagttcatattttgaacgtcagggttaagtcagtagtgaatataactattaatagtggattatttggttatttgtttttgttattaactatgtggccagtttttataacactgtgtctggcaatgtccatagcattttacggagtgttaatgaagaaggctgcgcttgcgtggctgattgccgctttattttttggcattcttggggggctgcgtgggtattgactctctgatattgaggttatttcgacgtctgtaaggatccatagctgccgtcatccatcgaattcatgtatgctgataaggatttttaaaggaaaaggaatggatgatgaatacccataagcttctggatacatacatgttagttggtaccggtctttctcgcgtcaaatatgagattttttcaggagatgaaggatcatatgcgtttattacgatttatgcatatgagcctcatttccatattaagggccatgattccttaaagttagacgaagctgttgatgtcagatctcagatcgaagggcattttgcagatagctaccagtagccaaaccatttatctgaatctacagccccgtttgtgcggggctttttattgcgcctcgaatgctaagtagtaaccaatgccaccgttaattcccccgcatgtcgtaagcgcggatgtgcaagcataattacggaccgctcaggctgctgcgacaagcaccgcaatgacggttgacagcaattcaagggcataagagtgactccctcggatagtgggaaagcattacagaagctattctgccgagtggtttctataatatttcccacatcgcacagaggtaagacatgtcagagatcaccacatccgagcaaatccgcctggatatcatcaagaaagttaactacgacaccgcagcggccaagctggccattgactgggttggtgatagcaatctgaaagctgagctattcgctgactctttcgatcgcgtcttcactgaaagtgagattgtctcgaagacccgtaaagcgattcaggaagcgaccgaagcgctggcgctttttgataccgcagctgagtaatcatcacaaatgccacctacgggtggcttttttaatggttatcgaatagggggagtctatgccggtatgcacgatttcaatagaagtaaaaagccgctggtggctgccgctctacctcaaaacgctgatgctattctgccagatgattcagcgagagcctgattacgaaaagatttccgcattcatcgcggagtatggcatcggccagaaagtgaaggcgggaccagtgcgaaagaatacggagtaatccatggcaaaaccggactggggcgagcttcagcaacggttcctgtccgatcatgccgcaaccggcgtatcaccgaaggattggtgtgaagcgcagggactgaattacgctactgcccgccgatacatcaagaaacccactgcgcaaactgcgcaaaaacctgcgcagaagaaactgcgcactgcgcaaaaggaaaagtgcgcagaagagctggtggatgatgatggcctcaccgatcagcaacgtttatttgtcgcagaatacctgaaggaccacaacgccacgcaggccgctatccgtgccgggtacagcaagaagactgctgaacaaattggctatcagctgcttcagaaaacttcagttgcgcaggccattgcgcagcagcagaaagcatccattatgcgcacgcttggcagcgctgatgaagtgcttgagcagatgtggcggctggcaacattcgacgccaaccaactttctcagtatcgccgcgggagctgccgctactgctggggcttcggtcaccagtatcaatggcgcgatgcggtggagtacgaagagaagcggcttgaagcgcttgagcgtaaacgtcgagagcctttggatgatggcggctacggttacaaccacaccagcgcacctaacccggaatgtcctcgctgcaatggtgatggcgtcggccagccattcttcgccgatacgcgcaagctggcgcctgatgctgcgcttgcctattccggcgttaagctcgggaagaatggcgtggagataaccgctatcagccgcgagcgaatgtacgaggcggtgatgaaacgtctcggcctggctgacagtgagttcacccagcgtctacagcagattgaaatcgagcgccggcagctggagatcgacaagctccgtaaagagctggccgctgacccggaagatgacgaaccaacgccagttgcgatcaatatcaacgtagtcgatgcgcgagtgagggaagaggatggcgatagctccgacgcttaacgttccccaggctcgttttctggctatgcagcagaagttcaaagcctatgtagctggttttggatccggaaagacatgggttggctgcggtggaatatgcaaagggttttgggagttccccaaaataaaccagggctactttgccccgacctatcctcagatccgcgatatcttctaccccacggtggaagaagttgctcacgactggggactgaaagtcaaaatcgttgaaagcaacaaagaggtccatttctacagtgggcgccagtaccgcggcacgacaatttgtcggtcgatggaaaagcccgacacgatagtaggctttaaaatcggcaatgcgctggtggatgaactcgacgttctgaaagcggataaggcgcgtcaggcgtggcgaaaaataatcgcgcgtatgcgttataaggttgatggtctgcgtaatggcattgacgtgactaccacacctgaaggatttaagttcgtctataaccagtttgttaaggctgtgagggaaaagcctgaactaaggtcgatgtatggtctggtacaggcttcgacattcgacaacgaaaagaacctgccggatgactatattccttcgcttctggcgagttacccgccggaattgatcaaggcatatctgaacggccagtttactaacctgaccagcggcaccatttatcatcagttcgacagagtgctgaataattccagtgaggaagagcagccaggtgaagcgctgtatatcgggatggatttcaacgtcgggaagatggccgggatcgtccatgtattgcggctcggcttaccacacgcggtaacagagattatcaacgcttacgatacgcccgacatgatacgcatcatcaaggaacgtttctggctgtatgccgacggtgactaccgcaaggtccgcgagatttatatttacccggatgcctctggtgattccaggaagtcaaacaacgccagcaaaacagatattgagcagctccggcaggccggatttaacgtcatcgttgatgatgctaacccgccggtaaaggaccgcattaactccatgaacgccatgttctgcaatggtaatggcgatcgccggtacaaggtgaatgtggcccgttgcccggtctatgccgactgcctggaacaacaggtgtgggataaaaatggcgagccggataaaaagagcgataacgatcaccccaacgatgctgccggttacttcattgtgaagcaattcccaatcgttcgacctgcattctctatttcactggacacgacattctgatggccaataacgatattacttacgttcgccctgaggtcagggcggcaatgcccgtgtggaaaaaaattcgtgacgtgtgcaaaggggctgatgctgtaaaggccgccgggaatgaatacctcccttttctggatccgtccgataagtctgcacgcaataaaaagcgcaatgctgattacattcagcgcgccgttttctacgcgataacgggcaatacaaaagtgggtctactggggctggcattcagaaaagacccgaccatgaccgcgccggataaactgaattatcttcgtgacaacgccgatggtgctggtgccagcatttatcagcagtcccagcaggttacagaaaatattctggaggccgcgcgcgaggggctttatacggattatgcagctgagaccgacgaggcgatcatccttcgttatcaggcggaaagcatcattaactggcgcaccaaacgcatcaatgggcgtgatcaactggtgctggtggttttacgcgaatgcatggaaaaggaagatggttttgcgtacgaggatgaaatccagtatcgcgaactggctctggagaacggaaagtttgtctgccgggtatggcgaaagtcagctgacgcaggctctttttccgtcacttccgagtatcatcctaagccaaaaggtgaggatttctgggatgagatcccctttaccttcgttggtgcgcagaataatgatcccaccatcgacgagtcgcctttagccgccctcgttgaaattaaccttggccattatcgtaattcggcagattacgaagacagcgtatttttctgcggtcaggttcagccggtgatttccggtcttgataccgcctggcgtgactggctgcaggataagggaattcgtgtcggttctcgttctccattcctgctgccgaaggaggggagttttacctatgctcaggcgcaaccaaacaccctggctaaagaggcgatggacagtaagcgtgattattctgttcagcttggcgcccggcttatcgagcagaacggcgcggttaaaaccgccacgcaatccagcggcgagcaaaccgcatccacatcggtgctcggcatttgcgtttccaatgtctcggaggcctatacgctggcgctcggctggtgcgccagatatctcggcataaaaggcgaggaatatcgttacagcatcaatcaggagtttatcgccaaagtcgcagaatccggcatggtaacggcaatcgtcaatgcctggcagtacggtgcgattcgcgacactgatatggtcagagctctgcagaggcttgacctgatagatcctgctgacgaccctgaaactgtcattgacgctattcgtaacggcgcgcctaacctgattggtggcaataatggcaacggcgaatgacaaactgcaggatgaatccatagcccacgctatatgggttagtcgctacagcaccggcgttgccaacaggatgataaaagttctgaatgacagcgacgccgaacttaccgccaggctgctggtggctatcgatacgctggatcccgagagctttaccgtttcgcgtctggaagcgttactggtcagtgtcagggcgataaacaaggatgcgattcagtcgatgtatgcagctcttactgccgagttgcaggaactggcgaagcacgaagccacttttcagatgagcctcttccagtttgccattcccgacgatgttcttgctcttcatccgctggtgggcatctccccggatgcggtttatgccgcggcgatggggcgtccattccagggacgtttgctgagtgaatgggccagcaacctcgaagctgatcggatggcgcggatatccaatacggtgcggcagggattcctgctgggcgatacgcaggagcaaatcgcaaaaaaggtgcgtggccatgctaatcgtggttaccaggatggtgcgctgcagatgagccgggccaatgcagccagcattgcaaaaacggcagtagggcatcttgcatcaacagcaagacaaagctttgcgtcggcgaacgacgacattctgaagggtaagcagtggttatccactttggataaccggacatcaaaggattgtcggatccgcgaccgactcaagtacacgctggataacaaaccgataggacacaaggtgccttatttgcaggggccggggaaaatccacttttgctgtcggagcaccgaaacttacatcctgaaatcgtccgaggaattgggtattaaattcggcgaaatcaaggatagctcacgcgccagcatggatggacaggttccggctgacacgaattaccaggactggttctcccggcagtcgttcacgcgacaagctgagattgtcggagaaacgcgcgccaggctgattcgtgatggcggcatgtctcccgatgagttctacaacgacaggggcgagtggctgacgcttgaccaattgcgcaaccttgacgcgcaggcgtttaaggatgccagagtgtgatagagtaaattcgtggtgaatgcaggatgctgacctgcgcgccaaagcgtcccgtgagaaacgggcaagccggaaaccagactcacttcggtgagtccccgccgttctgaagtatcagaatgccgtggcagcaccggccaccacacctaattgtattgtcagtggctagggtcgctcccgaaaagcggaatcgtcaccacctacaaccaataacccgacaagcaacgagacgaggttgttatggattcacaaaaacaaagagaccttattgcaagcctgtatgaagagctggtaatcgcaagagggctcattaaagagatttgcacagtgcgaagcattgcagagccaaagtcttctttgcagagaatggataaagccattaaagatgcaaaagaatatatgctagaaaatagctaaatgaagaggtcgccttagcgcggcttttttattatctgaaatttacaacaggctgcctaagggcggccttttttattgggccaggcccacagttactatcccaaggggacaacatgcttattcgtaacatgctcattaaatattattcggcagctggtggtgaaggtggtgatggcggtggctccggtagtggtgcgcccgagattacgccggaaatccaaaagctgatcgatgagcaggtcagtgctcaggtttcaggcctgaaaaataaaaatagtgagttactcggtaagctcaaagagtccactgagtcgcttaagcgttttgaaggtatcgatcctgacgcggtgaaaactattctccagcgtttctctgatgatgaagaggcgcaactgatcgccgccgggaaaattgacgaggtactggataaacgcactgagcggctacgtgctgatgttgataagcaaatcaaagccgctaatgaacgcgctgaaaaggcggaagcgttctccaacaaattccgtgatcgtgtcctgggtgatgctatccgcagcgcagcgcttaaggctggcgcgctgccagaagcatccgacgatctgattcttcgtgctaaaggcacattccagctcaacgacgaaggcgaggccgtagcagttgatgcaaatggcgatgttctgttcggtaaagacggcaaaactccgctcaccccggttgagtgggctgaatctctgaaagagacggccccgcacctgttcccgcgcgccgaaggctccggggctggtggtcataaacccgctggcggtggcggtagtctgaaacgttcagaaatgagctcaagcgacaaagcggactacatccgcaaacatggccagcaggcctatctcaaattgcctaagtaaggactaatcaatgcctacgaccgtaaacagtgacctgattatctatgacgacctcgcgcagactgcgtttcttgagcgtcgccaggataatctggaagtcttcaacgccgcttcaaacggcgcaatcattctcgacaacgaactgatcgagggtgattttcgcaagcgcaccttctataaagttggtggttctatcgaatcgcgcaacgttaactccaccgacccggtaacgggtaaaaaaatcggtgccggtgaatctgtcagcgttaaggcgccgtggaaatacggcccgtatgaaaccacggaggaggcgtttaaacgtcggggtcgcgacgttagcgaattctccgaggtgatcggcgtcgacgtcgctgatgcaacgcttgaaggttatatcaagtatgccctacagggtcttgttgcagccattggcgcaaatgctgacatgacggtatccgcggatattgccactgatggtaagaaaacgctgacccgtggcctgcgtaaatacggcgataaatttaaccgtgttgcgctgttcgttatgcattccacgacctatttcgacattgttgatcaggctatcgacaacaaaatttacgaagaagctggcgtggtggtttatggcggacagccaggcacgttgggtaaaccggtgctggtaactgacaccatgccagttgatgcgattctggggctggtggccggcgcggtatccgtaacggaatcacaggctccgggcttccgttcctacgatatcaacgaccaggaaaaccttgccattggctatcgcgcagagggcacggttaacgttgaactgctgggttacagctgggatgagacgaagggcgctaaccctgacctgaccaaaatcggcaccggtgcgaactggaagaaacatttcaccagtaacaaatccactgcaggcgtactgattaagctggaagcccctgcgggggagtaaccctgtcagtggataaaacttccgcaactgctgacagtaccgacgcggtgaccgtttcgctcaagtacaccagaaatggtgcaggagtctccggggcatctgtggcgtggacgtctacaggcggcacactcagtgcttcgacgtcacagacagggtctgctggtggctcgacggtgaaactcacctctgctacggccggctccttcacggtgacggctaccgttgacggtgtggtgaaaacaactgaagcgattgcgttcactgctcctgcgggtggttaaccgacggggcgaaagccccgtttcttttggtgaggatccgatgaccgtttatataacaatccaggacgttgacgagttgctgggggatacctgggctgccgccgacaaaaagggtaaagccgtgctccaggcaaacacctggataacggcgcttaaccttcaggatatcgacccggagcatattcctgaagaagttaagcaagccggagcgtttatcgcttccgtagccgctgcaggcaatctgtatcagcaaaaaacagattccggcgtggtgacgagcaaaagcgttgaggccgacgatgtgaaggtttcccgcacttttgccgagctttcaaccaccagcactgaattactcgatcctgatttgcagctggcgctggatatgctcaaaccgtggatgattaaccctttccagacattctttgtgagggcgtgatatgtccgatttgaaggtggtcccatttcaaaagcccagccatcacaacctcgataacgaccaggttattcgcctgctgaaacaggctctggagagagccgaaaacggcggctgccacagtgtcgcagtgatactgcttgatgatgagggtaacgcgattgattgctggcataacggtggacgcccctatgtgatggttggcgctatggagtcgcttaaaaccgactttatccatgctcatattgagcggcggtaagggggtaacatgcaaaatccatatgtgcattatgccggcgacgggctcggtccccgcgatgtgtttgtgaatggaaacccgatcagacatgtcgtttacgcaaaccaggcaaagggtgttgtagagtttgctccgctcccgctgcgggttaagcgcaatggcgaaatttatacccgcaaactccacggtacagtgatcgttaaacctcagcagcgtattggtgggtgcaatgggcattcgtgacgagctgcaaaccgaagtcgccgcggcattcgataccgacctgcaggatgccgttaaggatttcactgggtcatataccgttcggggtgcctgggacccggtgacggaaaccggcactgaaacgcaggtgacttactcggggcgtggagtactggcgcgctataagctgcgccgtatcgatggcgttaacattctgcatggtgatgtgaagctaaccgcactggttaacgaggtgactgataagccggccgtcgggcatatcatcaccgcaccggatccggttacgggtgagcttcagcgctacgaggtcatcaccgcttctgccgactctgctggcgctgcgtactccattcaactgcggagggcgtgatatggctaagggctggaacattgacccggcggcattcgccgggctggtggcagaagatgtcaaactacgccagcggacaatcgccattcagctgctgaatgaaatcgttcggcggtcgccggtaggaaacccggagctgtgggccattaacgcgaccgcggttcagtacaacaaagctgttggggaatggaacgaatctctttatgccgatcctgccaacctgacaaagacaggccgtctcagaaagaaagtccgtgttaatgacagcatggatatcaggcggccggctgagtatcgcgcaggaaccttcagggcatcgcatttcgtcagcatcggcgaacctaatcattccgtcccgaccgaaccggatccgcgcgggacaatgacgtttcttaatggcaaaaatatcattgaccaggcgccagcctactcggtgatttacatccagtcgaacctgccttactccgtgcctctggagaatggccactcaacacaggcgccgacaggcgtctatgccgtctcgtttaatggtgttattcaggcctacaaatgacccttacagaaatcagaaacgctgtcatttcccgaatggcggcacagaccgctattgcctctgatgcggtggattatccgaatggcccggtatttgaccccagtaaccgcgatatctgggcccgactaaccaacattgctgggcaggctggcgcaaccgagatcggggacgggccggtagtccacaggacgggcttactcatcattcagctttttgttccggtcggttccgggacgttgcttatctcccgaacggccgatcagctaacggagctattcgagtttaaggatgacggaaagctgagttatttcgctgtttctgctgtgccggcgggtgagaccgatggctggttacagctcaatcttcaaattccttatcgcgctctgtagcgcacaaaaaacaggaggctcctgtgagctcaggtgcaaaagtagtagccgcgtttattcgcgagacaacgccaggaatcacgcctacagcaggggcgtggaacctgctgcgtcgttcttcatttggtctgaaaccaacgcagaacaccaacgacaatgacgaaatcgctggtgaccgcatggcgcaaggtgtttcacgcggcacagtggatgtcggcggcgatgtcggcacgcggtttcgctggaaccagcatgatgattttcttgccagctgcttcggttccgaatggctaaataacgtgctaacgatgggtaatggtcgcattacgttctccgtggcgacttttgccagtgatgtggggatcgcccagattgcccgcggttgccaggttggcaccttccagatggaaatcccggccgatggtgatatcactgcaaccattacgtttgcagggctggactgggagacgaagggggacgataccagctatttcaccgcgccggtggatttagcgggggcgctgcgttactcctttaaagaggtcacgaacatccggctaaatggtgttgatggcgggacaggtttctgcgtcgacaccttcaacatccagttcaacaacaatatgcagactcagcgctgcattggtaccggttcggcattcgccagcgcaaacattccgacaacctttaccccgtcaggtcaaatcacgctgtcatggtcaaaggctgcctgggaggtttacaaaaaaacgttcaccggcgaaacggtgccgtttagcttcacgctggagaatgctgaaggcgcctataccttcgatttcccggaagtgcagatctccggcgactggccggatgcggggagcactgacattgttcaggttcagctggatatcaccgcggccaatactccgccaactatcacccgcgttcccaaagtgccggcgacggcaatcagtgttgcgccagccacttcaactggagcagtgggatctactgtgacgttaaccgccacgcttacgccagctgattcaactgataccgtccagtggacgtcatcggatccgactatcgccagcgtggtttctaccgggcagaaaacagcgaaagtcacacgtaacgcagccggtactgcaaccatcaccggtaaggcccgcacctttaccgcaacgtctgaaatcaccgttaccgcgccttaatttacctggcccgttctgcagtcatcgcggaacgggcttttttgggagtctttatgctgattatttcttctcaaattgatttgaacggagaacgctggttttacccttacaaaaagccagcaggaagtaaaaagaaattcacgccggaagacgaggcgctatttaaactccgtctgctggtggccagtagcgagaatccacaataccgctcacgcaatgcgctggtgcggcgccatatcgacaaaatggacgcgagctaccaggtcggtacggatgctttcgatctcgccagtgtgggcgagattgactcggttgatgatcttctcatcgacaattgcgcgcgctttcttctgaaagactgggaaggcgtgggggagctggtggatggtactgagacggccgtaacgtatactccggagcgtggtgttgcgttactgaaacaaaacccctctctgtactggcttattctggctgaggcggcgtccattgctcagggtaaggagcagcagactcaggaaaccgtaaaaaagccatagaggcccaaaaatggctaagggaattcgccggcgagcagggcgagaaagcaaagtggcgcagggagaaactaaatctcccgcccattccggagcctgaaatcgatgcagttactggggagatcatcagcgcttacgccatgatatcgcgcggcaggaagtatgccggcatggccggggtgccgctccctctatccctgaatgatattgagctttacctggcatcgcgcaccatcctgatcgagcgcattgagtttgacgcagcgatactggctctcgatgatgcctggagggctgagtgggccgaagagcaaaaaaggcgggcgatagtaaaataacctaatcattgtttagctgcctctatatgttaggatgtttctgattgtaatcacgggaaacataaaatgaagaaactaatgatggtaatagctgggatgtttgttatttctggatgcgctactaagcagtatccgcaagctccgtccgtaactagcgaagagtctgctgcgttagattgtgccgcaattaagcaggaaatcgcaaaaacgcacagcattcagaacgaaatcgaaactacaggtcagtttgatgggcgtaccgtattgggggctttgggagatttcggtatcggtaatggtatggccaaaagtgaagcgcgtaaaaaggcgcaggcacgtcttcagcagcttgaatctcttaaaactattaagtgttcagatagcaaagtctcaggttaattctggcagcgattgtctctgttgcaataatcgcaacaattatcgtatatcgacagtaattgtttattaaaaatctaacctcgccccggcggggttttttattgtccggagatcgttaaatgacagaacaaacctcccgccttgccattgttattgatagctccggagcagagaaacaggccgataatctcgcaactgcactggtaaaaatgacacaggcaggtgaacgtgctgccatcagcgcagtgaaggtgacaaaggccactgatgaagaaaaaaagtctctttctgaactcttagatcgcatcgacccggtaaacgccgccctgaacaaactggataaacagcagcaagatcttgcgaaattcaaatcaaaggggatggtagatgccgatacattcgatctttattcaaagaaaatcgaggaaacacgaaacaggctaactggatttcgtgacgaccttggaaaaaccggccaatcagccgcacagactgcctttgccatgcgcatgatcccagcgcagatgaccgacattattgtcggcttatctacaggtcagtcaccgtttatggtgcttatgcagcagggcgggcagttaaaagatatgtttggtggtattggtccggcaattaagggtgtgggcacctatgttatggggttggttaaccctttcactcttgcagctgcggcggtcggttttcttggtctggcctattacaaaggcactcaggagcaggacgaattttataagtctctcgttctcactggtaatctggtaggcaaaacctccggtcaacttgccgatatagctgccagcgcaggcattgctgcggattcaaccactggcaaagccgcatcaacccttaaccaattggtatcatccggcaaagttgctggagattctctggaacgcgtgacaatcgctattgttaagatcagtgatgcgacgggtattgctacagaaaagttggcgagcgactttaacgatctagctgctgatccagtagcggctataaccaaacttaacgaccaataccactttctgacactggcaacctacaaccagattaaagcgctacaggatgaaggtaatcagcaggatgctgctcgggtggctactgatgcttacgccaatgccatgcagcagcgtgcgaatgatattcatcaaaaccttggtcttcttgaaagtgcatgggactcgctgggtaaaacggccaaaggcgcctgggatgcgatgctcaatattgggcgtgaacaaacactaacggataaacttgccaccttaaacgaaaatattgctgaagcccaaaaagggcaaaaagatggtgggttctggaacagttttagcgcgaggtttaccaacctcccggagatgataaaacagagagatttgctcgaatcagttgccaatcttcagggggatgtaaccaaaggacaggcgaaggctaaggaagccgaacagcaaagaattaaaacgcagcaagaagcagatcgcgttaaccagcaatatttgagcaatgcggataagcgcaataaagctattaagcagcaaagcgagttcctgaaggctggtgcaattactgcagagcaatacgcaaaaaacgtctcacgtattaacgagatgtataaggacccaaaggcacctaagcaaaaggtctatacagaggacgcggcaacccggctgcttgatcaaataaaccagcagacaactgccttgcagtcccagctggatgccagtgacaagcttaacagcgcaacccaggcgcgggtaaagttcgaacagcaaattgctgacctcaagtctaaaacgcagctcacagccgaccagaagtcgattctttcccgttcagatgaaatcctccaggcgtataagcagcaggaggcactgcaaaattccgtaaaaaccctggacgattaccggaagatgcaggaacaggtaaagacgaaggatgagcggaccaacgatctgcttaaaacccgtcttgaactgctggagaaggccaaagcaacggggcaacttaaacccggtgaatatgaaaaaacgcgggcagatatttatcaaaacaccgatatgcaactgccctcgacggttcgtaatgttgtaggaaacctgacacccacaggagggcgactctctggaacttttgaggggatgcaggggcaaatcaacgaatatgaccaggctcagcaagagctccagcgctggctggcagctcaggaggaagcttatgcgaaggccggcgaaataactgccgagggtgaggccagaatgacctcgattcgtcagcgtgcagcggatgcaaatcaggtcatagaggctcagaaaaacaccatcatatctgcggccacgcaatccttgtttgacagtaccgccgacatcatgcgaactgggtttggtgagcaatcggcaatctacaaggttgcttttgctgcgagcaaggcattcgctatcgctgactctatggtgaaaatccagcaggctatagcaagtggggcagtaagcgcgccttatccggccaacatcatcgctatggcctcaatcgctgcgcagactgccagtatcgtctcaaatatccaggctgtttcaggagttggcttcgcctccggcggttacaccggccccgttggtaagtatcagcccgcgggtattgttcacaaaggagagtacgtcttcgaccaggcgtcaacgaaccggatcggcgtgtctcagcttgaggcacttcgaaatggccaaccgcttgatgcaactctggggcgtacagggtttggtactggtgtccagaacgttaacagcgataacagcagcaagaccaccatccatgctcccattgagcagcatttccatacgccgcccggtgtgacacctgatcagatggctctctccatggctcaaacgcagaagcgggcgacaacggaagccctggatcaggttgctgcgcaattgttgagaggggacgggaaagttggtaaggcaatgcgcagtaaatattcaggcagagggttagagtgatgactgatatctactacccgcatgatagtcttccgatgccattacaggaaggatacggattccagcctgtaagcccgttaaaacgaacacagttgaccaccggccgcgcgcggcaaaggcgagcttatacgtccacgccgacgcaggccagcatcacctggtttatggaaaccgatgcgcagggactggcatttgagtcctggttccgtgatgcgttatctgacggggctgcatggttcatgatgaagctgcagacgccggcaggcattaagttttacaaatgccgcttcacagatatttatcagggaccggtgctggtggccccgatttactggaagttcacggcgacgcttgaattatgggaacgcccccttgctcctgccccatggggtaattacccggaatggatcgtcggcagctcgctgctggatattgcgctgaataaggagtggcccaaggcttgattaaaaccgtttctccttcataatcacttgtgtcgatttgtgggaaagtccttcatgccgctccgtagccggagcgtgaaataaagcgcggaatagcgatcctgccggtgagggtacacccacattcgacaccaatttttaaggtcaccttcgggtggccttttttattgggtaaaaatcatgacaagactcaaccgcctctacgccagcagcggaccggaggtgatcattgaaacgctgcagatcaccattggctctgatgttcactacctttgccagggttacgacaacatcacggcgacgacggagaacggcgataccgtaacgttttcagcctgtgcgatagacattgcgctgccggcgcgcaatgcggacggcacgcaggacctcaaatttgccttgtgcaatatcgatggtgttgtgtccacggcgatccgcaatgcgctggctaaccgtcagtctgcatttctgacgtaccggtgttatatctccacggatttagcggcccctgcggaagtgccgtatacgctgaaaatcaagtctggttactggactgcgaccgaagggcagattaccgcgggttatatgaatatcctcgataccgcctggccacgttaccgctacacgctacctgtattccccggactgcgttatatcagctaaggaattccaatgttcaaccctgataaataccgttctgttaaatggcagaagggcggtcgctcttttccaaaacttgactgcttcggcattgtgaacgagatacgccgcgacctgaatttacccgtctggcccgattttgccggggtcaccaaagacgacggcggcctcgaccgggaagcgcgccggatgatgcttacccttgagcgctgcgaaccctgcgaaggggctggggtggcctgctattccgggtcgaccgtcacccacgtagggatcgtggtcagtatcggtggcctgctgcatgtggcggaatgcaacccaggcacgaacgtcacctttctgcccttgccgcggtttaagcgtcgatttgtcaaagtggagttctggcgatgaccattcgtttttacccgtcccggcttcccggtgaaccactcgaaacgcatgagcatggtgtaaccagtattcgcagctggctggtggcaaatgttgaaggctacgaggatcgggatgtcccaccgctgaccgttgaggttgaggggctgttaattccgccaggcgagtgggctaagtgtgtgattcgccctgatagtgatgtcaggctttatccggtgcctttcgggcttgaggccgcgacaattgcctggataggagtgggcattgccgtcgcatctgcggcttattcattgttcatgatgagtaacagtgatgccggcggctatacatcatccacaggtcgaagcctcgacctgaaccccgctaaagcaaacagcgcgaaactgggtgatgcgattcgtgaagtttttgggcgcgtgcgtatttatccggattatgtcgtgcagcccgttacccggtttgatgccgccgatcctacgaaaatgcgcgtccagatgctgctgtgtctcggtgtcggtgatctgatttataccaatggcgatatcagggttggcagtacgccagcttcaacgctaccgggattcagcagcacccattacccgccaggcgcggacgtttccggtgatgagcgcagcgaaaactgggtcaactccaccgaagtgggcgggacgtcatccggcaccgggctggatatggcccagacgtcgccggacgcagacgacattatcgcagacagcatgaccgtatccggttcgagcgtaacgtttaccgggctggacacggatgatgatgacgataatgacgagaacgataacgcgctaccgcccagctgggtcgccggcgccgtggtcgaactgaaagccccggctaactaccagatcacttcggcggctggatacagtgttatcgccagcccgctgctgacggagatcgcgccggtagtaggtatgccggtcacgctggggtttaactctgtcgattacgatctgtttatcgcgtcatatacccccgctcaggctgcagtgcccggcgccggggggagtgcggcaaaactccaggccagtgcggccccgaccacctacgatttttcgaccagctccagcacgttcacgatcacctggcagggggttacctacccggtgtcgctggtggctaactacgtctctatgtcgggactgctggcggccatcaccgagggactcactggctccggcctggttgcgcaggacaacggcggaactgtactgataaccgagtcggccagtccgttcgcgggtggggcgatcacgtcctcttcactgcctgcagctgttttcggtgatgccccggtttacacctccggcacggcatcaaccggcggcagcccggcggtaacggcgaatgtgacactcgcctataactctgccacgggcaccgcattctccgggatgccggagggggtgcaacggctttcacttgctcactgcgggaatgagtaccggattgtgtcagctgacggcacgacggcgtcggtggcgcgcctggtttccggtgccgttgatgagtcatggccgggattcaccgcccggacgatgatcgactatgaggcttctggtcttaacgacacgctgagctggctggggccattcctcgtatgccctgagaatgaagtggtggatgcattcgaggtgaatttctccttcccgaacggcatctgtggctttgacagtaagggcaaaaaacggatccgccacgttgagtgggagattcagtatcgcgtctacggttccggttcggggtgggtgagtcaccagggcgagtatgcgcttaaaaacgtcaacgggctgggattcactgagcggatcaccctcagctcaccagggctggtagaggttcgctgccgtcggcgcaatgagcagggctcaaacaacgcgcgagacagtatgtactggcaggcattgcgcgggcgactgctgacacgaccttcatcctatcccggcgtgtcgctgatggcggtgaccgttgagacgggtgggaagctggcggcacagtcggaccgccgcgtaaacgttgtggccacgcgcgcctatgaaaccggaacggccagaactatctcgggggcgctgctgcatgtcgggaactcgctggggctggagatggatgccgacaccatcaacgcgctggagtccgcgtactggacgccacggggcgagtatttcgatttcgccacgggcgacagtatctcagcgctggaaatgctgcagaagatagccaacgccgggaagtcacgttttctgctgagtgatggcctggctaccgtaagcagggaagggattaagccctggaccggagtgatcactccgcatgagatggtggaggagctgcagagcggatttaccgtaccgtccgacgatgattttgacggtgtcgacgtgacgtacatcaacggcgtcacctgggcagaggagaccgttaaatgccggacgccggacaatcccacgccggtgaaaatcgagaactacaaacttgatggggtactgactcaggatcatgcctaccagatcggcatgcgtcgtctgatgaaataccttcagcagcgggtgacgttccagaccactaccgagctggacgcgctgtgctacaacacgggcgatcgcatcgtgctcacggatgatattccgggtaacaacacgatttcctgtctggtggaagcgatgacaacggctggtggcgtgacaacgttcaccgttacggagccgctggactggtctttcgaaaatccccgagcgctgatccgctatcaggatggatttgcatccgggctgatggtggcgagcagggtgggtgattttcagctgtcagtcccgcacctgagcgagtttgatgacccgatgaaggttgacctgtcgtcggcaaccatcgagccgatccgcctggtgttctgcggctcaacgcgccacgtctacgacgcccttgtagaggagatcgccccgcagtctgacggaacatgccaggtcaccgctaaagagtacctcgaatcgttctatgcctacgacgacgctacataccccggcgacgctgcttaataccaaaaaaatccctttcaacttttctttcgctcaaaccctcgtttgggcgaacaccgttttggagcaaaaatcatggccgaacttaacccgcctttgggaacgacgacgcctgcaatattcctggataacgtcaagcgcgctgacgagctggttaacggtccggccggaacggttaacgaccgcgcaggcgaaccgctcgatacctggcgccagatgatggctaagaaggacgaagttcgg

SEQ ID NO: 154 - DNA, 57963 bp, Unknown
  source: /note="Description of Unknown: MKP2_2161_1 Mutant Bacteria sequence"
gatccactaccgccggcacgccggtaaagtcctgcatcaggacgcgtgccggacggtaggcgatttcccggtcggcatgggcctgttgcagccagccggccagggcgcgaatatcttcttcagttaccgagtcaccgtcctgccagcgcagcaggttctccatcagcaccttcagcgacttgggcagtcgactgatctcgcccagctgcttctccgccaacggcagactgtagtaatgccaggttttatcgttgacctgcagcgtgtccttactggcttctcgtagggttgacgacatagctcctcctttatctcagggatggcataccctgattctcctcagggtctccattaaagataacacatactgagcataacactttgataacaacccaaattgctaaatacggcgagacagagagagaggaaacgggaattatccgagagcaggcgaaatagcaccaaaatagtgcaaagagggcgtatgccgatattgtattagtacacgaggacaaaaaaagagctaatcggccagcgggcagtgattagctctgatgagtgatttcaggttggatgaatccagcggcaaaatatattctccctgtattgccggtcactgattttatattacagtttcttttcactgtcataaaaatgacatgtatctacaacgatgacctacagctttagctgacaatccagatgttgcagatggtgagcgcgatgatgctccagaacatcgccaaccctaccaacactacgccccatacgcgactacgcagaacgggatcgatttcggttttgtcattctcgtatgacatcgccagtttcatgtaatcgatattacttatcatattgtcaccaccaattgctcaaatcatcaggtacagataaatcttaattatggataaaagattaatccagtgaatttaggcctgatggaatatatttaaccggttatttgatcgcggcgggcataatgaaaaacgtgttgccaaaaattattaattttgtgattggttcgaggtttaagttgttaaatacagtccatcatagttaatggcactcctcgcagggagtgccattattattttcagggttatttttccggaagttttatatctttgaacatcgcttcaatatcttcattcgagcgtaaagccaccgcggtatctaccacgtccctggtcaaatggggagcaaaacgttgaataaaatcatacatgtagcttcgtaagaaggtgctacggcggaaacctatcttagtggtgctgtggctgaaaataccgttcgcatccagcttcaccagatccgggtcagagaccggatccaccgccatgctggcgattacccctacccccagccccaggcgaacataggttttgatgacgtcggcatcggtggcggtaaaaacaatgcgcggcgtcaggcccgcacggttaaacgcggtatccagttcggagcggccggtaaaaccaaaggtataggttaccaatggatactgggccagttcctctatggacaccgagcccttggtggccagaggatgctcgggggtcactacaatcgaccggttccagtgatagcatggcagcatcaccagatcgtcatacagatgcagcgcctcggtggcgatggcgaaatcggcattgcctttcgacacagcctccgcaatctgagtcggcgagccctgatgcatatgcagcgacacccgcgggtagcgttcaataaaccccttgatcactcccggtaacgcatagcgcgcctgggtatgggtggtggcgacgtaaagagaccctttgtcaggccaggtatgctctccggcgacagatttgatggcatcgactttcgacagcacttcgcgggcgatgcggatgatctcctgcccggccggcgtcacctgggttaagtgtttaccgctgcgggcaaagatctgaatgcccagctcatcctccagcatgcggacctgcttactgatacccggctgggaggtatagagcccttcggcggtggatgaaacattcaggttatggttaaccacctcaacgatgtagcgaagctgttgtagtttcatggctgatatccgtttgcgcgtaaaatgaagccgcttaatacactttacgttcaggcaacttgtcgccgatgaaggccctgggctcccggcagttggccatagtggcgccgcaatgcatcctgaaagcgatgatgtataagacgttttaataataaaaaaggcattaactataaccactatatcatttatatcaacactgtatagacgctaacgaaaaataatataggtggttataaggggaggaaattaacgcaaagaggggaagacgacacggcagagaaatgcactctctctgccggtcgcctgagcaggaaaagcgcgcttttcctgcccgaacgaacgccattactttttggcttccgtccacttaccgtcgataaagaaagctgaccagccggtcgctttgccctctttttcggacgccacgtactgctgcttggttttacggctaaagcgtaccagcgttttattgccttccggatcctgctgcggcgcatcggcgagataacgcagtttttccggcagacgatcgcggaagcggtacagttcctccaccagcggcgcacgcgtttcccgtgatttcgggaaggtgttggccgccaggaagacgcccgccgccccgtcgcgcagcacaaagtaggcgtcagacttctcacacggcagctccggcagcggcaccggatcttccttcggcggagccacttcgccattgcgcaggatcttacgcgtgttcttacactcgtcgttggtacaggccatgtatttaccgaaacgccccattttcaggtgcatttcagacccgcacttctcgcactccaccaccgggccgtcatagcccttgatgcggaattcgccctcttcaatctcgtagccgtcgcaggtcgggttattaccacagacatgcagcttacgcttaggatcgataaggtagctgtccatcgccgtcccacacttctggcagcgacgtttggcgcgcagcgcgttggtttccgcgtcatcgccttccagcacgttgaggacttcgttctccggcaccaggttgatggtggttttgcaccgctctttcggcggcaaggcatagcccgaacagccgaggaaaacgccggtgctggcggtacggatccccattttacggccgcaggtcgggcagtcgatgctggtgagcaccatcgggttcggctgcatgccgccctcttccggatctttctctgccgtcgccagctgggtggtaaaatcgccgaagaagtggttcagcacctctttccactcggcctggtggttcgcaacctggtcgaggcgatcctccatctgcgcggtaaaatcgtagttcatcagatcgcggaagttttcttccagccggtcggtaacgatctcgcccattttttcggcgtaaaaacgacgattttccacccgcacgtagccgcgatcctgaatggtcgaaatgatcgacgcgtaggtcgacggacggccaatcccgcgtttttccagctctttcaccagcgaggcctcgctgaaacgcgccggcggcttggtaaagtgctgcgcaggcgtcagctccaccaggctcaggcggtcgccctgtttgaccagcggcagcgtccggtcttcatcgcccttgcgcagcgccggcatgacttttgtccagccgtcgaaacgtaaagtgcgaccgcgcgctttcagtttgaaatcacccgcagccacggtcagcgtggtggagtcgtactgcgccggcgtcatctgacaggcgacaaactggcgccagatcagctgataaagcttctgcgcatccgcttccatatctttcagcgtttccgccagcacattcacatcagacggacgaatcgcttcgtgcgcttcctgcgagttttctttgctggcgtactggttcgcgctatccggcagatattttttgccaaatttgtcgctgatgtagccgcgaaccatgttcagcgcgtcctgactcaggttggtggagtcggtacgcatataggtgatgtgccctgcctcatagagtcgctgagccatcatcatggtctttttcacgccgaagcccagacgggtgctggccgcctgctgcagggtggaggtgatgaacggcgcgcccggcttgctgctggtcggcttatcttcacgctccagtacgctgtagctggctttttccagcagcgataccgccgccatggtctcatcgcggctgaccggacggaacggcttatcgtccttatgggtcacctgcagcggcagggcgtcacctcctggcgtggtggtgctggcatcgacttcccagtactcttccgggacgaacgctttaatttcacgttcacgctccaccaccaggcggaccgcgacggactgcacgcgcccggcagacagaccacgggcgatttttttccacagcagcggcgaaaccatatagcccaccacgcggtccataaaacgacgcgcctgctgggcgttaacccgatcgatattcagttcgcccggcttttcaaaggcctgacgaatagcgtttttggtgatctcattgaacaccacgcggctgtaacgctgttcatcgccgccgatgacttcccgcaggtgccaggcaatggcttccccttcgcggtcaaggtcggttgcgagatagatgtggtcagctttttccgccaactgtttgagttctgaaactaccttttctttacccggaagtacttcatagtgcgcattccagtcatgccatgggtccacgcccatacggttaaccagagcactacgttcgtcctttttaggctttttagcccctttggtggcggtagagtcggcgctctttttggaagctgatccactggtcggcaaatcgcggatatgaccgacgctggatttcaccacgtagtcattacccagatacttattgatcgttttggcttttgccggggactcaacgataacgagagctttacccatattcacctttacctaatttgattcatccaggaatacatcgcacattcatacaccctccactggcgactgcctcatatgttgcggcaccgtcggtgaatatcaaccctgaacacccgtttcatctccgtaaaaccaggcgcttgtgtttgctgactttttctcgtcaggtgacatagcacgaagaatttttggccgaatgtcaagcaaatctgttgccagatcgccgaaagcgtcacactgtacctgataaaattcgttacgcaactttattagcatgcaaaagcaaatcccgccagtaaacggctgtttctccactggttaccattacccctgatttatgcatggaaaatttgccccacgccgccgcgcggcgtaaactacgcgcggagaaaaagaggagtccgttatgcaaggtacaacccaaccaatcgatcgccagacgctgctcgaaaaagccaacaaacttattcgcgaacatgaggagacgttagccggtatcgaagccaccgacgtcgttcagcgcaacaatgtcctggtgtttagcggtgagttttaccttgatgagcagggactaccgacgccgaagagtacagcggtatttaacatgtttaagtatcttgctcacgagctgtcggacaagtaccacctggtcgattaagaccagtgaaaacaataacgcgaggcccaggcctcgcgttatgttatttacatcagcggtttctgaccgcgctgccaccagcgcagcagaagccgatcggcgctctccgccgcgctaccggtaaagcggtcgagcatcttcttacgctgttgataacgcaccccgatcacctcgtggctctccatcagccccagcagcagctcatcgctggtttcaaccgcatccaccagacctttttccagcgcctgcaccccgtaccagtgttcgccggtagctacctgctcaatatcaagtcccggacgcatccggtggacgaaatccttgaacaaatgatgtgtctcattaagatcctcgcggaacttgcgccgcccttcctcggtattttcgcccagcatggtgagcgttcgtttgtactgcccggcggtgtgcagttcgatatcgatatctttattcttcaggaagcggtgcaggttcgggatctgcgccaccacgccaatagagccaaggatcgcaaacggcgccgagacaattttgttcgccacgcaggccatcatatagccgccgctggccgccactttgtcgaccgccaccgtcagcgggatctgcttgtcgcgcaagcgctgcagctgagaggcggccagaccgtagccgtgcaccaccccgccggggctttccaggcgaatcaccacctgatcgcgcgctttcgccgccgccagtaccgcggtgatctcttcccgcaggctattgacctcatgggcatccatactgcctttgaaatccagcacccaggcgcgcggcttgccttccggctcggcattacccagcttcgcccgcgctttggccgccttcgcctcttgtttttgctttttcttctgcgccttatgccactgcttctgctgcgggccgtccagcagcgccaccgccagcgattccttcatctctttataatgctcgctaagattggtcacccgcagctcgccgcgctgcttcttgcgctgagcgaggttgacgataatagcggcaatcaccgcgatggcgacgacaaccgtcgcgatcttggctaaaaataagccgtactgagcaagtaattccacgttttcaccttgtgtaaagcactgacgttgctgcacagtgtacctcagccgctggcgagaagtctttgtgctttgtgttctctgcgcagcggattccgttttttttcgcgcggctgaaatcgttgcaagatattaattttgtgaatactttccgcttcgccgattgcaatggcgggcgctttcaggcataacagcgcaaaagtgagataccaaagatgaagcgcgatcgggaaccgatcgcccaaggagttgccgtgcattatcaaccacaacgtcacttgctgaaagatcgcatcatcctggtcaccggggccagcgacgggattggtcgtgaagcggccctgacctacgcgcgctatagcgccagcgttatcctgctgggtcgcaacgacgacaaactgcgcaccgtcgcccaggagattgagcgtgagggtggtattccccctcgctggtttaccctcgacctgctcacctgtacgccccaggcgtgccagcagctggcgcagcagatcagcatgcactatccccgccttgacggcgtgctgcataacgctggcctgctcggcgacatctgcccaatggaagagcagaagccggaggtctggcagcaggtgatgcaggtgaacgttaatggcacctttatgctgacccaggcgcttcttcctttattactccgttcggaatcgggctcgctggtcttcacctcatccagcgtcggtcgtcagggccgcgccaactggggcgcctatgccgtttccaaattcgccaccgaagggatgatgcaggtgctggccgacgagtatcaaagccgccacctgcgggtaaactgtatcaaccccggcggcactcgcaccggaatgcgcgccagcgcgttcccgacggaagatccgctgaaactgaaaacccccgctgacattatgcccgtctatctgtggctgatgggtgacgacagtcgtcgcaagacgggaatgaccttcgacgcccaaccgggacgtaaaccaggaattgcccaatgagtgatgaacgctaccgcgaacgccagcagcggctgaaagataaagttgacgcccgggtggcggcggcccaggacgagcgcggcattgtgatggtctttaccggcaacggcaaaggcaaaaccaccgccgcctttggcaccgcgacccgcgccgtcggccatggcaaaaaagtcggcgtgatccagtttatcaaggggacctggcctaacggcgagcgtaatctgctggagcctcacggcgtcgaatttcaggtgatggccaccggcttcacctggaacacccaggatcgcgacagcgacaccgccgcctgcctggcggtctgggagcatgcccgccgtatgctcgctgacgaccagctcgatctggtgctgctggacgagctgacctacatggtggcgtatgattacctgccgctggagtcggtgctgagcgccctgcgtgagcgccctgcccatcagtcggtgatcatcaccggccgcggctgtcatcgcgatattattgaactggccgataccgtcagcgaactgcgtccggtcaagcatgcatttgatgccgggattaaagcgcagagggggatagactactgagggcctgatagcgcggaaggaagtaagcgttccggcggcaagtcaccggaacgcataacattaaccgttagtcttattgcgagtactggaacgacggttgctgttgttaccctggcgcggattagcgctggtctggctgtgacgcttcaccgcccgacggatctgattggctttcaaccgccgacggtctttctcgacggccaccttagagctggtttccggcgtgagctccaccagctcgcgcaggtagttggtctgcgccaggtccagctcggtatagccgccgcgcggcaggcctttcggcagcagaatatcgccgtagcgcacgcggatcagacggctgacctgcacgccgaccgcttcccacaggcgacgcacttcgcggttacgcccttcggtcagggtaacgttataccactggttaatcccttcgccgccggtgaatttgatggttttaaacgctgccggaccatcttctaactgtacgccgcgcgacagctggcgcagcttatcatcatccacctggccgaaaacgcgaacggcgtactcacgctcgacttcacggctcgggtgcatcaggcggttggccagttcgccatcggtggtgaacagcagcaggccgcaggtattcacgtccagacgaccaacggcaatccagcgcgcgccgcgcagtttaggcagacgatcaaataccgtcgggcgtccttccggatcgttacgggtgcacagctcgccttccggcttatagtaagccagcacgcggcagatctgctcggcagactctttcaccgagatcagatgaccatcgatacgaatttttaaaccagggacaatttccacacgatcgccgagggtggcgattttgccgtcgacgctgacgcggccagcttcgattttcgcttcaatttcacggcgggagccgtggccggcacgggccagcactttttgcagtttctcgctcattgagcttccttaaggtgtcgccttcccaggcgtctggtatgctttatgaaacaatgaggccataagcacaactcattgttacgtatatacttttaacgtaaagtctcgtcggcgcgttcaggatatccaccgcgagcccgtattcgtggccgaacatactacactaacttcgtcgggaaagcttctgttcgccgcgccccgtctttagtatggaacagattttcctcattctcctgtgcccattcacgcatacggatctttatcggacagcgcccccctcattacgcgcgctcctcagcaacggccgggcgctggccaagcagccagtcgcgaaaacagcggttggcaggcgccagcagcgcggtctcgtggtaaaccagatgataggccagcggacaggcgatgggctgcgccagaggattaaccagccgcccctgcgtcagcgcaggcgctatgaatgagcgtcgcagcaacgccatccccataccggcgaacgccgcctccgtcacgccgttggaatcagtgaacaccggcccacgccgcgcgaagtgcggcgccagccccacggcctcacaccacagcgcccagtcttcacgatgttcatcgtgcagcagcggatactgcagtagatcgctcgcatcggtgagcgtccggcgcggagcgatcagttgcgggctacagaccggcatcagatcgtcatccagcaggcggtaagcctgcagttccggccagccgccgacaccatgacgcacggcaaaatcgatcccttcactcagcaaatctactcgccggttggtggtgccgatctggatctctatctgcggatagcgtcgttcaaaatcagccagccgcggcagcagccactgaatggcgaagccgctggtacagctgatagctaccttttctggtcccgggggcacctgcagacgctgggtggcggcggctatctgatgaaacgccggctgaacggcccgcaggtagatctctcccaccgccgttaactgtaaccgtcgcggagtacggataaatagcgggacattcagcgtctcctcaaggcgggcaatctgctggctgacggcgctgggcgtgacgcaaagctcactggcggccagtttcaggctaagcagtcgcgccgccgcctcaaagcagcgcaacgcattcagcggcgggagtttcatgggtatggaacctcagttaagaaaaacttaatcatgtaagcataacgcgtttgtcgcacgctgcacgtgggttctacagttgacttccttcgtgactacaaggagtcaatcatgcgtgttatcgactatggccgcctgctgctgctcgccgccctctggggcgccagctttttgtttatgcgcatcaccaccccggccttcggggcgttgaacagcgcttttcttcgcgtactgttcgccgctatcgcgctcggtctgttactcggcgtgcagcgtaaatggagcgggtatcagggaaaattcacatccactctgcagctgggggtcattaattcaggccttccttttctcatgtactgccttgccgcgcaatggctgccggcagggtactccgccacgcttaacgccacggcgccgatgatgggggtgctgatcggcgcgttatgctttgcagaaccgttaaccctgcgcaaaggcggcggcgcgatactgggcaccattggcgtggcggtgatcgcgcgcccgacatctggccttagcgccgccctgctgctgccggggattggcgcctgcctgaccgcgaccgcctgttacggtctggccggctttctgacccgccgctggatccagcagcgaggcggcctcgaggctgaacgcgtcgcgctgggtagccaggtcggcgccacgctgtttctgtttcctttctttctctggtcctgctggcatgggcctgccgtagactggcggcagagtctgccgtggatagcgatagtcatgctgggcgtggtctgcacggcggcagggtatattctctacttccgcttgattgcagatatagggccgctgcgttcgctgtcggtgacctttttgatcccaccttttgcggcgctgtggggctatctctgcctcggagagacggtggaggaaggattgattctcggcgcgctgctggtttgtgtagcgctatggatgattatcgtgccgtcggggcgaaaacgcggggtaccggacggcgcatgatgcaccgcccggcagatagccttagagaaacggcctcacgtcgccgacgccttcgcgcagcaccaccggggtgtcttcagtgagatcgataaccgtggtcggctgctgcccaaggaaaccgccgtgaatgatgaggtccaccactttctccagacgatctttgatctcttccgggtcggattcggtaaagtcgctgccgggcagcatcagcgacgtagagagcatcggctcgcctaaggtctcgagcaacgcctgagcgatgggggtagacgggacgcgcatgccgatggttttacgcttctcctgcagcagccgacgcggcacctctttggtccccttaaggataaaggtatagttgcccggcgtgttgtttttcatcaggcgaaacgccacattatccacaaaagcgtaggttgacagctcggacagatcgcggcacatcagggtaaagttgtggccgtccggcagctgacgaatgcggcagatccgctccatcgcccccttgtcttcaattttgcagcccagcgcgtagccggagtcggtaggataaacgatcaccccgcccttacgcacaatctccaccgcctggttaatcaaccgcgcctgcgggttatccggatggatataaaaaaactggctcatacttccctctcaatttttattcggcggccgcttcccaactgtgccagacgccttccacgccggcaggaagccagagcttacggccaagttcgatccacgcgcagggctgatgaaaatcggatccctgcgacgccagaagaccaaactgcacggccagggtggccagctgggcgcgttcatggggcgcctgctgacactgggccacttccatggcatcaccgccctgctcgctaaagtgggccaacagccgcttcaaccacttggcggaaagatcgtagcgcccgggatgggcaatcaccgccttgccgccagaatgatgaatcacatcaatcgcttgttttattgtacaccactgcggcggcacgtaaccggttttcccgcgggcaaggtattttttgaagacttccgccatgtttttcgcatggccggcctccaccagaaaacgggcaaaatggccgcgggtgacggcgccaccgtccgccagtcgcagcgccccttcccaggcgccggggatccgcgccttctccaggcgctcggcaatcatctgaccgcgctgctggcgccgcgctttctgctcctccagcagggcggtcatcgttgggtgcgcaatatcaatattcagacccacaatatgaatctcgtgattctcccagagggtggaaatctcgacgccgttcaccagggtcaagggtaatccggcgcgggcgatctcctcccgggccgccgggatcgccgccacgctgtcatggtcggtgatcgccagggtgccgacgcgcatctcatgggcgcgatggaccagttcctgcggagtcagccgcccgtcagaggcggtggtatggctgtgcagatcgtaaatcactgcgtattggctgtcgctcaaaaggactcctgctggacatcaacgtaaataagcgcattatcataccgacaggcagagaaaatctgcaaacaagggttgactttattccattgaactagttaactagtacgaaagttcacatgaaggggtatcacgatgaaaatgcactttatcactctgcacagctggtggcgcacctcctgacgacgggcggcgtgatcgcgttttgcattcagcatacagatacccggcccgccaatgagcgggctttttattggacaaaaataatacgaacaggcgagaacaataatgcaaacatccaaaccggcactcgagcttctcaccagcgacgccatctaccgggagaacccgacggcgttattccaccaactgtgcggcgcccgtccggcgacgctgctgctggaatccgctgacatcgacagcaaagatgacttaaaaagcctgctgctggtcgatagcgcgctgcgcattacggcccttggtgacactgtcactattcaggccctctccgccaacggcgcggcgctgctggaactactggacggcgcgctgccctccgggatcaacaatcagcgccagcccaacggccgcatcctgaccttcccggccgtcagcgccctgctcgatgaagacgcccgtctctgctcactgtcggtgtttgacgccttccgtctcctgcaggagctggtgagcgttccggacaacgagcgcgaagcgatgttcttcggcggcctgttcgcctatgacctggtggccggttttgaagatcttccccagttgcaaagcgacaccgcctgcccggactactgcttctatctggcggaaaccctgctggtcatcgaccatcagaccaagcatacccgcattcaggccagcctgttcaccccgctggagagtgaaaaacagcgcctggagcagcgcctgagccagctgcgtcagcagctgaacgagccgccggcgccgctaccggttaccaccgtggccgaaatgcgctgcgacgttgaccagagcgatgaagagtacggcgcggtggtgcgcaaaatgcagcgcgcgatccgcgccggggaaatcttccaggtggttccttcccgccgcttctcgctgccctgcccatcgccgctggccgcttatgatgtgctgaagaagagcaaccccagcccgtacatgttctttatgcaggacaatgatttcaccctgttcggcgcctcgccggaaagctcgctgaagtatgatgccgtcagccgtcagattgagatctaccccatcgccggcacccggccacgcggccgccgcgccgacggctcgctggatcgcgacctcgacagccgcatcgagctggaaatgcgcaccgatcataaagagctttccgaacacctgatgctggtggacctggcgcgtaatgacctggcgcgcatctgcaccccgggcagccgctatgtcgctgatttaaccaaggttgaccgctactccttcgtgatgcatctggtctcccgtgtagtaggcgaattgcgtcaggatctcgacgtcctccacgcctatcgcgcctgcatgaatatgggcaccctcagcggcgcgccgaaggtccgcgccatgcagctgattgccgccgccgaaggtaaacgccgcggcagctacggcggcgcggtgggctatttcaccgcccacggcgacctcgacacctgcatcgtcatccgttccgcctacgtgcaggaaggtatcgctaccgtccaggccggagccggcattgtgctcgactcggttccccagtcggaagcggatgagacccgaaataaagcccgcgcggtgctgcgcgccattgcccaggcccatcacgcgaaggagattttctgatggctgacattctgctgctcgataatatcgattcctttacctataacctggcagaccagctgcgcgccaacggccataacgtagtgatttatcgcaactccgttccggcgcaggcgctgattgagcgtctgggcaccatggacaacccggtgctgatgctctccccgggcccgggtacgccgagcgaagccggctgcatgccggagctgctgacccgtatgcgcggcaagctgccgatcatcggcatctgcctcggccaccaggccattgtcgaagcctacggcggctatgtcggccaggcgggggagatcctccatggcaaagcctccagcattgagcacgacggccaggcgatgtttgccggtctggctaacccgctgccggtggcgcgctaccactcgctggtcggcagcaatattcccgccgggctgacgattaacgccaatttcaacggtatggtgatggcggtgcgtcacgatgcggatcgggtgtgcggcttccagttccacccggaatcgatcctcaccacccagggcgcgcgactgctggagcagaccctggcctgggcgctgcagaagctggagcataccaacaccctccagccgatccttgagaaactgtaccaggcggaaaccctgagccagcaggagagccaccagctgttctccgccgtcgtgcgcggcgaagtgaagcctgagcaactggccgccgcgctggtcagcatgaaagtgcgcggcgagcagccgcaggaaattgccggcgccgctaccgcgctgctggaaaacgccgcgccgttcccgcgcccggactacctgtttgccgacatcgttggcaccggtggcgacggcagcaacagcatcaatatctccaccgccagcgcctttgtcgctgcggcctgcgggttaaaagtggcgaaacacggcaaccgcagcgtctccagtaaatcaggctcttctgacctgctggcggccttcggcattaatctcgatatgaacgccgataaatcccgcgccgcgcttgatgagctgggcgtctgcttcctgttcgcgccgaagtaccacaccggtttccgccacgcgatgccggtccgtcagcagctgaagacccgcaccctgttcaacgtgctggggccgctgatcaacccggcgcatccgccgctggcgctgattggcgtctacagcccggaactggtgctgccgatcgccgagaccctgcgcgtgctgggttatcagcgcgcggcggtggtgcacagcggtgggatggatgaagtttcactgcatgcgcctacggtggtggccgaactgcataacggggaaattaaaagctatcagctgaccgccgacgacttcggcctgacgccttaccatcaggcgcagctggcgggcggcaccccggaagaaaaccgtgacattctgacgcgcttgctacaaggtaaaggtgaagccgctcacgaagccgccgtcgccgccaacgtcgccatgttgatgcgtttacacgggcatgaagatctgaaagctaacgctcagcaggtactgaatgtgctgcacagcggcgcggcctatgacagagtgaccgccttagcggcaagagggtaaataatgcaaaccgttttagcaaaaatcgttgccgacaaagcgatttgggtggaagcccgcaaacaacaacaaccgttagccagttttcaaaatgagatcgttccgacgcagcgcaatttctatgacgcactggccggcacccgcaccgcgtttattctcgagtgcaagaaggcctcaccgtcgaaggggttgattcgcgaggatttcgatccggcagcgatcgccagcatctacaagcactacgcctcggcgatctcggtgctgtgtgatgagaaatatttccagggcagcttcgatttcctgccgatcgtcagccaggtcgcgccgcagccgatcctgtgtaaggacttcaccatcgacccttaccagatctacctggcgcgctactatcaggccgacgcctgcctgctgatgctctcggtgctcgacgatgaacagtatcgtcagctctcggcggtggctcacagcctgaatatgggcgtgctcaccgaagtcagcaatgaagaggaactggagcgcgccatcgacctgaaggcgaaggtggtgggcattaacaaccgcgacctgcgcgatatgtcgattgaccttaaccgcacccgtcagctggcggcgcgtctcggcccggatgtcacggtgatcagcgaatccggcatccatacctatgccgaagtgcgcgagctgagccacttcgccaacggcttcctgatcggctccgccctgatggagcaggcggatctggaaacggcggttaaacgcgtgctgctcggcgagaacaaagtgtgcggcctgacgcgcccgcaggatgcccaggtggcctgggagtccggcgccatttacggtgggctgatcttcgtcccgacctcgccgcgagcggtgaatgacgcccaggccaaagcggtgatcgccgctgcgccgctacagtacgtcggcgtcttccgcaatgcgccgctggaggtggtggtcgcccgcgcgcaggctctggggctggccgccgtgcagctgcacggtgatgaagaccaggcctatatcgacgcgctgcgcgacgccctcgcggacaacgtccgcatctggaaagcgctgagcgtcggcgaaaccttcccggcccgtacgctccgccatgtcgacaagtacctgctcgacaacggccagggcggcagcggccagcgctttgactggagcctgctgcagggccaggatctgcgcaacgtcatgctggcgggcggcctcggcgccgataactgtgtggaagcggccaaaagcggctgtgccggactcgatttcaattcaggcgtagagtcgcaacacgggatgaaagacgccagcaagctggcctccgtattccagacgctgcgcgcatattaaggagcaataatgagcactttactgaacccctacttcggcgaattcggcggcatgtatgtgccgcagatcctgatgcccgccctgcgccagctggaagaagcctttgtcagcgcgcagaaggacccggcctttcaggcggaattcaccgacctgctgaaaaactacgccggtcgtccgacggccctgaccaaatgccggaatctgaccgaaggcacccgcaccaccctgtacctgaaacgcgaagatctgctgcacggcggcgcgcacaaaaccaaccaggtgctgggccaggctctgctggccaaacggatgggcaaaaccgaaattatcgccgagaccggcgccggccagcacggcgtcgcctcagcgctggccagcgccctgctcggcctgaaatgccgtatctacatgggggccaaggacgtcgagcgccagtcgccgaacgtcttccgtatgcgcctgatgggcgccgaggtgatcccggtgcacagcggctccgccacgctgaaagatgcctgtaacgaggcgctgcgcgactggtccggcagctacgaaaaggcgcactatatgctgggcaccgccgccggtccgcacccgttcccgacgattgtgcgtgaattccagcgcatgattggcgaagagaccaaagcgcagatccttgaaaaagagggccgcctgccggacgcggtgatcgcctgcgtcggcggcggatcaaacgccatcggcatgttcgctgattttatcgaggaaaccaacgtcggcctgatcggcgtggagcccgccggacacggtatcgagagcggcgagcacggcgcgccgctgaagcatggccgcgttgggatctacttcggtatgaagtcgccgatgatgcagaccgccgacggccagatcgaagagtcttactccatttccgccgggctggacttcccgtccgttgggccgcagcacgcgtttctgaacagcaccggtcgcgctgattatgtgtcgatcaccgacgacgaagcgctggacgcgtttaaagcgctttcccgccacgaagggattatcccggcgctggagtcctctcacgctctggcccacgcgctgaagatgatgcgcgagaacccggaaaaagagcagctgctggtggttaatctctccggccgcggcgacaaagacattttcaccgtacatgacatcctgaaagcgcgaggggaaatctgatggaacgctatgagacgctgtttgcccaactgaaaaatcgccaggaaggcgccttcgtcccctttgtcacccttggcgatccgggaccggagcagtcgctgaaaattatcgatgcgctgatcgaaggcggcgccgatgcccttgaactggggatccctttctccgacccgctggcggacggcccgaccatccagggcgcggccctgcgcgccttcgccgcgggagtgaccccggcgcagtgctttgagatgctggcggcgatccgccagaagcatccgaccatcccaatcggcctgctgatgtatgccaacctcgtcttcagcccgggcatcgatgcgttctatgcccagtgcgcccgcgtcggcgtcgactcggtgctggtggccgacgtgccggtggaagagtccgccccgttccgccaggcggcgatgcgccataacatcgcgccgattttcatctgcccgcccaatgcggatgacgatttactgcgccagattgcctcttatggccgcggctacacctatctgctgtcgcgcgccggagtgacgggtgcggaaaatcgcgccgcgcttccgctgcaccacctggtggagaagctggcggaatatcacgccgcgccgccgctgcagggctttggtatctccgcgccggagcaggtgagcgccgccattgacgccggagccgccggggctatctccggttccgccatcgtcaaaatcatcgaacgccacctcgatgagccgcagaccatgctcgacgagctgaaagccttcgtccagagcctgaaggcagcgaccaaaaccgcctgaccatcagccgcctggcatcgcgccaggcggcgatgatttctgcaaactgtcggcgtatttgcgcgttaagcgaaacagcgcctgcacttcatcttccggccactgcgccagcacctgattcattaaccgccgccgcgctaccgcaatactgtcgatcatctgttgtccgctggcgctaagcgtcacttcgctgatccgtcggtcatgacggttaggttgcttacaggcgagtccctgggcttccagttttttcacctggcggctgacggtggtgtaatcgcgccctaaatgatccgccagctcaaccacccccaccgggccatggcgtcctaccgccaccagcagcggaaacagcatctgttccagctggacgccggccgcctggaggatctgctcgtcgcgcagcggctggttcatcacgctgatgatatccagtagcgcgccgtgaaagtcggtaatgtcgtagtcattatgtgcatcttgcatatattaattttccgcgtatagtgctgcaaaacaatatgtgtattttacacataattcccgacaggagataatttatgaaagcagccgtggtttttgacctcgcagaaggcccggtttgggccgattttatcgacccgcagcccgcgcccggccagacgctcattgacgtccgcgccgccgcgataagccatgtggttaaggcccgggcatccggacgccattacagcttcgacggcaatctgccctttgtgcccggtatcgatggcgtcggcaccacacctcagggccagcgcgtctacttcgccttccccaccgcccccttcggcagtatggcgcagcgggcgccggtcgccctgcagaattgtctgccgctgccggatgcgctggatgatatccaggcggcggcgatggccaaccccggtatgtccgcgtgggcatcgctggtgacacgcgcccagcttcaggccggcgaaacggtgctgattaatggcgccaccggcagcgccggtcagttggcggtacagattgcccgctatctgggagcgaaaaaaatcattgcaaccggacggaatgcgcagacgctggcggcgctggacgccgatgagtgtattcagttaaccgctgatgataaaaccttgagcgggcaattttcagcggtcagcgccgcgcagatcgatgtggtcatcgattacctgtggggacacagcgcggaattattattgccggcactggcgaaatatacccctgccggcagtccggtgcgctatgtgcaggtgggttccctggctggcgccgatatcgcgttaaatggcgcagtgctgcgttccgccccgctcctgctgatgggcagcgggatcggtagcctgtcggtatcgcaactgctggcggcgaccggtgaaatgctgcaggcggcggtgccggggaaattgaccatcgccaccaccccgcggccgctgcaggagatcgcggcggcctggccgcaggacgacagccaaaagcgcacggttttcaccctcggataaaaaatcgcttccgcacaaaagatggggttgatatcttaaatgagaaatattatctttctcatcactgaatagttgagtaaatcactcgggtattcagtacgacattgctcacattgcttccagtatttttgcccgcacttgtgcgggctttttttactcgcgacacacctcacgcaccaattgccgcagccagcagtggcccgccgcctgctccaggcgcggatgccacgcctatgacaccgtaatcacctcagtgctgaccggcagcggaaaacgcactatcccctgcggcgacggatgccgcagccgggtgagcgtacggctgatcgccgaggtgctgaggccgagacgccgggcggcgcccgccacgctctcctccgcccgcaccccatcaaaggccgccagcaaattaaaatcgggatcgttcattatcgctccagtcgccagacagggcgtttgctgcaagatatgagtgcactggcggcgtcttccgcccgatctcgggcctgattatagtgaagacctcccttctgcagcgagagacatcatgaaatccgatcagcacaacactatcctcatcgtcggcgcctcgcgcggccttggccatgctatggcggcgacgttcctccagcacggctgggaggtcatcggcaccgtgcgcgatttatcatcccacacgccgctccacgacctggccaagacgcatcccctgcggctacgcctggcgacgctcgacatccgcgatgaagcccagcttaccgcgctgcaggcgacgcttcccgccgcgagcctcgacatactgttcgtcaatgctggcaccaccaatcgtgacccgtcgcagaccattggcgacgtctccaccgaggagttttaccaggtgatgctcaccaatgccctggcgccgatgcgggttatcgagcgcctgcagcaggccgttaaaccgcaggggctgctcggcgtcatgtcctctggccaggggagcctgaccaataaccttaccggccagcgggaactctaccgcgggagtaaagctgcgctgaatatgtttatgcgcagctttgccgctcgcccctcctcggcctcccatccgctggtggtgatggccccgggatggatccgcaccgagctcggcggggcagatgccccgctgaccatcgaagagacgatcccacgcctggtgaacgtcctgctcgacaaacggcaacgtccgggactggagtatctcgattaccagggccgtaccgtgccctggtgatccgagccggaacaaccatcatatggccgcccggaagttaaccccgcccggcgcggcttgctaccgaccttattctgcagcactttccctatattcccgcattatcgttcaaaaaatgtgaattatgtaaatcgaagtgaagaaagttgttttaaggtcaacttttctatgtaaatattaaggcaaatgataactattctttttatcatttatagaatcacaccgggtcagcgcaagccagacgacgaataacgtcgcttttgcgcggtgtgatatgtgctcataacaaaaaataagcctgcatttatcatggaaaaaaacgcttctctgcctttcggcagtttcaactcattggcattgtttacaggtctgtgtctgggagcctcgccggcagcaggcatcgcagcggaaaattcggtcaaaaatagtgaagagacgctggtagtggaagccgctccgccttcactctactcccccggcgcttccgccgatcccaagttcaataaaccgctggtcgataccacccgcaccatcaccgtgatcccggaacaggtgattaaagatcagggcgtcaccaacctgactgacgccctcaaaaacgttcccggcgtgggggcgttttatgccggggagaatggcagctcaaccaccggggatgccatctttatgcgcggcgtggatacctctaacagcatctatgtggacggcattcgcgacatcggcagcgtgacgcgcgataccttcaatacccagcaggtggaagtcatcaaagggcccgccggcacggactatggccgcagcgcgccctccggctcgatcaatatgatcagcaagcagccgcgccttgactccgggatcgacggctcggccagcatcggcagcgcctggtcgcgccggggcactctcgacctgaaccaggcgtttagcgacaacgctgcgttccgtctgaacctgatgggggaaaaaacccatgacgctggtcgggaccgcattgaaaacgaacgctatggcatcgcaccgtcgctggccttcggccttgataccccaactcgtctgtatctgaactatctgcacgtccggcagaacaacaccccggatggcgggatccctaccgtcggcctgccgggctattcggcgccttcgccgaagtatgccgcactcaactccgccgggaaggtcgataccagcaatttctatggcaccgactccgattacgataaatctactaccgacagcggtaccctgcgcttcgaacacgatctgacagagagcaccaccgtgcgcaataccacccgctggtcgcgagtgaaacaggagtatcttttgaccgcggtgatgggcggcgcgaacaatatcaccgcccccgatatcaatgacgtcaacacctggagctggtcgcgtctggttaataccaaagatgtcagcaaccgcattctgaccaaccagaccaatatcacctcgactttcaatactggctcgataggccatgacgtcagcgccggcgtggagtttacccgggaaaaccagaccaactatggcgttaacgccaggaccgcgccggcggtgaatctctaccatccggtgagcaacctgtcgattggcgggctggacagaaacggggcgaacgccaacggccagaccgataccttcgggatttatgccttcgatacgctgacgctgaccgagcggattgagatcaacggcgggctgcgtctcgacaattaccataccaaatatgacagcgccaccgcctgcggcggcagcggacgcggggctatcgcctgcccgcccggacagtcgaccggcagcccggtcaccactgtcgataccgctaaatccggcaatctggttaactggaaagccggggcgctgtaccgcttaaccgagcagggcaatgtctacgtcaactacgccatctcacagcagccgccgggaggcagcagcttcgccctggccgccagcggcagcggcaacagcgctaaccggaccgactttaagccgcagaaggcgaaatccagcgagctgggcaccaagtggcaaatcttcgacaaccgtctgctgctcagcgcggcgttattccgcaccgatattgaaaacgaagtggccgccaacgatgacggaacctggtcgcagtacggcaaaaagcgcgtggaggggtatgaactctccgcgaccggaaacctgaccccggactggacgattatcgccggctacactcagcagcatgcgacagtgacggagggacagaacgttgcacaggatggatcttccgccctggcctacaccccgaaacatgcctttacgctgtggacgcagtatcaggccaccagcgatctgtccgtcggcggcggtgtgcgctatgtcggaagcctgcgccggggcagcgatggtgcagtcggtaccccggatcacaccgagggctactgggttgccgacgccaaactgggctatcgggtcaacagcaacctcgatctgcagctcaatatgtataacctgtttgataccgattacgtggcctccatcaacaagagcggctatcgctatcatccgggcgaaccccggacctttatgctgacggcgaacgtccatttctgagtctgcgcgtggggccgttgcgccccaccttttagagagaacaccgcgatgatgtatcacattcctgacgtgctatcgacagaccaggtggcggaatttacccggcagctggcgcaggccgagtgggtcgacgggcgggttacggtgggtagccagggggcggccgtcaaacagaaccagcagatcgatacccgaacgccgctgtatgcccgcctgcaggccgctgtgctcgatatgctgcgcggccatccgcagtttttttccgccgcgctgccgcggacgatttccgcgccgttgtttaaccgctatgggccaggggagacctatggttttcacgtcgatggcgccgttcgccagaacggcgaggcgggctggatgcgcactgatctgtcagcgacgctgttcctttgcgatccggagagctatgagggtggcgaactggtgattgaagacacctatggccaacatcgggtgaagctcccggccgggcatctggtgctctatcccgccagcagcctgcactgcgtcaccccggtcacccgcggcgtccgccaggcctctttcctgtggatccagtcgatggtccgcgacgataagcagcgtgcgatgctttacgacctggaccgcaccatccagtctctgaagacccgctttggcgacggagaagaggtcctctccctgctcaacatgtatcacaacctgctgcgccagtggacggaagtgtgatccgctgttgatgacagaggcttgcggcagacaggtgtgacgagacaatgaactggccatccgttggccagtttacagaagaatttagaaccgatagcctgcggagaacataaacacccacggatccagacgggtgctgactttctggtccacgccgccggctttgaatttcacatcggtgtcgatatccatgtaccacaccgacatattcagcagccagtcgcggttaatcagataatcgaggccgacctgccccgccgcgccccaggagtccttcaggctcagatcggaaagcccggccgccttgccggtgtcgttaaagtcttcattaaagaaggtggtgtagttgataccggcccccacgtacgggcgcaccttgctttgcgcatcgccaaagtaccactgcgccatcagggtgggcggcagctgatggacggtggcgatagtcccggttggcccggtgccgaccttatggcggaacggcgtcgcggcaagcaactccacgccaatgttatcggtcgccatataggtaaaggttaaacccagctgggtattgttactgacgttgaaactgccaaggctgcctaacacattgtcagagccctccgtcggtcggacggtggcggtcccggcacgaatgaaaaactcacccgcttcatgcgcccagacgctgccgatagaaagcgtgccaagaatcaatgccgccgctgctaacttcttcatatccacttcctcattatggtttttcagcgcggccaaatatacctataacgagttacgtttgatctgttttagatcacactaagtcctcagatttaacatttattgatccagattaattttcgctaccgatcgcaatgccttgaattgttcgcacatcaattttcacttttcgcgcaaaaatttatttctgcccctcttgccgacgctgaggcggctggataagttaactgccgacaatctgtgttgatgcgtttttttcaggtgtaattatgagtgaaatcaacccgtgcatgacgtgcggtgcctgttgtgcgtattttcgagtctctttctactgggcggaagccgacgatgcgggcggcctggtgccctccgcgctgaccgaaccgctgacccctttcctgcgctgcatgagcggcaccaatcagcgccagagccgctgcgcggccctgtctggcgatatcggcgacgccgttcactgcactatttatgaaaaccggccttcgccgtgtcgcgaattcgccctgtccggggaaaatggcgaggaaaacgatgcctgcaaccgggcgcgggcgcgctacggcctgccaccattgcggcctctttacaaagatatacctgccctgaccggcgcagagagtgctacgacggaacgatttgcggtacaatcgccggctagttaacacctgcgacactcaaggagaatgcatgtctatcacggcgaagtccgtctaccgtgacaccgggaatttttttcgtaatcagttcattactattttactgattgcgctgttgtgcgcgtttattacggtagtacttggccatgccttttcacccagcgacgagcagctgtcgatactcagcgaaggcgataacctcgccggtagcgccgggctgttcgagcttgtgcagaacatgacgccggagcagcagcaggttctgctgcgcgcctcggcggcatcaaccttctcgggtctggtaggtaatgcgatcctcgtcggcggcgtcctgctgctgatccagctggtctccgccggtcatcgcgttagcgccctgcgcgccatcggcgcctcggcgccggtgctgcccaagctgctgctgctgatcctgttcaccaccttcctggtgcagatggggatgatgctggtgctggtgcccggcgtgctgctggccatcgtgctggcctttgcgccgatcatgctggtacaggacaaaatgggcatcctcggcgccatgcgcagcagcatgcgcctggcgtgggccaatctgcgactggtggcgccggctattatcggttggctggtggcgaaaaccctgctgttactgtttgcttccagctttgccgccctgacgccaaacgtcggcgcggtggtgattaataccatcagcaacctgatttccgccctgttgctgatctatttattccgcgtgtatatgcttatccgcagctaattttaaccaggaccggggccttccccggtccgtcctgaaagacgggatcgatgtatgaagcagtttctggattttttaccgctggtggtcttctttgccttttataagctttacgatatctacgccgccaccacggcgctgattgtggcgaccgccgtcgtgctgatctacagctgggtgcgctaccggaaagtggaaaaaatggcgctgatcaccttcgtgctggtggccgtcttcggcgggttaaccatcttcttccataatgatgagtttattaaatggaaggtgacggtgatctatgccctgttcgccggcgcgctgctgttcagccagtgggtgatgaaaaagccgctgatccagcgcatgctgggtaaagagctgagcctgccgcagcaggtctggtcgcgacttaacctggcctgggcgctgttctttattctctgcgggctggccaatatctatatcgccttctggctgccgcagaatatctgggttaactttaaggtctttggtttaaccgccctcacgctggtctttaccttgctgagcgggatctacatctaccgtcatatgccgcaggacgaccaccactaacccctccgccggcgcgccatcgcgcgccgcgctcgccccctataagcttactgcactggcaaacattccctgcaaccacacaacctcagcgcatacgctgacagcttcccggccacactgtgcaggctctcttcacgatttctctcaactgcataaaaagttgcggtaattgtgaggattttatggagattcatctcgttacattgtaatgataattgttatcattaatattctcgatctcattttgcattgttttgaaaaggatatttacatgagatcgccgcaatattctgtgcccacgaccctggcgctggtcatatccagtctcctcgcccctaacgcctttgctgaagaatcagaacaagataccgaaacgatgattgtgcgcagtacggcggaagaggcgcttaagcaacagcccggggtgtcgattatcacggctgaggatattgctaagcagccgccggtcaacgatctctcagacatcatccgtaaaatgcccggggtgaacttgaccggcaacagcgccagcggcagtcggggcaacaaccgccagattgatatccgcggcaaggggccggagaacaccctgatcctgatagatggggtaccggtcacctcacgtaacgcggttcgctatagctggcgcggcgaacgcgatacccggggcgacagcaactgggtacctgccgaaatggtcgaacggattgaagttctccgcggtccggcagccgcgcgctatggttccggcgcggcgggcggagtggtcaatatcattaccaaacgtccgaccaacacctggcacggttcgctgtctttcttcaccaaccagccggaaaacaacaaagaaggcacgaccaatcgcgctaacttcaatctcagcggcccactggccggcgaggcgctgacgatgcgcctgtatggcaatatcaataaaacggaacccgacgcctgggatattaaccatgcgcaaaacggctcttacgctgcgggacgcgaaggggtccgcaataaagatattaacaccttgctgtcatggaaaatgaccccgcaacagatcctcgatttcagctacgcctatagccgtcaggggaatatctatgctggtgatacccagtacagcaacggcaatcttagcccgaacgggctggtggactccctgtatggccacgaaacaaatcgcctctatcgccagtcctggggactgacctacaacggtctatgggattggggtcagtccaaagccggtgtttactacgagaaaaccaacaatacccgcctgcaggaaggctctaccggccgcgtcgaaggcatgatcaacagtgaagattatgccaccagccgtctggaatcctggcgtactacctcggaattcaatgtgcctttcttctggctggcggaccagacgctgacgctgggaatggaatggaaccatgatcagctcgacgacccggcatcaatgcaggccactaacagcaacggcgagactatccctgggacctcgggcgaccctacgcaacgcagtaccaaaaacagcgccaccctcaccggtatctatctggaagataatatcgaagccgtgcccggcaccaacctgatccccggcattcgcttcgattatcataatcagtttggcagtaactggagccccagcctcaatctgtcccaggagctcggcgatatgttcacgctgaaggccggtatcgcgcgcgtgtttaaagcgccaaacctctatcaatccagtaaaggctatttgctctccacccgcggcaacggttgtccaaacacgatcgctgaaggcagctgctacctgctgggtaaccctgacctcgacccggagatcagtatcaacaaagagatcggtatcgaatttaaccttaatggttacgctgccggagtcacctggtttcgcaacgattacaaaaacaaaatcgtctccggaacagaggtactgggctatacctccagcggcaataatattttgcaatggcagaacggcagcaaagccgtggtcgaggggctggaaggaaatctgctgatcccggtgctgagagatgtcctcagctggcggaccaatgccacctggatgctcaaatctgaaagtaaagagactggcaacccgctgtcggttatcccgaaatataccgttaacacgatgctcgactggcaggtaaacgacgccctgtctgcgaatgtgaactggacgctttatggccgtcagaagccgcgtcagtatgcggagatccgcaacgaaaccgggacccttgccaccaccgaggttggcgcctattccatcgtgggtattggtactcagtatcagctaaaccgggatattcgcctgaatgccggaataagtaatctatttgataaacaactgtatcgcgaaaatgccggcgcctcgacctacaatgagcctggccgcgcgtattacgccggcgttaccctctccttctgaaccaccgcgcccgcgccagcgggcgtattcccctattctcactgcgctattttcatagtagcatcccgctgatcgtctttgaccacagcagagtagagcatgacaacaacagatctcgccccaaagggcgaaatggttttacgcaccctggcaatgccggcggataccaatgccaacggggatatttttggcggctggctgatgtcgcagatggatattggcggcgccattatggccaaagagatcgcccagggtcgcgtggtgaccgtgcgggtggatgggatgacctttttacgtccggtcgccgttggcgacgtggtgtgctgctacgcccgctgcgtgaagcgcggcaacacctcggtgacaattaatatcgaagtgtgggtgaaaaaagtctcttcagaaccgattggccagcgctacaaggcgacggaagcgctgtttatctacgttgccgttgataatcagggaaaaccacgtcctctgccagcggaataagaaggtgcccggcttgccgggcacctgacttacagaaagcccagcagcgaaaagaagaagtaaccgatgacaatcacgatcaccggtagcacgtacagtgggaaatactgcaccaggatagtatggcgcggtaccacaatgcgttcagcaagctgctcgcgggttaacccatctgcgcctttggcctgttcgaggatcagctgatcctcaatcccctcgcggagaaatttcgcctgccgcgccattcgcgcgccggaagcctgcagggccatgccgacgaacaccagaatgaagatgatccagaagccgatgttcaggctatggtgaaaatccggcagcggcgagttgtaccagaaaaagttcaggaacggcgtgttaaagcgcatcatctcaatcatcacgtgcgcaaaatccatcattaccgcatcaatgccgggtttcttttcactgtgctcatacataaatttgagcacagaaatcagcgtcgacagcacggcgggaataaagataacccatcctaaaatgcgtttgataaccgctatgcgtccagcttgttggtacgtcatgagttccccttgttaaagacgcgttggtggttcgcctgctgcctgttgcgtggcgctggcttccctcgctcccccgagtatgtcgggtataagtctatctgccatggcgaatttcgcccaataatgcgcggtatgatataccatgattgccgattcgtttatctgattacgcaacaggagaaggacatatgtcagcgaagcgccgcattgaggccgcgatatttgatatggacgggttgctgattgactcggagccgctctgggatcaggcggaggtcgaggtcatggagagcctgggagtggatacccgtcgccgcgatgaactgcccgacctgctcggtctgcgaatcgacctggtggtggatctgtggtacgcgcagcagccgtggcacggcgtagaccgggcggaagctaccgcgcgcattattcgtcgcgccattgagctggtggaagcctcacgcccgctgctgccgggcgtacgcgaggcagtggccctgtgtaaagctcagggcttaaaggtgggcctggcctcggcctcgccgctgatgatgctggagaaagtgctcgatatgtttgaactgcgcgaccagtttgatgctctcgcctccgcggagcatttaccctggagcaaaccgcacccgcaggtctacctcaattgcgccgctgccctgggagtcgacccgcagcgctgcgtcgcgctggaggattcggtcaacggcatgatcgccagcaaagccgcgcgcatgcggtctatcgtggtgccggaagcggagaacagccgcgacccgcgctttgcgctggcggacgtcaagctttcgtcactgctggcactcactgctgagaacttgctcggctaagaccgctggcgggtgcaacaatcgctgtcacgccgccagcaacaaaatcaaaacattgtttcattttaattgtaattttgttttcctccctctatgctggtcacaggtggcgtcatcgtacgccagtagatcagctgacagaggtgaatatggtactgaacgccttcgacctgacgggtaaggtcgccatcgtgaccggttgcgataccggcctgggacagggaatgacgctgggcctggcgcaggccgggtgcgatatcgtcggcatcaaccgtaaaattccccatgatacggccgcccaggtgctggcgctgggccgccgctttcacgccattcaggcggatctcagtcaagagaatgatatgagcggtctggtcgaccaggcggtggcggcgatgggccgggtcgatattctggtcaacaacgccggaattatccgccgccatgatgccctgaccttcacggaaagcgactgggacgcggtgatcgacctgaatctcaaagcggttttctttctcagccaggcggtcgccaggcagttcattcgccagggggaaggcgggaaaatcattaacatcgcctcgatgctctcgtttcagggcgggatccgcgtcccctcctacaccgcctcgaaaagcggcgtgctgggtttgacccgtctgctggccaacgaatgggctggccagggtatcaacgtcaacgccatagcgcccgggtatatggccaccaataacacccaggcgctgcgcgaagatgaagagcgtaaccaggcgatcctcgagcgcattcccgctggtcgctggggagcgccgaaagacctgcaggggccggtggtgtttctcgcctcatcagcggccgactatattaacggctatacgctggccgtcgatggcggatggttggcgcgctgagagtttgtgacaaagagttacaccgtcacctcttccgtacactgtataaaaaccctatactgtatgaatcgacagtttagggtgtgttatcatgacggcggaaggccatctcttcttttcaatcgcctgcgcagtatttgccaaaaacgcagagttaacgccggtgctggcgcagggcgactggtggcatattgtgccctcggcggtattgacctgcctgctgccggacatcgatcaccccaagtcgtttcttggccaacggctgagctggatctcaaagcccgtggcgcgggcctttggccaccgcggcttcacccacagcctgctggccgtctttggcgcgctgacgctgttctatctgaaagtgcctgacagctggattgtcccggcagacgctctccagggcctggtgctgggctatctcagccacattctcgccgatatgctcacccccgccggtgtgccgctgctgtggccctgtcgctggcgcttccggctgccgatccttgcgccgcgcaagggcaatcagctcgaacgcgccttgtgtatggcgctgttcgtctatgccgtctggatgccgcagacgctggcggacaacagcgcgatacgctggtcatccggggtgatcaattccctgcagatcaccttcaatcgctttataagtcaccagagtgggcgataaagcggcggaaaacgccatttggttataacccattccatttgaatataagtccttgataacgccttctgctaaccttgccgtcataagagctggttatccaccagcccaggttataaaaatatcaggagaacggggatgaactttccattaatagcgaacgtagtcgtgttcgccgtattactgtttgcgctggggcaaacacgtcataaacagtggagcctggccagaaaagtgctggtcggtctggcgactggcgtggtatttggtctggcgctgcagctgatctacgggtctgacagccaggtgctgaaggattccatccagtggttcaatatcgtcggcaacggttacgtccagctgctgcaaatgattgttatgccgctggtcttcgcctccatccttagcgcggtggcccgcctgcacaatgcctcgcagctggggaaaattagcttcctgagcatcggtactctgttgttcaccaccctgatcgccgccctggttggcgtgctggtgaccaatatgttcggcctcaccgccgagggtctggtccagggcagcgcggagaccgcccgtctgaacgccatccagagcaactatgtggggaaagtagcggatctcagcgtcccgcagctgatcctttccttcgtgccgaagaacccgtttgctgacctgaccggggctaacccaacctccatcatcagcatcgtcattttctcggcgttcctcggcgtcgcagcgcttaagttgctgaaagaggatgtggaaaaaggccagcgcgtgctgaccgcgatcgataccctgcagggctgggtaatgaagctggttcgtctggtcatgcagctgaccccttacggtgtgctggccctgatgaccaaagtggttgccgggtcgaatttgcaggacatcatcaagcttggcggcttcgtggtagcctcgtacattgcgctgggtattatgtttgtcgtccacggcctgctgctggcgattaacggcgtcagcccgctgaagtacttccgtaaagtctggccggtgatcaccttcgcctttaccagccgctccagcgccgcctccattccgctgaacgttgaggcgcaaacccgtcgtctcggcgtaccggagtcgattgccagcttctccgcctcctttggcgccaccatcggccagaacggctgcgccggtatctatccggcaatgttggcggtgatggtcgcgccgaccgtgggcatcaacccgctggatcctatgtggattgccaccctcgtgggcatcgtcaccgtcagctcggcgggcgtcgccggggtgggcggcggcgcgacattcgccgcgctgatcgtcctgccggcgatgggcctgccggtgaccctggtagccctgctcatctccgtcgaaccgctgatcgatatggggcgtaccgcgctgaacgttaacggctcaatgaccgccgggacgctgaccagccagtggctgcgccagaccgacaagtcgatcttcgatagcgaggaagaagccgaactggcgcatcgctaaacggcaagcacaaaaaaaccgctgatcattcagcggtttttttatttctgcagccgactcaggcttcaatctcaccttcctgacgcacctggttagcccagcgctgcgccgactccggcacgctgaatgccggtgagcgacggaaatgctcccccatcagcagaaaagcgacatacttcccgcgcaaaatccagacatcgcgaaaatggtccattttcacggcatgttccgggggcgcaggctccacgcgcggcacgtagctaatgacagggcgattttgttggcgcaatggtttcataacaaatggattcactaaacatagcgggaaatagaaacctctatcatagccgattgtggccccgttcgtcgccccttcgccgccgatgcgcattttaggataactccctgccccctcgccgggcgcagacaacgtaatgttctatagttagaagggttttggtctatcaacgaccacttttagcaatgaaagcaggagacgagtaatgtctgataagcacccgaaccctcaccaacagcaggcaccggtccacgacagcgaggaagcgcagccgggtctcgattcgctggcgccggacgatcgggagtggcgccccacgccgaaacctaccgctccgggcgtcgaacccaccgccccaggcagcctgaaagcgcccgatactcataacagcaaactggattccctggaggcgcaacgcaaagggggggaagattttccgctgaccaccaaccagggcgtgcgcattgctgacgatcagaattcgctgcgcgccggtagccgcggcccaacgctgctggaagattttatcctgcgggagaagatcacccactttgaccacgagcgtattccggagcgtatcgttcatgcccgcggctctgccgcccacggctacttccagccctacaaaagcctggctgcgttgactaaagccgattttctttcgtcagccgataaaatcaccccggtgtttgtacgcttttccaccgtgcagggcggcgcggggtcggcggacaccgtccgcgatattcgcggcttcgctaccaagttttacactgacgaagggatttttgacctggtgggcaacaacacaccggtcttcttcatccaggacgcgatgaagttccccgactttgtccacgccgtgaagcctgaaccccactgggccatcccacaggggcagagcgcccacgatactttctgggactatgtttccttgcagccggaaacgctgcacaacgtgatgtgggcgatgtcggatcgcggcatcccgcgcagctatcgcaccatggaaggcttcgggatccacaccttccgtctgattaatgccgagggcaaagccaccttcgttcgctttcactggaaaccggtcgccggcaaggcgtcgctggtgtgggatgaagcgcagaagctgaccggccgcgaccccgattttcatcgccgcgatctatgggaggccatcgaagccggggactacccggaatttgagcttggcctgcaattgatccccgaagagaatgaatttgcttttgacttcgacctgctcgatcccaccaagctgatccccgaggcgctggtgccggtgcagcgggttggcagaatggtcctcaaccgcaacccggataacttctttgccgaaaatgaacaggcggccttccatcccggacatatcgtcccgggcattgatttcagcaacgatccgctgctgcaggggcgtctcttctcttacaccgatacgcaaattagccgcctgggtgggccgaacttccatgaaatccccatcaaccgtccgacctgcccgtatcataatttccagcgtgacgggatgcaccggatggacattgacaccaatccggccaactacgagcccaactcgattaacgacaactggccgcgcgagacgccgcctgccgccaaacgcggtggctttgagtccctcgccgagcgcgtcgacggcgaaaaaatccgccagcgcagcccttcgttcggcgaatattacgcccagccgcgtctgttctggctgagccagacgccgattgaacagcagcatattatcgatggtttcagcttcgaactcagcaaagtggtccgcacctggatccgcgagcgggtggtcgatcatctggcccacattgatactaagcttgcggaagcggttggggcgaacttagggatcgaactgagcgacgatcagcgcaacattaccctgcccgccccggtcaatggcgtggagaaagaccccagcctcagcctctacgccgacgccgaaggagatgtgaaaggtcgcgtggtggcagtcctgctcaacgaacgcacctcagcgcaggatctggttcagctcctgcaggcgctgcaggcccagggcgtgcacagcaagctgctctactcgcgaatgggcgaagtcattgccgacgatggttctccgctgccgatcgccggcaccttcgccggttccccgtcgctgacggtggatgcggtggtggtgcccggcggcgacctcagcgccctgagtcagagcggtgacgcgcgctattacctgctggaagcctataaacatctgaagccgatcctgctggcaggggatgcgcggcagctgacgtccgttctgcatgttccgacccagggtgaagagggggtcatcgtcaccgatgcgctcgacacgccagcggcggacaaactgctcgccctgatgacggcccaccgcgtgtggtcgagaagcccgaaaatcgccgctattccggcgtagtaaaaagcccggcacgctgtgccgggcttgattcactttccctttcccccgtcgggcttacacgtcgcggtaggttcccagacgataaccccggtcggccaccgccgctttcagcgaggcagatgtcagcacatcaagctcatccagtcgcggatagcagtaggcgctgcccataatgatccgatcgacataagccggatgacacatcacctccagggagcgctccccgcgggcgatggaggcatccagcgtctgcagaaacagttcctcagagaccgcttcgccgtaaaactcgctgctgaagccggcgctgctgcgcgccgcctgctggtcgagcccactctgcgccgccacctggcggtcaatgcgtaacgcaatgcccttctcgcgggcaaaggccgcgacgatgggataaatctgggcgaacatatgaacatggtgatggctgtcgatatgcgtcggctcatggccgaagagttcgacaaaacgatggtactgacacgccagctcgtgggcgatctcttccagcggcaggctatcttcttccgcctgctgccagatccatttgcccagccggccatcgcgggttaatcccggcatggccgacagcggctcgcccagcgtcagtacaaagtgcataccgaccgccagctccggagtactgcggctcagctgggcggcgtggtcaatggccgcgccgttgaccagcgcggtggtcgatgtcaccacgccgttgcgacaggcctcgataatgccgtagttctgccctttactgaggccgaagtcgtcggcattgacgatcaatacgcgttccatttgctactcccgttacgattttagtttttcgatcgtcgccgcaaagttcggcagccatttttcatgcgccagaatcatctcccgcgccagctgttcggcgtcacgatcggaatggatcagcgggcttaagttcagcgccaacaggacatcgttcagctcaccgctgatcgccgcctggctggccgccacttcgaaccccttgatggtgtagataagccctaacaccttctcatcgaaatgagtaatgcgcggcgtcggcttcgcgccgtcgcggcctaaggtgcagctcatctctaccgcccagtccgccgggatattatcgacatgaccatgatgcgggatattcacatagtgctcagtctgcttgtcgttatagatggcattgattacttcgcaagcggcatcagagtaataggccccgccgcgctgctccagctccttcggcttaacgttaagatccgggtttttatacagctcgaacagctgtttctccaccttctgcaccacctgggcgcgcgcaccgcctttgtagtactcgcccatctcaatcgccagcatctcttttggcttaaagtagtagagcaggtaagagcatgggatcaggcgcagggagcggatcagcccttcgctaaacggcaggtcgaagatgtttttcaccgagttcgcggtcagacggccggaggccacgccgtccagcagttcatcgaagcgcgagacgccgttaaccagcacgtcgcggacgaacaccaggtggttcagaccaaacaggtcgatattcagctcatcgctcgggctcagctgcagcacgtcggtgatgaacatcttcatgccgataggaatgttgcacacgccgataaagcgtttgaaattggtgtggcgatagaccgcctcggtgaccatgcccgccgggttggtgaagttgatgatccatgcgtcggggcaaatttcctgcacatctttcacgatatcgaaaatcaccgggatggtgcgcagtcctttaaacaacccgcccgccccgttggtctcctgacccaggtagccgtgactcagcgggatgcgctcatctttttcacgcgccttcagctggcccacgcgcagctgggtggtgacgaaatctgcgccctgcagcgctgcgcggcgatccagcgttttatagactttcatcggcacgccggctttttccaccatccgctggcacagcgcgtggataatatcgagcttctcctggccctcttcgacgtctaccaaccacagttcgcttaccggcagttcatgataacgtttcagaaatccttccagtaattccggggtatagctgctgccgccgccaatagtgactacttttaatttctggctcatctttttctcccttaggcgctgcgcctggacgcaggccgctctccgcaacaatgcggacagttaacttgaatgattttcggtataaacctggcggcgaacgccgcgcgggtttaattaatactggtcaaatgtttgcgataactgctcggcgtaaacgacgtcagttttttaaaggttttaataaacaagctcgggctgctgtaacctgattcatacgcaatatccgtcaccgaataattggtaatttccagctgttttttggcaaagttgatacggatatcattaattatctgcatcggcgttttaccataatagcgctgggtcgcccgggttaaatattcctgcgtttttccggataagcgaaccatattttcgagagcgccttcaccgaatttcagcttatcatgcatggcttccacggtattttttaaccattgcggcgtcacgtcggcaaccggctcttcacgatagtggcgtaaacggttaatgacataaaaggagaccagctcgataaattcgtcaaattccgtttcgcgaaaattgagtgaggcgatgaccgactcaacgtagccgagaaaagcgctctgcacggcgtagacttgcgaagccaccagaccaaacggcagcagcggcaggtagtgtttctcaaagaagcgtctgctgatgccgacgttaaggatgcgcgtcgccccgaactcgtaaaagctctggtggtgcgagcccatcgggataaagacgaaatccccgcgctccagcagcacccgtttgccattgatctcctggtaatagcgcccggttaacaccacggtaaattcgtagtaatcatgctggtgaagcccgctcacgctttccgttttgttatagatgaccacatgaaagttcttcccgttgaacagctgttgttctcgggcggtactgatctcggtggtcatcattctgggctgcctcatcgtcgcgatggcctattgtaccttctcgtgcagctcaatcaattcggccaccagctcacgagccagcatggaggtcatcagatggtcctgggcatgcaccagcaccaggctgaccttcattttcccttcgccctcgtcgctttcgataagctgggtctgcacgcgatgcgcctcgctgagcgcctggcgcgactgctccatcatcgctttcgctgcggcaaagtcgccctgcttcgcctgcttcagcgcgccataggccaggctacgggcttgtccggagttgataatcagccccatcactacctcttcgaggtcattttccggggtctctaccgcgtcgatgttgtccagatcaaacataatatttccctcattttcaggcggtacgggacgctgcccgtaccgcgcggtatcagaatttcagtgcgttagcgatgtcttcttcgctctcttcctgctcgataacggtctgcgctttattcgacagcaccacaaacggcaggtagaccagggtagcgacgccaaggttgaacagggccaccagcagggcggcaacgctgccgttactgttaaagaacgctcccaaaccggtcggcatagtccacggcgccaggttggtcaccggtgggataatccccaggctgtaggccgccagcgtaatggccgccagaatcggctgaaccagcacgaacgggatgaacatcaccgggttcatgatgatcggcagaccaaacagaatcggttcgttaatctggaagatgcctgacggcagcgccagcttagcaacctgacgatggtcagcgcggcgggaagcgataaagatggcgataatcagacccagcgtcgccccggagccacccagcaggatgtaggagtcgagcatcggcttagcccagaagtggaactgtttgcccgcttcgatggccgcatcaacagagccgtactggttgtacagcgcgatgttttccagcgcccacggcgtcatgatgccgttatccagggcggtaagcgccagagaaccgtgcacaccgaagaaccacagcagagagttaaagataacgtatgcccagccaaccacgctgcccatcgccgccagcggcgtcgagatagagtccatgatgatctggtggaagttgctgccatagctcgccagggcccacgaaataatgccgaagatggagaggatcaagaagcccgggatcagcgctgagaaagagcgtgataccgaccccggcacgctgtccggcagtctaatcacccagttgcgacggatcacgaaggtgaacagttccgcaacgaccagaccgataatcatcccggagatgatgttctgcccgcccaaccagttggcgcccaccgcataggcttcgcccacgctatacggggtcacggtcatgaaggccgccaccgccagcaggccagctgccatcgggtcaactttgcgctcttccgccaacgcggagccgataaagaacggcgccattagcgacataatcccgagggtgccgttatagacgtttccgccgatagccttaaagccgtttaaggtttcaatggtggaggcatccaggcgaatgcccatggaataaaagaaagagccttcgccgaagctcagaaaaacgttgttaattaacacaaacatggccccggcgagggtcaacggcattaatttaataaatccattttttattgcattaatatgcggctgctttcctattttcactgcaaaaggaaggagtaccttttcaagcgaatcgatcactttactcatagtcaatacccttaaaagccgcaataaactattacggcgatgatgtatgaaattactctttgacgggaaaataaactcattattttttgacgtccggcaacaggcagccgccaggcgtcaaaatacatcgagttttaaaagttaaaattattgtgctgcagctttcttaatagccgcgacggcggctttcaatacccctaaaccatcaactttgccatagagaagggagtcgataacttcaaccggtttattcggcagcaggcgctgaatttccggtaacatatacgcaatttgtggccctaataatactacgtcggcttccggccctttttcgcccgcgagggtttcgggataggcttcaataatgaccgggacttcatatttttccgcctgcgcccgcattttggagaccagcagtgacgtggacatgcctgccgagcagaagagataaatgtgtttcttttccatgaacgcttcctcaatgtgtgagaccagggccttcagtaaccgctgagagccggtaagactggtaacatccggttaattctgtttatgagttgagtatacggcaagctgagccgccaggataattcgctgttgaacagaattgtctctcattgacctccggttttgactaccctcacattttcatccaaataattcgcgcaattaaataagcatcattactcacaaaaaagcccgaccagtggtcgggcttacgtagaagtcagtaaacagtaggaagcttacctggcgttgcgcgggtcggtatcatactcggcgcaggtctggtagccggagttcatgacgtgacccgtttcgtcgagggccacaaagtaggtttcaactttaccatctcgttgaccgaggatataggtctggcaggtgccgcgggcatggaccatggtgacttccgttgaaggtttgccggcgatctgcatcacctgctgacgcgacatccctttcttcacatctttcaccaccggctgggtaaactggtctttggtacgatcgtaagcggtacagcccgccagtaaggttaacgcgacggtgacgcccagtattcctgctaagcttttgttcattttggttcctcttttctactgtgtaacgataagcctggaataaatagtgttatttttcaagccgaacagcgaaatcatgtcaggttatgttattgcgtaaacaggattgttctgccgacgtcggacggcggcgcaatgcgcggtacagcatctataatgaaaacctatgtcattgattgccttcttttccggcagtcaaaaccccggtccttgtcgtttcagcggcaaagaggtagctttaagccaacagcttgccaaacagattcactttcggagggcgcgatgacgctacaacaagagattattcaggcgctgggcgcaaagccgcagattgatgtcgcaggcgagatccgccgcagcgtcgatttcctgaagtcatacctgcagacctacccgtttattaaatcgctggtgctgggtatcagcggcggtcaggactccaccctgacgggaaaactgtgccagatagcgattaacgaactgcgtgccgaaaccggcgacagtagcctgcagtttatcgccgtccgtttaccctatggcgtgcaggctgatgagcaggactgccaggacgccatcgcatttatccagcctgaccgggtgttgacagtcaatattaaagctgcggtgctggccagcgaacaggcgctgcgcgaagctggcatcgaactgagcgacttcgttcgcggaaatgaaaaagcccgtgagcgaatgaaggcccagtacagcatcgccggaatgaccaaaggagttgtggtcggtaccgaccatgcggcggaagcgattaccggctttttcaccaaatatggcgacggcggcaccgacatcaacccaattttccgcctgaacaaacgtcagggcaaacagctgctggcccatctcggctgcccggaacatctgtataagaagctgcccaccgccgacctggaagacgatcgcccctccctgccggatgaagtggccctgggtgtcacctacgagaacatcgacgattatctggaaggcaaaacgctggacccgagcatcgccaaaacgatcgagggctggtatctgaaaaccgaacacaagcgtcggccgccgatcaccgtctttgacgatttctggaaaaaatagtctctccccccgccccggcctgcgccggggttattttttgtccttttcgccgcaaaaatggcctgctatactggatggatagacagtaccaggagttattgtggccagaaagcaatcagccccgcgtctcgagtttgaggcggcggcgatctatgaatatcccgaacatcttcgcccgtggctggaggcgctgccgaagctgccgggcgtctatcagtttcacggcgacagcgacacgatgccgctctatatcggtaagagcgtcaacctccgcagccgggtgttatcccacctgcgcacccctgaagaggccgcgatgctgcgtcagtcgcggcgtatcacctggcagcgcaccgctggcgagctgggagcgctgctgctggaggcgcggttgattaaagagcagcagccgctgtttaacaagcggctacggcgtaacaagcagctctgcgcctggctacttgcggacgaccggccgcagattgtctatgcccgtgaggttgatttctcgcaccagcagcatctctatggcctgttcgccaaccggcgggcggcgctgcagatgctgcagagcctcgctgacgaacagcgcctctgttatggcctgcttggtctggaaccactcagccgcggccgcgcctgctttcgctccgcgctgggccgctgcgccggggcctgctgtggaaaggagagcgtggaggcgcacagagagcgcctgctggcgcagatgagcagactgcagctggtgtgctggccgtgggcggggcccgtggcgctggaggagcgcggcccggacatgacgcagtatcacgtcattcataactggctgtggctgggcgccggtgaatcgctcgaccaggcggcggagttgacccgtctgcccgccggatttgaccaggatggttacaagatcctctgtaagcctttgctcagcggagactatccgctgcatccgcttggctgagaagccaccaataaaaaaccgccggccctgcccaacgcctgatggcattattgggcaagaccggcggtcttgattcggtgcgctacattattcagcaggtgcaggcattttacctgccggcgcgttgcgttctgtcagatgcttctcaaaattagcattgaactgttttttctgctctggggtcagaatgttgtagatcttgttctgcgtttccaggcgggacagcgccatcgctttatgctgcgcttccatcttatcgatctgcgcttccgccttcgccttatcgaaggtgtcgctggcgatcagatcgtgcatcgcgcggcgttcttcaagggacggacgtttcatattttcgcgctggctcttcatgatgtcgcggatctgctgcttctgcgcatcggtcaggttcaggcctttaaacatcatgtcatgctgacccgggccgcctttatgatgcatcatcatcggcttgctgtcgctcggcgcggtggtggtatcggcggcgtgtgccaggttagccgcgcccagagccagagtagaggcaacaaacagtgcagtgagtttcttcatcattcaatccttactttacgttattcttacggcgcgttgccgtgttgacgagattaactttacgacgttaatcgtcaattagtcagagcaagagtaaaacaatgaaagtgtaaaaaacagtttctcgccaattatggagaaaataaggaatttagccgaagaattgcaataaaaaataaataacttactgttttgcagagaaattatggagagtataaaggaggggagattaaaaacaaagcattttaccaggaataatctgcaaatttacagtggagcacgaaaaaataagatggcgaaaaaagacgcgcacaataaagcaggccgcccggcggacggcttgccctcaggataatttctccagcatcaggccggcgcgcagtcctttcgccaccgtcgggttaggaaacagaacatactccgtctcaggccccaccacataccgcgtctcgccctcctccgccagcagcgtgccgggttcgaagggggtgaagttcagcgtctgatccgccatatgcaagcggaaatcatcgctatggcgggttagctgctgtaccacccggtagcgcagcggcgctggggcgtcggcaatggccagatcccccaccagcagccgggagagcgcccgctggacggcggcaaactgcgtcagatcgttttcccccaacggcagcgctttgcccagctcaagggtgcaggccagcgccgcgaaccgttcgcagctgaagtgggtgaaggtcccgccgggctggcgatgaaacaccagcgcctccagcccggcgccgcccagccagtgaagaaaatcctcctgccacggcgtatcgcgggccgggagcacgccgaagcgcggatgtagcgacccgcggatcgcggtatgcagatcgaggtgccagcgcgggccatcgtggtcgcgataaaagcgggccaccgcctgctccagccgctgcgcccgctgcgtctcctcactgagcggaaactgccgccagcgctcgccaaacatgcggttcatatcgctgtgcagatagcgcttattcgcccgcagcgctggtggattgccgacgatcaccagcagccgccagcgcagcgggagcgcctcccggaccagtcgctgcaccaggtggtcgactatctccaccggtgccgtttcgttgccatgaatggcgcaggaaagtaccagcccgcgctcgcagcgcgcatgcggcgtcagctcaaggatcccttccccgagccagtgccagaggaaatgggccgtctcgccgtgaaaatggtggggcaaacgccccgccagggttaatgccagaaaatgttccaccgcgcccccttattgctgaaatggataaaccgaaccgagctgcaggatctgggtcaaccgatccagcgcgtcgcgcccttcccgcagcagctgcgggtcggcgaggtcggcctgggtgagacgatcgcgatagtagcgatccacccagtcattgagggtggcaaacagcgtatcgttcatcaggacgtgcggattgaccgcctgatactcctcggccgtcaacaccacccgcaggcgcaggcacgccggaccgccgccgttggccatgctctcgcgcagatcgaacacccgcaggtcggcgatagggttatccccggccagcagctcattgaggtattcccagacgccggcatgctcctgcgcttcctgaggcaggataagcgccatgctgccatccgcccggctcaccagctggctgttgaacagataggtggcaaccgcctctgccaccgagacccggctggcgggaaccaccagcggcgtaaaacccggcacccgctgcgccagctgctggagaagcgcggtctggtcggcaaaggcctgctcatggcagaacaggacctgacggttgctcaccgcgatgacgtcgttatgaaaaacccccgtgtcgatcgccgccggatgctggcgggcgaagatcagctggcggggattgacctgattgaggcgcgctaccgcctggctggcctcaagggtttgccgcgccggatagcgacgcggcgcctcctcgctcccccggcggcggccatagacaaagagctggacgccgggagcaccatactcgccgccgagacgattatggttcgccgccccttcgtcgccaaaccaggccgaggcgggcagcgccgggtggatagcaaatcgcgtgcggtcggggaaaatcgcctgcagcagcgcctctgtagtcggtgcttcgctggcgcggtggaatttatcctgcagattcgccaccgtcagatgcaccaggccatccagcgaatcggcggagggacacaccgtcgccgcgttcgccacccacatcgccgaggccgaactcaccgccgacagcagatccggctcctgctgcgccacccaggccaccacctgctcatcgctgccgctaaagcccagctggcgcagaagcggcacgttgggacgctcctgcggcgggatcaccgcctgcgggtagccagcgtcggcgagggctttcatttttttcagcccctgctttgccgccagctgcgggttagacacccgatagcgatgccgggtggaagcctcattgccaaaggagagcccggcgtagtgatgggtcagcccgggcagaccgtcaaagttgacttcgcgggcggtcatgacgcctccccggccagaaagtcgagacccgggctcaggctggcgggcagcgtcagggtcggcgattcaaggctggccatcggccaggcgcaataatcggcggcataccaggcccccggacgatggttaccggacgccccggtgccgccgaacggcgcggtactcgccgccccggtcagcggtttgttccagttaactatccctgcccgcgcctcaagcagcagtcgatcgaacttctcccgttccggggagattaacccacaggagaggccgaagcgggtagcgttggctaaggcaatcgcctcctcgaaagtgtcgtagcgccagaccccaagcagcgggccaaacacctcttcatcctcgacattggccacgtcgcgcatgtcgacaatccccggcgttagcagcgacgtcccggcctgcaataaccgcggctccagcagggtgaccgcgccagcggcgacccgctgcagccaggcctgatgcactttctgcgcggcttgttcagagataagcccgccgagaaacggctgcggctcggcgtcccacgctgccgggatcagccgttggctcaccgtcaccagccgggagaggaagacatcgcccgcctctccgcgtcggaccagcagacgccgggcgcaggtgcagcgctggccagcggtaataaaggcggactggatggtcagatgcaccgcggcatccacgtcccgcggatcgtcgacgatcagcgggttattgccgcccatctccagcgcgaggatcttctgcggttgcccggccagctggcgatgcagatgaaaaccggtggttgagctgccggtaaacagcagtccgtcgatatccgcctggccgctgagcgcctcgccggtttcccgaccgccctgcaccaggttgagcaccccggcgggcaggccggcctgctgccatagtttcaccaccgcttcgccgctgcgcggggtgagttcgctgggtttaaagaccacggtattgcccgccagcagcgccggcacgatgtgcccgttcggcagatggccgggaaagttataggggccaaacaccgccagtacgccgtgcggccggtgacgcagcgtggcggcgccgtcgggcaggtcgctgtgctgttcgccggtgcggacgtggtaggccttcaccgagatcgccaccttgttgatcatcgccgtcacttccccggccgcctcccagcgcggctttccggtctcggcgccgataaccgccgtcagctccgccttactggcttccagcagagcggcaaacttttcaacgatcgcctgacggacggcaaacggcagccgcgcccaggacgggaacgcctggcgggcagccgccaccgcctcggcaacctgcccggcatccgccgcctcgccctgccagacaaccttcaggttaaccggatcctgtttactgaaacctggcccacggccgggccgccactcgccgttaatccacagactcatacagttttctcctcagggatcaggcgcaccatgcgcacctggtcgccggcatgacacttcagcatatccagttcgcgggcgctgagggtcagggtgtcgccatccggatcggcatgcaccagcagagcgcggaactggtgatactgttcattcgccaccaggcacagcggccagtcaccgggcgaggtttcacctgcctcggtggtcaccagacggcttttgcggatcgcccgcacccggtcgatgtcgcactccagagtcgggccgccgtcgaaaatatcgatgtaattcaggtagcggaacccctctttctccagcaccgtccgggccggggcggtctgcggatgaaccttgccgatcaccgcctgtgcctcaggggaaaggaaatcgatatacagcggatgcttgggcatcagggcggcaatgaaagccttctgtccggtgccgcacaggtagtcggcacgggaaaactccatggcgaaaaagcgtttgcccaggctctcccagaacggcgagtagccctgctcgtcaatcaccccgcgcatctcggcgaccaccttctcattgaagcgctcgcgaaaggcggccataaataagaagcgtgatttcgacagcagatagccattgccctctttgcgccactgcgggtcgaggaacagggtgcacagctcgctgctgccggtatgatcgttgctgagaaacagcgtcggcagcgcctgatagacgttgagctccttcgaggcatggacctgggtgccgacccggtagttataccagggatcgttgagccccaccgccacctcgatcgcgcagatgcccaccaccgcgccgctttcgctctcctccagcacaaagacatagccctgctcgcttttcggtagctcgccgcgccaggtctgctgcgagcgggcgatccgcgccgcgagggtcgcttcatccaccggcagcgaggtcagcccgccgccggtctccgctgccagcttcagcagcccgggcaaatcgcccggctccaccggtcgaataaccatcatgatgagactcctgccacgaaacgcgcgcaggcccgctcgacgcgatccagcccgctgttcacctcttcttcactgacgttcagcgccggcgcgaaacgcaccacgttggcgccggcgatcagaatcatcaccccctcttccgccgccaggttactgagggttttcgccttcccggcccaggcgtcgtttagcacgcagccgagcagcagtcccaggccgcggatctccttgaacaggccatagcgggcgttaattgcctgcaggcgttcacaaaaccactgatggcgctgtctgacgccggagagcacttccggggtgttgacgatcgacagcagttcgccggccaccgccccggccagcgggttaccgccgtaggtggtgccgtgggtgccgacggtcatcacgctggcgcaggcctctgtcgccagcagcgcgccaatagggaaaccaccgcccagcgctttggcggtggtcagcacatcgggcgtcacgccgtagtgcatataggcatacagctcgccggtgcgcccgaccccggtctgcacttcatcgaaaatcagcagggcgttgtgctggtcgcaaagctgacgcaggccgcgtaaaaactcgacgctggccggcaccacgcccccttcgccctgcaccggctcgacgatcaccgcgcaggtctgctcattgattaaggcctttgccgactcgagatcgttaaatacggcatgctggatctgcggcggcagcggggcgaaatcccgggaataggccggctgaccgcccgccgagacggtgaacagcgtccgcccgtggaaagcgttctgaaaggcgacgatgccacttttctcgctgccaaagcgatcgtgggcatatttacgcgccagcttgagcgctgcctcattggcctcggcgccggagttacagaagaagacccggtcggcgaaggtagcatcgataagcattttggccagacgcaggatcggctcattggtgtagccgttgccggtatgccagaacttgccggcctggtcggtcagggcttgcaccagacgcggatgggcatgccccagcgcgttcacggcgatgccgccggcaaaatcgatatactctttgccctgctgatcccacagccgtgacccggcgccccgcaccggaataaacgccgctggcgcgtagaccggcatcatccattcatcaaagtggttacgcgtaattgactgagacatatcgacctcttccggtaaattaaaagtagcaataatgttaataaatatgagttattacgctgtaaatgtagattgcacggttcgtgccagccagcgataaaaatgcataaatcggatgagataacgcggaatcaatgagttacagccgaacgctattcacataaaatgcatatttagtgaataagtatccgacaaagggggataaacagtgattaaagaagataaattatgcaacggtaagatataattctgtaattgtgatcctctgcgaaatttatcgtagctatttgcccttttttggcgcggcatgcccgcaaaaggggcacccacggcacgctcatgcgcagcgattggcagaatgacgcatccggtggcagccagcctggcgaatttctgctaccatccctgcactattcaccttgcacagtggcagcgactatgaaattcgtctcttttaatatcaacggcctgcgtgcccgcccacaccaactggccgccatcgtcgaaaaacaccagccggacgtgattggcctgcaggaaaccaaagttcacgacgacatgttccctctcgaagaggtcgccaggctcggctataacgtcttttatcacgggcagaaaggccattatggcgtcgcgctgctgaccaaagagacgccgattgccgtccgccgcggtttcccggacgatggcgaagaggctcagcgccgcatcattatggcggagatcccgtcgcccttcggcaacgtcacagtgattaacggctatttcccgcagggtgaaagccgcgatcatgaaaccaaattcccggccaaagcggcgttctatcagaatctgcagaactatctggagaccgaactcaacaaagagaatccggtgctgatcatgggcgatatgaacatcagtcctaccgatctggacatcggtatcggtgaagagaaccgcaaacgctggctgcgcaccggcaaatgttccttcctgccggaagaacgggaatggatggaccgcctgctgggctggggcctggtggatacctggcgtcaggctaaccccgacaatcatgagcatttctcgtggtttgattaccgctccaaaggcttcgacgataaccgtgggctgcgcatcgatctgctgctggccagccagcctctggcgcagcgctgcgtggaaaccgggatcgattacgagatccgcgggatggaaaaaccgtccgaccacgcgccggtgtgggccaccttccggccataattcacgcccttctctcgcctcccgctgtgcggggggcagaatttcctgagcaaaatcaacaaagcgacggtaaaggattgtgaccgttgtcggaacaggatactgtcgcgcgcactttttgatgtccaccgcgtccagactgtacaggagcacctctcatgcaaaagaagccgtcatccggccattggtaaagggctgggacttctcgcgctggtggccacgctggctgttatcagccaccgcgtcggtctccacgatctgctgactcacctgcatctgcttcaggacaccctccgccatcagggcgcctggggatatctggtctatgctgcgctgtttatcattgccatcctgtgtctgatccccggcagcctgctggtgatcgccggcgggatgctcttcggcccgctaacaggctccctgctctcgtttaccgccgccaccctcgcctcttcgctgtcgtttttaatcgcccgctggcttggacgcgatctgctgcagcgctatgtgggccataccaccgtctttcaggcgattgagcgcggtatcgcccacagcggctgcgatttcctgatcctcacccgcctggtgccgctctttccctacaatattcagaattacgcctacggcctgacggcgatccgcttctggccctttaccctgatctcggccgtgaccaccctgccgggtctggtcatctattcggtaatggccagcgaactggcccgcgagggggtaaccctcgccttcgcgctcaaactgagtctcgccggcgggctgctgtttgccctggtgcagataggtaaacggtttgcccgcgcccgtcgcgtggcggcgtgcagtgaggaggtgcgccatgacccaacctgatcgccgtcacctgcgccgcgcccggctggcccttgccgtcgtggtcgccgccgctctggccgcctggctgtggttccctggcgggcgtacctttctgcagcagagtctgacggcattagcctccctggatccgcagcaggtcagagggtttatcgccgcctgggggccgcaggccgcgctggtctcatttgcgctgatgatcctccaggcgatcgtcgctccgctgccggctttcctgattaccctggcgaacgccgccctgttcggcgccttctggggcggggcgctgtcgtggttcagcgccatggtcggggccgggctctgcttctgcatcgccagagcgctggggcgcgaagtggtggagaaactcaccggccgcgcggtgctgcgcagtgccgacggctatttcacccgctttgggccgcagacgatcctggtctgccgcctgctgccgtttgtcccgtttgacccggtcagctatgccgccggactaacctcgctgcgcttctggccctttatgctggccaccggcgtgggccagctcccggcgactatcgtttattcctgggccgggagtctgctcaccgggggcaccttctggctggccaccgggctttcgctgctttttgccctggcggtggtcatctctatcgccaaaaatatttaccgtgaacgtcataagagatcgtcgccatgagcttacccccgctggattctgtccccctgatccttcgtccgcaggcctggctgcaccgccggcattacggccaggtgctgagccccattcgctggtggggtcggatcccgtggctgttttacctggtttcgctgttcgtgggctatattgaacgccgccgctcgccgctggatccggtgctgcgctcgctggtcagcgcccgcatcgcccagctgtgccactgcgaattctgtatcgatatcaccagcatgaccctcgcggcgcggagcgggagccaggacaagctgctggcggtcgccgactggcgcagcagtacgctgttcagcgaaaaagagcgcctggcgctggcctatgccgaagccgccacccagacgccgccggcggtggatgatgccctgcgtagcgcgatggccgcgcattttgacgcccgggcgctcaccgagctgaccgccctgatcggcctgcaaaatttatcagcgcggttcaatgccgcgatggcgatcccggctcaggggttgtgccagatacccacctcttcctcgcagaataaggagtaacgatgcgccgtttgcgtgattacagcctctgtctgtgcctgctgctgctctggccgctggcggttaatgccgacgacagctggcggcagattcagacggaagctcgcggacagaccgtctggtttaacgcctggggcggcgatccggccgtcaatcgctatctggcgtgggtcagcgaagaggtcaaacgctattacgcaatcgacctgcgtattgtgcctgtcgccgacgccgccgacgcagtgaaacgcatccagaccgaggcgcaggccggtcgtcgccagggcgggtcagtggatctgctgtggatcaacggcgaaaactttcgcacgcttaaacaggccaacctgctgctcaccggctgggccgaatcgctgcccaactggcgctatgtcgatctgcaaaagccggtacgggaagatttttcagtcgccacccagggcgcgcagccgccgtgcgccgtcgcccagctgacgtttctcgccccaccccgccagaccccccagccgcccacccgccccccgcgcccgccggccaccccccgacccgagcagggcccgccaacctgaccccgccgcccgcccctcccgcgccccccccccgcgcccccccc

SEQ ID NO: 155 - DNA, 56165 bp, Unknown
  source: /note="Description of Unknown: MKP2_2161_1 Mutant Bacteria sequence"
ggcgaccgccggcagcgtcctgagcatgcgcggcagctgctcgcccagcatcagaaagatcatcccgttgagggtggtctgcagcatggaccataccgcgctgcttttcatgcgcgtcgccggaagccggggccccgacagctgctcataatgcatcgcaatgccggcggcgacggcggcaagaatgcccgagacatggatcgcctcggccagcagataggcggcgaaagggataagcaggctgatcaggatctggatggctggctcctcgcgggtgcgccgaaccagaaagttattacatttgccggtgacccacaccaccacgaggccactgaggatgcccccgaaggccatcaggaaaaatttcaccaccgcgtctcccggggagaagctgccggtcagcaccgcggcgatggcgaaattaaaggcgacgagccctgaagcatcgtttaacagcgactccccttcaagaatatgcgccatccttgagggaagcggcgagctggcggtcattgccgataccgccaccggatcggtaggcgacagaatagccgcgagggcgaaccctgccgccacggtgatagccgggatcagccagtgaataaacaggccaataccgagaatagtcaccatcaccaggcctatcgccagcgataaaatcggcttcatatcgcggaaaaaagcgtctttggggatgcgccagccatcgaggaacagcagcggcgggataaacagcagtaaaaaaatatgcgggtcaaaatcgacctgaaagccactggcggccagcgcggcgcccgcggcgatttggatcagcggtagcggcactttaacgggcagaagatgggacaggaacacggtcaccacgatggccatgataaagaccagcacgatagcaattagcgacattcatcccctcctctgacggcaatattcattctgtacatcagactgttaatcctttttcgcaggtgttgtttcggtaacagattatttacccagtcaccgataatttaagacagacgtcattgtctgccggcgataatatttaaactgaggtggcaaccggtgccggatcaggggtgacaatgtcttttatcaagccgcgtttgtcaatccgctatcgtctgcaaatcatccccggccggcattccggggagaagtcctcacaggactgtcgaccggggacttcgcaaattagcctcttcacatggacaaaaccactcaaccgctccagccctccgctgtttatatattcccaatattattaattcgtattatgcattgtgaatatggatattaatgaccagtctaatatacccggcagagttatatttcgtgcccccgccggcagtgcgaaccacgtatttgcgataaataattcttaacgcccccccatttcaggatgattggacagccagccttacgctacgcgcaatgcttgccctccccctgaattgggcgtaccctgacaaacaattaaaccacacggtctaaatcatgaatcccaatacctccaccgtcctgaagccccgccgcggccgtccacccaaggtcgatcgccagtttgacgatacgcgtcaggcgctgattcgctcaggccttgaagtgctgaccgaaacgggctatctcgcggcgggtattgatgcggtgatcaagaatatcgccgtgccaaaggggtcgttttatcattgctttaaaagcaaagaggcttttggcctcgccgtgcttgccgcctatggcgacttctttgcgcataaattagataaattcctgctggacgacgccgtgccgccgctggaacgaatggcggcctttgtgcgtcatgccggtcagggaatggagaaattccagtttcgccgcggctgcctggtgggcaacctgctgcaggaagccccgttgttacccgagacgtttccccaacggttgatggctatcctggcggcatgggagtcgcgcgtggcgcgctgcctgcgcgaagcgccggcagccggggccatcgccagcgacgcctcaccgcaggcgctggcccaggggttctggatcggctgggaaggcgcggtgatgcgcgccaggctggtcccgtctgccgcaccgcttacccagtactgggatttttttgcgcacagtatgacaacaaaaacacctgcacaggacggcgctagcgccgataacccccttccgacgaggaatactctgtcatgaaagcattagttctggaccagatcgacaaccgcaccgtcgccactgtcaaagatatcgacctgcccgctcttgccgaaggcgacgtccgggtcgccatcgactggtcgagtctcaattataaagacgctctggcgatcaccggcaaaggcaaaattatccgtcagtttccgatggtgccgggcattgattttgccggtcaggtgaaagaaagccgcgatccgcgctttgttaccggccaggccgtgatcctcaccggctggggcgtgggcgaaaaccactggggtggcctggccaccgaggcctgcgttaaaggcgactggctggttgctctgccggagacgctcagcgcgcgccaggcaatgatcattggcaccgccggctttaccgcgatgctatgcgttgatgctctcgttagtgcgggtgtcacccctgatagcggggatatcctggtcaccggcgccagcggcggggtcggcagcaccgccgtggtgttgctgaaagcccttggctaccgggtgacggccgtatcgggccgggaatcgacacacgattaccttcgccagctgggcgccgatacgatcctgccgcgcagcgacttcgcggagacccgtccgctggagaaacagctgtgggcgggcgcggtggataccgttggcggcccagtgttggccaaagtgctggcgcaaacgcaatatcgcggctgcgtcgccgcctgcggtctggccgggggcttcgatctgccgaccaccgtgatgccgtttattttgcgcaatgtgcgtctgcagggggtggattcggtgatggtgccgaccgctgaacgcgacgccgtctggcagcgtctggcccagcttctgccggagagctactaccagcaggcggccactgaaatcacgctggagcaggcgccagcgtatgccgcagatttcctcagcaataatattcatggtcggacgctggtcaatatcggccagtaatcctcttctcccggcgcccgtgcggcgccggatcccgagagggatcaaggcatatcatttccttccccacgggattatgatgacgcgaacgaatagctctgcgagtggtaaaaaaagtaaatggatgtcataagcatcattatggcggcgggcaagtcgtccgttgacgtcgcgctgtatacgctgttgccgatcatggtgatcatgctgatcatcatgaaataccttgaggtccgcggtatcctcgatgtgattgttcgctgggtggccccgctgctgaagcccttcggcttaaccgggatgagcgccttcgccctgatccagattaactttgtcagctttgccgccccgctcgccacgctgtcgattatggataaacgcggcgtctcggaccgacaaatggccgccacgctggccatggtgttcgccatggggcaaggcaacgtcttctatcctcttaccccttttggtctgcactggctggcctcgatcgttatctcggtggtcggcggcctgtgcgcggccgccgtcgcctggcacgtcaccggacggcgcttatcggtcgccgagaacccccgcgcggaagcgctgccgaatgccgagcagaacagccagggaattctggccgtgattaatagcgccggctccgacgccatccgcctggcgctcggcgcggtgccaatgctgatcctgtcgttaaccatcgtcgggctgctgcagggcgccggggctatcgacctgctgcagcagctgctgaagccgcttctcagctggctgcacatcccccagaactttgtgctgccggcgctggtgaagtgcgttgccgggggcaccgcctactttggcgtcatttccgagctgatccagcagggcaaagtcaccgtggaccaggtcaacgcctcggcaggtctattgatccagacctttgatcttcccggtatcggcatttttcttggcatcagctcacggtttgtccgcctgttccgcttcgtggctcccgcggcgatcgtcggcatcctgctgcgtaccgttctgcacctgatcctgttttaacgcctctgctctggcctgcgctttcaggcaggccgtcaccgccgcctgttcgccgcaggcgatgcgctcatcgacgcgcgtcatcatccatggaaagaatggattggaggtgacgcgcattaacgtctccagccccacgctcagcgtcccggtctctccgcgcagggaaatggtgcccaggctaatgccgtagcggttcttctcgtccggctcgcgaccatacagcgagtcgcccaggggaaacggcaccgccacatgcgacaaagagtacatatccgccggccaggccaggtgtaaaggataacgatgctcttcccgttcctgggccagcgtggtccgggcgacggtctgcagcgtgggcgccgtcgcgttggtcaccaccgtggtggtataggcccgcggcgccgggggcagcagcgtattcaccgccgcatagagcgcagggcgaaacaggacccggagatccgccgcctggttaatatcgaacaccaccagctcgctgccgttatccggcagatagcgatacagggactccaccaccgcgcgggtgctgaccgtggaatccatcaccgactgaaaggtgaggatcggcggcagcgctttcagctcgccctgccgggccgcgcggataatctgctgctgcagcgcctggctcaataaccacgattgtctcgccgccttgaccggaaaggagttgtacttgaacggattaaactcaggcgccacgttcagccaggccgcgcgggcgaacgccgggaagacggacggtagcccggcgaggccggcgaaacgggcaaacgcggtcacgccgatcatcggcgacagcagaataatctgctgcggctgacgcaggtggctatcctccaggctatcaagggcatacttgagcgccagcgcgccgccgttagagtagccgaccagatgcagcggcacgtccgccccggcaaggcgggtcgcttcgcgtaccgccagacgcgtcgccgccagccaggtctcccagtcaaccgccgttaacgcccccggcgcggtgccgtgtcccggcaaacgcggcaccaccgccacataaccccgctgctgccagagttgcgccagatagcgcacgctgtagggcgaatcggtcaggccatggaggagcaccacgctgccgcgcggcttgcccagcggcatcaacacaaaagaacggttccagtcctgctgaaactgccccggccagacccggctgtgacgataaaagcggttgaccggggttttatcttcctccggcaaagcctctgtcacctcacgctggagatcggcgaaaatcgtcttctcccgcgccagatactgggcaaaggtcgcctggtcgatctcttcggccgacatctcgttgccactccaggtatgccagcgatgcagggccgggccgcgctgggactcatagatccgcccggcgagaaagaccaccagcagcgccagtaccgcaatgctcccttttttcagcagtgagccgataacggcgcccgacgttcgccagtgtcgaaatagatgcttcatgacgctctctcttatatttattgcgtagccggacttatcagccctcttcctgacaggctattctcacggtctgcttttcagcatagtcatcgcttcctgcaaattaaacctggcagatcattcccccccggcataaaaaaacctagcgcacagatcaacaatcggttgcgtatttttaaacactgcataaaccaaggggataatcttattgtcagatttttaagaaacatgaattatcgacgcacatgtcgctatgagaggataaaaaacagatggagtggtgggtaaaaaaagtacaggacaacgcttcggccagcctctgccgcgtcgtgcttcagagcggtgcgctggagatgatcgcagagattgaagcctgtcgcctccgcctgcgggaaggggataaactcactccgctggccgatgcgcgctattgtctgaataataatccgacgcaaactttgaagatccgcaacgccactcattatagcagcgagcgttggacaaacgccggcaaataacacgagcccgctccctttactggttatggtctgagtattgtcgcatttgacagataaattctccttcgcccttttcccgctgtgacatactatcgggaatgtcagcagacctgaaacaaggagcgaatcatgaatatcaaggccgccagtctgaccccggaacaagcgcttgccgagctggaagcgcgctatgaagcctcggtcacggcgttacgcaaagccatcggcgactatatcgaccataatacgctccccgataccgaagcccgcgcggaaggtctttttgtctatccgcagctgtcggtctcctgggacggcgccgatcataaagccctcaaaacgcgcgcctggggacgtttcacccatgccggttgctataccaccaccattacgaatccgaaactgttccgcaactatttgctggaacagctgaccctgctgtatcaggactatggcgcgcatatcagcgtcgagctgtcgcagcatgagatcccctatccttacgtgatagatggttccaccctgacactcgaccgctcgatgagcgccggtctgacgcgctatttccctaccaccgagctgtcacaaattggcgatgagaccgcggatggcctgttccatcccaccgagttctatccgctgtcgcactttgacgcccgccgcgtcgatttttcgctggcgcgtctgcgacactacaccggcacgccggcggaacacttccagccctacgtgctgttcaccaactatacccgctacgtggatgagttcgtcagctggggctgcagccagatcctcgatcccgacagcccctatatcgctctctcctgcgccggcgggatctggatcaccgccgagaccgaagcgccggaacaggccatttccgatctggcgtggaagaagcaccagatgccggcctggcatctgatcacccacgacggcaaagggatcaccctgattaacattggcgtcggcccggccaacgccaaaaccatctgcgatcatctcgcggtactgcggccggacgtctggttaatgatcggccactgcggcggcctgcgcgaaagccaggccatcggcgactatgtgctggcccacgcctatctgcgtgacgatcatgtactggatgcggtgctgccgccagatattccgatccccagcattgccgaagtgcagcgcgccctctacgacgccaccaagcaggtgagcgggatgcccggcgaagaggttaagcagcggctgcgtaccgggacggtggtcaccaccgacgaccgtaactgggagctgcgctattccgcttcggcgctgcgctttaatctcagccgcgcggtagctatcgatatggagagcgcgaccatcgccgcccagggctatcgcttccgcgtcccctacggcacgctgctctgcgtctcggacaagccgctgcacggtgaaatcaagctccccggccaggctaaccgcttttacgagggcgctatctccgagcatctgcagataggcatccgggcgattgacctgctgcgcgccgagggagatcacatgcactcgcgtaagctgcgcaccttcaacgagccgccgttccgttaatcgtcgatgacgtgggaatcgtgagataaacgctgacgttacccgccagggagcgtcagcgtccggataagcgaaacaaacgacccggcggtgtttgtccacggaagaaaggtggtagacagaaaagcaaaaagcctgctcgaaagcaggcttcttaaatttggctcctctgactggactcgaaccagtgacatacggattaacagtccgccgttctaccgactgaactacagaggaatcgtgtgaacggggcgcatattatcgatgacgcccggcgctgtcaaagcctgttttcaataaaatgaatcgtttgccgaattattcttcactttgcgcaaaaaatggcgtttagccttgcaaacgactcagctttcctccgatgaagccttcacgcgcggatatttccacagccagcggccgctcaccatgcggaaataaaacagcacgccgcgcaccgcccagtcgagcaccatccctaaccagacgccaatcacccccatccccagcacgatgcccagggtatagcccgccactacccggcagccccacatgccgagcatcgacacccacatggtgtagcgtacgtcacgggcgcctttaaaagcgcagggtaaagtccacgacagcgaccagatcggcataaacagggcgttgagccacagcagctgtttaaccacttcttttacatcttcttcatgggtgtagaacgaggcgataaagccggcgaagggagcgctgccccaggcgatcagcgtcagaatgatcgtcgacagccaaaatacgtgccaggcctggaattcagcctgaccaatctgcccttttcccagccgcttgccggtaatgatcgtcgaggcagagccgagggcgttgcccggcaggttaattagcgaggccaccgaaaaggcgataaagttgccggcgataacgttggtgcccatcccggcgacaaacatctgggtcagcagcttgccgccattgaacaggacagattcgatactggccggaatgccgatccccatcacctcccagataatggcgaagttaaagggtttgaagtagcccctcagcgacagccgcagcgccggattgaggcccaccatcagcacccagatcgtggctatcgcgccaatatagcgggcaatggtcagcccaagcccggcgccgacaaaccccagccccggccaggagaagatgccgtagatgagcacgctgctgattaagatattgaggatgttcatcccgccgttaatcagcagcgggattttggtggtgccggcgccgcgcagcgccccgctgccgatcagcgcaatcgccgccgccgggtagctcagcgccgtcagttccagataggtcagcgccaggtccttgacctgggcggtggcatcgccggcgacaaaatcaataatctcctggccaaaggcatggatcacccccgccagcaaaatggaaaacagcgtcataatggccagcgactggcgcgcggccgccctcgcccgccgccgatcgcgcttgccgaggctaaaggccaccaccaccgtggtgcccagatcgatggcggcaaagaaggacatgatgaccatgttaaagctatcggccagccccaccccggccatggcctcttttcccagccagctgacaaggaaggtgctcaacacccccatcagcagcacacaggcattttccagcagaatgggcacagcgagagggctgatttcgcgccagtacagcacacgataacgctgacgttttttaaaccaggatgtccgttcgacggcctggcgtacggcggaggtgacgttcaagagagaccttagtgagaaatgttgaaacaacatttcaaatgatgattgagaaatggatatcctgcaaagtattttccgtaataattgtcggaaatgacaacaaattgtcgatgtaagcggcagttgcacctgaacaggcgaattgatgtttgacaaaagttttttcgccgctaagatacgactccacacgattcctctgtagttcagtcggtagaacggcggactgttaatccgtatgtcactggttcgagtccagtcagaggagccaaatttaagaagcctgctttcgagcaggctttttgcttttttgcgtcgctgacgttaactcagcatcgcatccagcctggcaagcacctcgttgacaacgacgtcaggtatgcgttccagacgcttgcctttccctaccgcctccctacgccccgcgtgtcctccgtgaacgcaccccagctcagcctgaaaaagcgcctgccagtaggatgaattcactaccgtttgcgggtgagatagcgtggattatccactctgtctaacgttatacccggaggcaccatgaacctcagacaacagcaacagcaggcgttcgatcgcagcggagaacctcttatcgtcggcaacgtcagccactgcccgctgccgccggagaccctcgccgcactgggccccgattccccctatgtggtgcaggtatacggctcaggcctgaccggcgaggtttatcgtctgcgcatcgccggcaaggagtacaatttaaagaaacgtcgcgccgtcgccggcgttgccaacctcaacggccagctgtcgtttttaaatgaggtacagcgtcggcaagcattgcaacagctgaaggatgacccggtcaccacgccgcgcttcacccacatcgtcccaacgctgtatgccgattatcgcctcggcatcctgctctccccctggatcgagggcgagccgatacaccagttaaccccgtcgctgatcgcccagctatttactactctggaagcctgcgaagagcaggggctgatggagtgggatctctgtagcgggaatctgctggtggaccggcaggagcagctgtggctgttcgattttggctatatgtatcccttcgacccgctgagagaattcaacagcaatggtctggccgacccgctgttccactttgtcgaacgttttgagactcgcttcttttttagctggctgatgacccggatccctgacgccgaacagcagctggcgcaatatcgcgagatgaagcggctggcggtcgaaagctaccgccggaagctggtctggcttcgcgcccggcgcgctgacccgctggtgctggctcactttcagcagttgacggcgcgctgggagtcagcgctggcggaccctgccgcgctgagccggctgtttgccgtagaggcctttcgctcacatgtgctggatattgaagacgacctgcatggtcagtcctgtaccttactcaccctgcaacgcattgactgggtgataaaccagctggaacagcattatcgctttatcgccgacgaaggcggcctgttttacgataacgaagggaaatcgcagcaggcgctgctcagcagctatgcgcagaagcggcagcaggcgcagcagtacctgttgagtgccaccgccgcaaaggattaacggcgctcgcgtccctgcttctgcttcgcctggtacatcaggcggtcagcggtggccaccagcgcgttgagactgggatggctggcgggatcatattcgacgcagccccaggagaacgccagctgccagggattggccgcctgctggttgaaacgcgccacgttgtggctgagcgtctccatcgccgtcgcggcatcgtggcggctggtattggcgaacagaatgataaattcgtccccaccctgcctcgcgaggatatcggactcgcggaaggccgctttcatcaagtcggcgatggcgatcagcgcgcgatcgccctcttcatgcccccaggtatcattgatgtgcttgaagcgatcgaggtcgacaaacgccaggctcaccggctcatggcggcgctgggccgtcagcagggcatactctgccagggtgaggaatccccggcgattaaacagtcccgtcagctcatcctaggttgccgcatccagcaccttgaactcatcctccacgatcgccgccagatcgcttaagatctgcatttcatgggcggaaaacgatcgcggctggtgatccatcaggcagaacgacccgacggtcgcgccatccggcagttgcaccggatacccggcgtaaaagcggataaacggcgcctcaatgaccagcgggttatcgtgaaagcgctcgtcctgctgcatgtcgttgacgataagcgggtcggtttgcagaatggtatgggcgcaaaatgaaatatctctcggcaccgtgtccacatcgagaccggcacaggacttgatatgcaggagatcttcccccaccagactgatggacgccaccggcaggttatacagcgaacgggcaagcctggtcaggcgatcgaagcgttcttcttttccgctattcaacagcccggaagagcgtagcgattgcaggcgacgctgctcgtcgggatgaagtccggctaatttcattgtctctcacttggctcttgcgcagaattccgccgggtttccgcagagaaacccggcgttttatcctgcgaggggaaaatagtcgtcaggtaccccatgagttaagcagatttcctctgcacgtcaaccggcgcgccccaggcgactggcgcccagggcgctggcggaatgccattaacggcactctgcccggcaaagagggcagatcaggcgcggataaacgccagcagatcggcgttgatagtatcggcgtgggaggtatgcatcccgtgcgggaagccaggataaattttcagctggctgttcggcagcagcttgtcctgcaggatggccgcatttttataggggaccacctggtcgtcatctccctgcatcaccagcaccggcaaagtgatcgacttaaggtcttccgtctggtcggtctctgaaaacgccttaatgccttcataatgggctttggcgctgccgatcatcccctgtcgccaccagttctggatcgtcccctgggatatctctgctccatcacgattgaagccatagaacgggccagaggcgacgtcgagatagaactgggcgcggttcgccgccagcgctttgcggaaaccgtcaaacacctcgatcggcgtcccgcccggattctgctcggttttcaccattagcggcgggacggcgctaattaacaccgccttcgccacccgcccctgcggctgaccatagcgggcgacgtagcgtgcgacctggccgccgccggtggagtgcccgacgtggaccgcattgtgcagatccagatgttccaccaccgccgaaacgtccgccgcgtaatggtccatatcgtgcccctcgctaacctgatcggagcggccatgaccccgacgatcgatagcgatgacccggaacccttcggcaaggaaaaataacatctggttatcccagtcgtcagcgcttaacggccagccgtgatgaaagacaatcggctgagcttcctttggtccccagtctttaaagtaaatgttgacgccgtcttgggtggtgacaaatgccatattacagactcctctttcaggataaccagcccgcaggcccgtgcctgggctgaacgccgacggcggccggcaggagtgccgaccgcacaggaatgtgatgcctgtaacagtgtagaagatatttaacgccgggcgggacaacttaccctgtctcgcttgattcgccgatcctggaccagaccgcgtctggtatcaggccgcactctcctgctggcggatccgcaccatcagcgcgccgagcagcgcccagtcaagcagcacggcgaaggcaaagcagacgccatggcgtcctcctcccgcagtatgccaggtcagcagcgtcgccgcgatggcgatagctacgctcagcaccgtggcgccgctgacccgcatccccggcagcgccgtcctacccgccgcaatgcgccaggcgacagccgctcccgccccaccgcacgccacgcccggcagcagtgccggccagtcctgcccgccataccaggccaccagcgccagcagccagccggccgctgacagcagaaaggcccagcgcgtcgccgccaggggtgagcgataaagccaggattgtccgcgagtgaatccccacccgacgccaaaggccgcaatcagcgccgtcagcagactcagcgtgccggtcaccccgataaccgggggcatgattaacagcaaggccccggcggcgatgaccacgctaagggcgatagcgcggccgcgggggtcgatcgttgccgcggcttccgcggcggtgtagcggcttacaacgtgcatagttgactcctgacaggcgaagctgcatgaatttaattcatgtcattgtctttacatgcccgtagcctatcgccactatattgccttacacaaacgcatagttttcagccatagatgagaaaaactcagccatgagaccaccccgtctgccgccgctgggggcgctacgcgcttttcatgccgtcgcccgccaccgcagttttaaacaggccgccgaggcgctcggcgtcagcgcgacggcggtcagccatcagattaaactgctggagtcggtgctggagtgccgggtctgcgaacgcagcgcgcagggcgtcagtctgaccgctgatggcgagatcctttacgccgccacccaacgcgcctttagcgccctggaacaggccgtcgtccagatcgctcatgcccgtcagccgccatccttaaccgtcaccaccacctccaattttctcacccactggctggtgccgcggctagcggatttcaccgcccgctttccggctatcgacctgcggctacacaccagcgtcgaacgagtggatctgcatctgggcacggtagacgccgcgattcgctatcgtgaaacgccggagccggacctgtactgcacgctgctgtatgaggatcgctttatcgtggtcgccagcccgactctgggcctcagccggcctgaagatctgcagcgggtgacgctgtttcacgttgccaaccggcgcgtgccagctgattcgccgagctgggagaactggcgtcggcgctatggaccgccgacgctgaatattgatgcggggttaacctttagcgatgagacccatgccctgcaggcggcggtggccggtcagggagtggtgatcgccagcgaactgctggcgcgggatctgctgcagcgcggcgtattatccgcgccgttcagcaacgcattgcctggcgcccgctactacctggtcactaccgaagcggtagcgcagcgggcggatattatcgctctgcgggagtggctgctcagccagatggcgtcgggcgacggcggccatccgactgcgggatagcgggcttaccagccgcagacgttggtctcttcatcggactcgtaaccgcgaacgatattgatcagatccttcaccgcatcagccgcggtgagtgggtcgcgcagtgccgccagcgaggaaaaggttttatcaaccgagacgccgttattattattggtgaccgtcaacagaaactccccctcttccctgtcgtccggcaacttgctcagcaggtcattaacggcctccaccgcctgctgtggaatatacaacaccattggtttgagaaatattttttcctgcttctggtgaagtcggccattctctagcgctaaggtataacctttattttcactggtcatctcttgttatccctcgatgagaatttttggatcaacataaaagtcgacattaaaaaccgtgtcctctgagagggcctcaatacagtgccacttctccggcggaaagacgccaaactggccggcttcaatagtcagggtttcaacgggctcggggctggtttcatcggcatagccgagatagcggatcgccccctgcatcaccgagagacgagggtagacgccctgccgggtgccggcatccagatggcggcgccagatagaggccggggcggtctctttggtccacagcggcgtgctgcgggtgtgaacgtaatgggtgggaataatgattcgctgcatgattgtgcctcactttaccgtctcaaacgcgacgttcagaaatagcctatatgatgcatatcatataccccttttaaacgttaaggatattattttgttgtggaattttacgcctactcctttttatacctcgcagggattagcgctaagagaaaataaaaaaggcgatttcaggatcctgaaatcgcccggagaataaaaataaacgcgttaaaaatttgttagcgcagcggactcggtttgccgattaaatatccctgaaccaggtcacagcccagcgcctgcagcgaagccaactgctcttcggtctctacaccttccgccacaatgcgcatatgcaggctctttcccatgctgataatcaggcggacgatatccagatcgtctttttgctccggaatattgatgacaaacgagcggtcgattttaattttatcgaacgggaagtagcttaaacgggacagggaagaatagccggtaccaaagtcatcgatggagatctgaatgcccagctcgcgcagctggctgagaatttccagcgaacgggtgttctcattgaatacgtccgactcggtgatctccagatcaagacgtcgcggatcgaggccggtctgatgcagcacctcgataatggtgtcggtcagcgatgtattcatcaactgaattggtgaaacgttgaccgagaccttcagcggcgtcgcccagctggccgcttcggcacaggcggttttcagcacccattcgccaagggcattaataagaccgattttctctgccaccggaataaacaccgtcggcggcacggcgccacgcaccggatggaaccagcgaaccagcgcttcatagccgtagatttcgcgcgtgacggtatcggcgatcggctgatagtagactttgaattcgtcatgggccagggcctgcagcagatcgtcttcaaacgatttgttctcctgcaggcgctgcagcatccccggccggaagatttgcacatggccgctaccctcttttttcgcctcatacagcgcgaggtcggcgcacttgtacagataatcggtacggctttcaccgtcagagatcacgatcccaatgcaggcgtcgatattaatctgcgcatcgtagatctgatagggctggctgatcttctcccggataacattggcccgctcaagggccatctcctcagtgagatcgtaggagagcatcgcaaactcatcaccgccaaggcgatacagcgtctcggaggttttgcggaaaaaagagaggcgactggccagatcctgcagcagcttatcgccagcatcatggccaagggtatcgttcacatccttaaagctgtcgaggtcgaaaagcatcaccacggcgcatcccttatacggacgcacctggttgacgatctcctgcagccgctgccagaaagagagacggttgggcataccggtcagcgaatcatggtaggcatcgtactgcagccggcggttctgcacctgcagcttctctttcgaggcctgcagatcgttggccagcgttttcatacgaacatgggcgcgacgcagattattattctgtcggagcatcagcagaccgagagttatacacatggcgatcagcagaatggagatcaccgagtagatataatagagatgctggattttatcatgggtgatattaacgatattgatatcttgcgtcagggtggcggcggccattgaggtcagcggaccatccagctcgcttaacaccggcaggatctgtctgacctgctccggcgtcatggtatcaacttgtttatcgagcagatgaagattacgaatcagcgtcgcaaccaccgtcttccgctgctcgcttttattgataaatttacccagatcgccctcctgcagaagctcgatctggctcatcatgatctcaagacgcaggcgcacctcatcgtggtccgccccttcggccccaatcgccattcccgccagacgagactccagccgcatatattccgacaccatctgcgacattgactacgagtccgtatagcgggtaaatttttgcaactcactttgtcgctcatgcaccagataagtaatatatccggtgacaacaaataacgacaaaataatagccgtgagtattcgattcaagatccaacccttattctataatcatctttgaaacttgccaggccgatcgggaataatagatctggttctgtaattcagcactgctgtcgtaagggtagacaataaataacgggcctttatcacgaatgcgcatatattgaccgttcatttttaacgccataatgaccgggaatttataaaaatcatcaatcgggataatggtggtgtagtcgttcagcgccagcacgcgggccgatgtgcctttcgcgccgactaaatccatgagtttactaaggggaataccgtcaaaacgaaccttgccggtgtaccagggggtggtggtttctatcgtcttcatccccagtttttccagcattgcgagatcaaaaacggccttgtcgccgacattcatatttccgatttttccggaaatggtcagtacaggttttcctgtcggcgcaggcagtttttcagcataagcagaaggcaacatgacagaacaaaataaaactgcaagaagtagacgcattttactcaccattccagagagggagacacgttaagtgtaaaccatttacgtcgattcttaaaaggtgtccatctttgttatccgttgatttaattaaaagtataagctggatggcaaattgccagaatgttaagtccagggtgtgatttcgaccgtctttcccatcgattcttttttgcgccatctcccccgcttagcaggcaaactactttcctccacggccgctgcgcggtagtctcagagcagacgcaacggtaaaagcgtctcattccaataacaatgaagtacgtgactgacaggacagggtatggattcaacaataagcgtgcagcccggcgaggcgccagattcactacatcgggcccggcgggcggcctggggtagttttgccggcgcggtggtcgactggtacgattttcttctctatggcattaccgccgcgctggtgttcaaccgcgaatttttcccgcaaatcggcccggcgatgggaacgcttgccgcctttgccaccttcggcgttgggtttctttttcgcccgctcggcggaattatttttggccacttcggcgatcgcctcgggcggaaacggatgctgatgatgaccgtctggatgatgggtatcgccactgcctgcatcggcctgctcccctcgttcaaccagatcggctggtgggcgccggtgctgctggtgttcctgcgagcggttcagggattcgccgtcggcggcgaatggggcggcgcggcgctgctctcggtggagaatgccccgcaggggaaaaaagccttttacagcagtggggtgcaggtgggctacggcgtcggcctcctgctctctaccgggctggtatcgctgattagcagcctgaccagcgaccagcagttcctcagctggggctggcgcgtaccgttcctgttcagcgtggtgctggtccttattgcgctgtggatccgtaacggcatggcggaatcgcaggagtttgaagcgcagcagagccaggacaacgcgccgcagatgaaaaagcggctaccggtagtggaagcgctgcttcgccatccgggagcatttttactgattatcgccctgcggctgtgtgaactgctgacgatgtatatcgtcaccgccttcgccctcaactactccacgcaaaacctcggcctgccgcgcgagctgtttctcaacattggcctgctggtgggcggtcttagctgcctgactatcccctgcttcgcctggctggcagaccgctttggccgtcgacggatctatatcaccggggcgctgatcggcactttgagcggtttcccgttctttatggcgctagagagtcagtccgttttctggatcctgttcttcgccctgatgctggccaatatcgcccatgatatggtggtctgcgtccagcagccgatgtttaccgagctgttcggcgccagctatcgctatagcggcgccggcgtcggctaccaggtggcgagcgtggtcggcggcggctttaccccgtttattgccgcggcgctggtcactttctccggcggatcgtggcacagcgtggccctctatctgaccgcaggatgcctgctgtcagcgctcaccgcgctgctgatgaaaaagcaccccgtcgactgacccaccagcggagggcgtaacccgtgccctccggtaaggagaatacatgtctcagttaaccctggccgactgctggcctcgccgtttttccccctcttcgctggcgctgcagttttgcgaggatcccacccaggcggaacagccgctgtttgccaaagccagcgccggcgaggccgtcgcccagctctggcaggcgccgcagggattggtggtgccggggagctatcgtcagtttacggatctgccggcggtcagcgcgcattttgccgcgcgcggctggccggtatggcttcgccgctccggcggcggtctggtgccccaggggccgggcattatcaaccttagcctcgcctggccggtgcagcagccgctcggcgaagccgccgaaccgatctatcattcgctgtgcgctgtgctgcagcgcaccctcgcgcgcttcggcgttgccagccacgcccgggcggtgagcggttccttttgcgatggacggtataatcttgcctgcggagaaggcgcggaggcgcgcaagattgtcggtaccgcccagtactggcggccgctggcggcgggcggcggccacgtggtgctggcccatgcggtgatccttattgacgccgatctgagcgcggcgcatcaggcggcgaacgccttcgaagcgcagctcggcagcgagcgggtctattgcgctgacaagaccgttactctcgcgcagctgcttaccggcgagcgccatctgctgccccgctttagcgaggcgctggcgcaggagctggacgcgtctcgctgaaggtcgctttcaggtagcggctgaaggtttccaccgcgcgcgacacgcgcggggtatagggccggatgacgtacagccgatcggcaaacacatctactggctgccacgccggcagcagctcctgcaccagcccgcggccaatggcctcccgggcgctgaaatccggcaacagcgccaccccaagccccgccagcaccgcatcacgtagcgactcgctgttattggtggcgaatggcccctgcacgttgatggtcacccgagcatcgggcgactgacgggaggcgaacgtccactgcgggcgctgtggcccacggggataggtcaggcattggtggtggcgcagatcttcgggggtctccgggcggccatggcggcgaatatagtcggcggacgcgacggtaagcgtcgcggtgtgacacagcggccaggcgacgtgggtatcggggagcgcctcgcgccgacagtggcggatggcgagatcgaacccttcgctggccagagagaccagccggtcggtgacctcaagctgcagatgcagttggggatgctgatgcaaaaaaggcgcgattgccgggaccagctgctggcgggaaaaggccaccggcgcggtcaggcgcagcgttccccgcagcggcccgccctcatcgcaggcgccggtgaaaatatcccgcagctgaccaaacggctcgttgagctccgccaccagccgcagtccgtcgtcgctgaggctcacgctgcgggtggtgcgatggacgagggttttaccggtcacccgctccagctcgctgattttctggctgatagccgacttgctgatccccagcttttccgcggcccgggtatagcttttttgttcttccagcaccgtcagccagtacagatggggccagtaactctccggacgactctcgctcatgtgattgttcaccagtaaaaacaatgtattcaactatagcggtttttgccggcggcggcatcggctagcatcttgttgagcccatcattattccctaacgataaggagcacctgcatgccattactgacatttgacctgattgaaggccgtacggaacaggaggtcaaaaccctgctggatgccgcccatcgcgccgtgctgcgcgccttcgaggtaccagaacgcgaccgttaccagattgttcatgaaaacaaagcccaccatatggtgattgaagataccggcctcggattgacccgcacgcgggatctggtggtggtgcgggtctataccagcccgcgcagcgaggcgcagaagcagcgcttcttcgccattttgcaggaggagctggcggaacactgcggcctgagcggcgatgatctgatggtgtcgattatcagtaaccagaaaggcgactggagctttggccgcggggtcgcgcagtatcttaccggcgatctgtaacccgcagcccactgtacgcccttagcggcgggctgccgtcgcgatacgctgccgcgcctgctgctcgatattctccagcaactcctggacatcgtcttcatcaatgtcgaggaactggccttccagcagcgcggcgtgaatatcttcccgggtgaccgaaatacccagcggcaccgccctggatttgacctcctccgccgccagcggatgcggataacggcggccaaccaggttattaaacacaatagccagcagcgccagcatcagcgagttgaggagcaccggggtcagcacaaagtgatagccttcgctgtgcaccccggcgccgccgaggatcgccgtcagggccaccgcgccgccggggggatgcagacagcgcagaaaatacatcccggcgatggccagagccgccgccagaccgcaggccagcgccgcatcggggaccagcataccgaccgtgacgccgatcagcgccgacagcacgttgccgccgacaatcgaccacggctgcgccagcgggctgctcggtacgccaaacaggagtaccgccgaggcccccatcggggcaataaaccacagattgacttcgccgagcagccagtggctgaacatgctggtcaccgccagtccggtgccggcgccaatggatcccagcacgatatgccggcgggccaccggcagcgcgtgcggcttcaggcggccaaggaaaatccgcagccgtgaaaacatccccgcaggaataacactcaacatcgcttcatcgctcaaatcatagaaattacttatattttattttctttttttaaccttaaattaacaaccctgtctttcgcaggggatagcgcgcgcggcgatgtccgacggcattgtgctgtgaattctcgcgggggctgatagaatcccttttcggtcagggggataccccttttgcgaattgaaggtcataacccagtgaataataaaatctctttagcgaaagaagtggcatgggccagccagaatatgccgcgtaccctgcgtcaggtcgccgcgctgcccgacctcagcggcgtgcgtctggcctgctgtatgcacctcgacatgaaaatgatcccgctggtgcaggggatcctcgacaagggcgctcaggtctttttaatcacctgtaaccccaccaccgtgcaggacgacgtggtggcctggctggtggagcgcggcgccgaggcctgcgcgtggcgcaatatgagcgatgccgactggcaacagtcatgggaaaaagcgattgcctggcagcccactcacctgtgcgagatgggcgccgatatcaccaccctgctccaccagcgcggcgagtttgggaacatcgtggcgggtctggaagccaccggctcgggcgtcaatcggctgggggatattcagccaggctatccgatctttaactgggacgatctgccggtcaaagaggggctgcacaaccgccatatggtcggtctcactgcctggcacaccttcttccagaccactcacctcaccctgcatgagaaaaaagtgctggtgatcggctacggcctggtcggccagggcgtcgcggcggcggcaaaagcttttggcggtcaggtgatggtggcggagatcgatcctgcccgccgtctgcaggcggcctacgacggctggcacgtggtggacctccaggaggctatcgcctcggcggacgtggtggccacggcgacaggcggtaaaaacgtggttaatcgccaggcgctggaccgcgcgaaagcgggagtatttatccttaacgtcggccacgtggcggaagagatcgacggcgattacctgcgccagcacccccaggaagaggtgatgccgtatatcaatgcctaccgcatggccgacaaaaccgtctatctgctggccaatggttcgatgctcaatctgaccgctggcttcggcgatagcctgaacgcctttgacgtcaccctggcggtgatggccagcggcatccgccatattgtcactgagggcatgcgcgccccggcgaaggtttatctcctgccccaggcggtctggcagcaagccctgtaaacccggcgcatcgcccccatcgcgggacgatgcgttttaccatcaggacgacggcgcgctatcgggcaacacaatattgctctgcgccagcgttcccatctggttgtacatcacgctggcggcatccagcaggtgcatcgccagcgcggcgccgctgccctctcccaggcgcatgtccatatcgagatacggccgcagacccagcgcgtcgagggcgatctgcgctcctttctccgccgacaggtgtgaaggaataagataagggtgcgccgaaggggccatgcggcaggcggccagggcagaggcataggagaggaagccatccagcaccaccggcaggccacaggaggccgccccgaggatcaccccggtcatgcccaccagatcgtaaccccccaccttcgccaggacatccagcccgtccgccgggttcggctgattatgggctatcgcctggcgcaccaccgccaccttatggccccgctgcgccagcggcagattggccccacagcccaccaccgcgtcagggtcgctgcccgtcaggacactgatcgtcgctgcggccggggtggtattggccattcccaattcgccgacgccgaaggctttcaccccgtcggcagcgagctggcgggtgagatgcatgctggccagcagcaccgtctccgcctgctggcggctcatggccgccgtccgggcgatattcccgctaccgcgggccaccttgaggttaatcaggcccggcagcgggtcggcatcgatgccgacatccactacctgcaccctggccccggcctgcgccgccagcacgcagacgccggtgttgccccgcaccatattgccggcatgaatggccgtcaccacctgcggcgaaggggtcacgccttcatgccagacgccatggtcggcgcacatgaccacaatcgctttctccgccagcgccagctgcccctgcaagccaggcagaccggccagctgcaccgccagcgtctccagacggccaaggctgccgggcggctttaacaggccatcaatatgctgctgagcgcgcgccatggccgccacatcgggctgcggaatggcagccagtaacgccgaaagtgtttccattctgttcctcaccgttggcgtcaggccttacagcagcgccagtaaaaagagtaattcgcccagctcaatcgccgccccgagggtatctccggtctgcccgccgagggttcgcttcagcgcccatcccagaccccagatcagcaccagggtgatcagcgcggcgcgcagcccctgcagccccagcagggcggtggccagcgcgatcgccatcgccatcgtcaccagcgtctgctgcaggctaattttgccgataaacagattgcccagccccttttcccgcgcatagcgatgacgatacatcagcagcaccgccatcccgcgaccgacggcgcaggccgccgccagggctgcgatggggtggatatcacgcagcagcagctcgccaaccaccagcactttcgccaccagcacgaagatcagcgccagcccgccgtgggtgcccagccggctgtcgcgcatgatctccagcatccgatcgcgggtgcgggcggagaaaatgccgtcgcaggtatcagccagcccgtcaaggtggaatccgccggtgagcagcgccagcgccagcacgccgaacagcgccgccagcgggacgccgcaccacggctgcaggaggagcgccaccgcgccggcgatggcgccgagcagtaaaccgaccagcggaaaggtgacgatactgcgctggtactgttcgatctccaggccctgagataaccgcgccgggaccggcaggcggctgataaacgagagtgcagcaaagaatgacttaatcacgtgaggttgactcctgtcggcgaaagcagcggaagagttctgtcgcgcccggtcagcacctgagtttgtcttctggcgaatcgatcgtcggagaggtgagaggtgttgagatatcgccctgacgccgctgcgtcagatgcccggccaggatgagagaaacctttccgatatcaatacgtttttcgcgggccagtatagcaaagtgtcggtgaggagaggcagttgccggaacaaagttttcgcagaaaaaagcagggaagagagggaaacgcggaacagcccggcgacgctgaccgccgccggaccggcagggtttagccttcgactttggcttcgcccatcactttcagttttttcgagatgtcgcggcgctctttggacagctcggcatttttgatgatgtaatcatcaacgcgatcttcgtaatcgctcttcatgctggcgatgatgccctggatggcttccacgctcatgcccggtttgatgtagtcgctgaggttgtccagcagcagaacgcgcttctggttatcacggatctttttctcaacgtcctgaatttcacgctgcagtttgttcttacgacggtacagacgaacaaactccagtacgtcctggaaagaaggcttagttgtttccatttttacacccctaataattgagattcggattcgtaaagcgactgcgttatagggctaacataactgctagcagccgctgatgacaatgttttttcctttgcgtttatcataaccctaaacgctgctgaatcgaaacaacccatgtggttacccggtgcatctgatgtttatttgcgcaacgcgcggcagatcagatgcgagagcagctccagctggcgcgccagttcgattgagagccaaacatagccatggaccggggtttccgccaggccgtcatcaccctgctctttcagcagctggcgcagttcgaggacgatctcagtcagcttttcattgttggcgcgcacaggctgagggttcccttcgtacagcgcgtgggcgatggacaacagcgtctgctgggtcatctgctgcgtctcccgcagggtgtgcgcattgagcatcacgaagtgacccggacgcgttgcccaccaggcgtttatctgcagctccagcatgcagacgaggttgcggctgacggtctggatagcctcgaagatcgccttctggatgtgcgtctctttgctggcgggggtgatcagcccgcgcattttaaccacgtcattcagcgcctgctggagatgcttttccagccgcggtcgatccaccagatttggcgagaagccggcctggtagaggcggttaaagttggtgacatagctggccatctggatgcgccagtggatgaacgcccgctgcggccagatgccggtaaacagcatcgccagcagcgagccgaagatcacatcgccgcttcgccacagcgcggtatgcatatcgccgggcggcgccccgaccaccaccgacagagtaatgccgatcagcagcgcctgatagggtttcttgcccagcgccagccagccgcagaggaacatcgccgccgcggaccagaggaccatcagcggcagggagatgagctcaagcttcagcgccaccagccccagcgccgaaccgaggatcgtgccgccgatacgctgaaacgcccgcggcacgacgttaccccagaaggagatcggccccatcaccaccaccagagtgatgagaggccaggttccctcaggcacgttcagcagccgcaccagcaaaaaagtgagcacaaaggccagcgcaatccgcacaccatgcaccacccgataatggcgatacaagcggatctcaaatggcttgagtgatttatcagcgcgctcaaccctctccggcaaaacgaaaaggccaattgtaactgctttttcgcccggagcatgccgggaatgtaaaaaaccttgtccgaaacaggggtaaaccgctacgacgcgacgcgctcaacgggaacatacatgtcgatatcccagtagccgtcgtggttgccgtcgttaagatagacctcaaagcagggctggggggcgatgcgatacgccgtgctctgctgcaggctgtcaaaaaactgcatccacggggtggcgaagtcgtaatccaccacccgcgcgcgggcgcaggcgtaatccccgccggcaatcgccgccaggatcaccccttcgctgttggcgggaatgacataatcctcatccacggtgaccgccgtcgcgcagcgcagtttttccgccggcacttcctccgggttatcgtagtagacggccacccattcgcgggcgggcacctggtggttctcaacccacatcatcagttgctcaaacccctgcttgacggtgtgatcccagggcccgaccagatggaaaccggcgatggttttcttgccgagggtggtgatgctgtagttcatcttgcctcctttggagataaattactgtatgaatatacagttaatttaacaggagatcccccctcagtatgtgcgcgaattcacagagtcgccaccacactgctgtaaaaacaggcgccccgccagcacgagcgacagacgaaaaaaaaccgcctgcaaagaggcggttggcgtggttacagctcgtgatgcaggtaatcgctcattcgcgagaacactccgcctttattgatgctttcgagggtgaccagcggatagtgccccaccaccttgtcgccgtcatacagtgaaatctcgccaacccgctgattggcggcgatcggcgcctcaagatccttcttatccagcacatatttcgctttaatgcgcgacacttccgccttcggcagggctaaccagaaatcctgatcggtgccgagcttaatctgctctttatcgccgtaccagatacgctcggtgccgaccttctgccccttctgcagcacctgcacggtgtcgaagttctgctgcccccagtgcagcagtttagcggcctgctgctcgcggcctttcggactgtccgcccccatcaccacggcgatcagccggcgctggccatccaccgccgaggcgatcaggttgaacccggcgcccgaggtgtggccggttttcaggccatcgacgttcatggttttatcccacagcagaccgttacggttttgctgggtgatcccgttccacgtcaggcttttctggctgtacatgtggtagacgtctggttcgccatgaataatcgcccgcgagagcaccgcgaggtcataggccgaactgtgctggcccggggcgtcgaggccgtggacggtttcgaaatgggtgtcccgcaggtgcagtttttcgacatactgattcatcagggcgacaaactgcggctggccgccagcgacatagtcggccagcgcgacgcaggcgtcgttaccggagtcgacaatcagcccacggctgaggtcgcggacgctgacgcgatcccctggctttaagaacatcagcgatgacccgtcgaacaccgggttgcccttcgcccaggcgtctttacccacggtgacgatgtcgtcaaaggtgatacgatggctgtcgatggcgcggtcgaccacgtagccggtcatcagtttggtcagactggcaggattgcgctgctgatgttcgttacccgcggtcaggacctgaccggtggtgtaatccatcagcacccaggagccagcctgaatggaaggcggcgcgaccgtagcaggtaagtcgacggcaaatgcgcaggaaacgctcgaagcgagcaaagatacagcaataaacaaacggcctttcaacggcatatcctctagatttacagatccgccgtcctttttacggaacttcgcgtttcatatcagggtttaattgcaagaaaatatgacacagcagaggaagttgcttgccgcgccccttctgatgaccgggcaaatcgtttaccataccggtcgcacgccaccacggataatgaacagactatgcaagatagcgtcaaccagcccggatctatatccacgactactaacatcaaaatgtaatacattgatttaaatatacttataaaaacaaaacattagctaatgtactaacttatgtactcgtatttctattcagtcgcgcgataccacgattgccaacgataaatgttcgtacgcagctcgcgcacgcattccgccgtctgcgtgtccgcctgcagatcggcgtcactatcggcgccagcgtcacttattctgcacggctggttcatcaaatccggggatggtgttggccgcgtcgattgctcgctggcgcagctgcacagcagcaggatcaaattcgcacacagtatgattcgggtcgttgacatatttcaccacatcacgataaacggtacggtaaaccactttggcttcagcgttcgccgtcgccgccttcttctcgccagctgctaccgccttctcctgcttcggcagcctttctttagccaggctgtttacgtgctcagaatgcgcgtaccagcccttcagatatcccgcccagaaaatgccggcgcacaccgccagcactccccccacaatcaccagtttcgtttttccgttcattcgtacagcccccagcacgtcagcgcgctttcctgatcccggcgttcaacctgcccgtaacagccgttcttctgtcctttcgttaaccggcaatcccggccgccgtcgaatacccatcggcggatttcagcgcatgcccctttacggtcgccggcattcagcttgcggtagaacgttgaggggaagcacttaccgggcccgatgttgtacgggcagaaactggcaatgccgactttctgcggaggtgtgagcggcacgtgcacgttcttttcaacccacgccagcgccttatcgcgctcgatggcgttaacctggccgcactttgcctgcgtcagccgcataccttgaatgacgggcctaccgtccacacgcgtggccccgcggcaaatggtccagatgccagagccgtctttataggcggtgagactgctcccctctttctcagtcagaaactggtccatcaacaccggcgctgacgcgccagcggccagaagcgccagcatcgcggcgctgaacttagctttgttgctcatagtcgcgcgcctttcgccggtcatcttttattttgaaataaaggttggtgaagtaggtcagcagaccgaaaacgatactggcaagaacgccgatcgccgcccactggctggggctgactttatcgaggagctggagcagccagtaaccaccgctgccaatagatgtgacgtaggaggctcctgccgctacgtctgaaaggttgttcattcgcatgccttacccccgcggggttcactgtgtagtgaagcgagggtaaggcgttaatcaggtcggaatcctgaccttatgaaacgggaagagggaaatccgcaacctgataagcattcgaagctgcgtaatctttatcgaccacttgtttagcgtcaccggataccacaacgccgaaaataacgccgtccacatcaaacagatgtgtcacggatccgtcaatttcgttctctattttgagattggataaatatttaatagccattatttcaccaccttaaaccagatactgtttagccagttctacggattgagagatgatatccgtcgcaacggtatctttcccggtaaggttcatcaccatcggtcggcctaccttcatgccgttccacggactgtggatggtcgcaggataactaccaatacgcggaagattagtaggctctggcacaaccccatcccatgcgttatttgtggccgtagccaccaggatgttatcgacataaatacgcgtgatcagcgtaccaggtgtcgtttcgccatcagcatatacggaaacaacatgtacgcctccattggtgagtaatgcgagttgcgccgtagccgaaacagcaacactgcccatcgcagccccctgcacagaagtgagcacaccggcagtgctgacaatcccccacacgccgaaattaatgtttcctgcggctgtgttattcatccggccaaggaacatcgggtaacgtgtggctgctggcgttccataaccagacgcgggcagttttaatgcaacactaaccagcgcacgtttacatccagcgggtaaagaaaactcatctgttggcagcagcgcataatcggtggtgctgggttcggtgccgtcaaatttcagcatgcccccttccagtactcgtggcgcagggccatttgttgcattcgacccgttatgcaccagatttttcatatttgcatatgcagctaccggagaaccggctgagtaacactgatcattactgaaatccaaaagaccaagcgtctggctgcggataataattgaatctttttcaagatacatggggttattgccgctttgttttggcgacgcatccgatacaacaaaaatacccatattaataacctcgtctctgtcggaactcataagccacagatgcgtatatcccgtagcccacagtgttaggatgcctgtcatcaatgcgcagtgataaaggcgttatatcgtggccgtaatcgataacatcctgggctattgcaggattataattagcaaccaacgtttcgcgcaggtccaggccgtcattgccacgcgcgtaataatttggatatttttgtgaccagtggttattcaattccaaaatacgcgtataccggatgccgcccagaaattcagtggaatagttatccgctgtcaaacttagcaaaataatgtttctcccgcttcgttcggcgaaatctaccatcgcgtcaacatttgcacgaattgcctcaacatcatccgttaaatctacatcggtacctgagcgaaaatcatttattcctgcatcaatccacatttcaacgcctgaataatcctgcagtgcataatccggcacgaaaagcgaaccaggcagacaacgcacgccggtaccctccagcgccgtcagcgtatacacctccgttttggtgttgttgttatcgccgctggctgttcgggtgattcggcatttcacgccacataaccagccgtcgatagttctggtgacgttatccagattcagccactgcgcgtttgccggggtcatgccggacatgagcgcagatgccagcatacgggcgctatcggtagccgtgccgtcgagcagcttcgccactttggattttgcgctctgcgcatcgagaaccgtttcggatagccctgcaccgcgcagcgggtaggtgtagtcgtagcactcccgccagacgctttcgtgcacctggcgggccgctttcagagaatcgacacgcttaatcagccgtacggccagttcttccatcggttatgcccctaaggtgtttttcgctgcctgtgcgccggtggacagcagggacgaacctgtatccgttgcaccttcagcaccgctagccagcagcgaggagcctttcttgcgcttcttgcgcgctgctgcgtcggcattcgcggccttcgcagcagcgtcagctgcttcgtcggcctcagcctgcgggtctgactgaacaacttttggtgtactaccacacataaaattctccttagcccggaacgtgccagccgtgttcggttaatacaggtgcgccgcgtaccggctgcggtttaccctcttcgttcgtcaccgttgcgcccgcgctgccggtggtggcctcagtggctttgcgtacgaggttgaggaagtcgaggttgtcggtaaggctttggtcggtaaggtcggagaaacccagcgattcaaagcgcgcgatgatggcggcgccctgctcgttgatggttgcaagaatggcgttgcggttcgcgagtgcgattgcttcggggtcaaccgttggggcttcagaggtcgccagctgctcgccgctaatgccgacgcccgccagcgctgcgccggtggcgtcctgcggctgcgttgtctcctgccccggtagtctcgatggttttcttctgtcgtgccattgtggtggctcctgtggaacgtggagcctagagtgtgcgcgggggtgttggtcggaatcctgaccaaatggataatttgttaaaaaacggcatgatttaacataatgtacgttatcggcaccacgcgatcggcactcgttaccgatttagcttgaagaggttatttgttgcggtttgctggcgggaaagtgtgaaaatcgactgcataaatcgtgcataaaacagggcggtttttgcatagcatttttagtcggtgaacgccctgtttttgcaagttttcattaccggcgggccgttggttctttcggccaaaaattacgggttccgctgcgaacaaaacgacgcctgatgacctgcaccggaagttctgaacgatgccgatgtgtcacttcacaccagaaagcgattagcgcttcccccgtatgatggttggggctgcttccctgcttccagccaatgagcgctgactttgaaacatcaagcccggtggccagttcctgcagcggtatcccggtgttagtgatatcggtcaccactcgcaaccagtccgttttaactgtgacgacgactggcataggtcacctcgcaaaacgcgcgcacgcgcgagcatagagagcggtttttattagcttttgacgtgcgcgcatggtctttactccttgccgttgttgtctggtgcgacgtcgattagcgtattccccttatgctgagcaatcgtaaggtacgagtttcctttgcaggattcacaccaaagcgcaattcgtaatccatgacgcctagagcttgggttaccttttaaattcctgtctgcggtaagcgaatctccttcgatgcgaacatgaagcccctcgttggcatcttccttacagttaaaaacctccacagcgccgtggtgtacgtaattcccaccgcaatgcgggcaaagcagttcaccttgttcgaaatcaatagctaattgcatcgtgttatctcctttttgcttcgtgtgtttagttactactggtaaaatttaatgtgtaccaacctgacccaacctgtaccaacccttttatataaactcccaaaacagcctatataatcacacgcacatataaagtatttggttggtacagttggtacagttggtactgacctttaaattcaattagttaaaatgtaccaacctgttttttgaggctggtacaggttgttacactggctcgaagatacgagtcatttttccatcaacacgacgttgaacgcgcttataaccgcaattttgcaaaacattactgattcgcatttcttcgcgttttccgatgtggcgcggatctaacccaattgcatcgcgcaacacgtcgctagcgcgtaaaaattcgcaatttcgcggaatgtcattagtcatcaggtcgggcgtctcgagccatttctcgaccgtctcgagccacgcgtccttaatggtgtactgctcatggacgcttgcgccgaggcgttcagcatcgcggaactggataccgccgaggcgcttaaacgtctcgcgggcttcagcccacagcagctctctgtcacggactatggcatcggtactaaccatttcgacaacatctaccggcaaccagcggcggttaccggtcttgtccgcaaggaactcgtcttcgttagacgagcccagggggatacctcgccgagcgaatatggtcgtgaattctttaaattttggtacccatttatcatgcgttctggttacccatgctttaatagactcgaggtctttagtgttaaggccccttagttcgcttatctcggccaccaggcatccggtatcggggttcaagctggtaaccggtaagcagggcaatcgtgcatggcgcgatgaagttgaagccgaagagctgctgaaatctttcaggctgaaacaggatcagatgtacagccagaaggtgataagcccgactcaggccgaaaaactgttgaagaaagaaagcccacgccgctggacgaaagtcgaagcgctgataacccgctctgatggtaagcccaccatcgcgccagaatccgacccgcgccccgcgctcaacgttaaccctgtaaacgattttgacgacgtgtccgaagatgcgatcgccgctgacctcatttgatttaaggaacaacaccatgaaattgaaactcaataacgtacgtctggccttccctgctctgttcgaagcgaaaaccgtaaacggcgaaggcgatccgcgcttctcggcggtcttcctgatggacccgaaacacccgcaactcgaagaagttcgcaaaacgcttaaacaggtggcgaaagagaaatggggcgagaagtgggaaaccatctacggccagctggagaaaaagctcaatctctgcctgcacaacggagacgagaaagccgaatatgagggcttcccgggtaatttattcctgaatgcggcgaacaaagcccgccctactgttatcgaccgcgaccgtaccgcactgattcaggccgacggtcgcccgtatgccggctgctacgttaacgccgtggtggatatctgggcgcaggataacaactttggtaagcgcatcaacgcatcactaagcggcgtccagttcctgcgcgatggtgacgctttcgctggcggcggtgtggcaacaccggacgactttgacgatatcagcgaaggtgcagacgccgaaggtctagtttaaagcaaaaaaaacgcccgactgagcgtcgggcttttttacaagactattggaattttctatcaaaatttgattctatgaggtatatgaatgtcaacgttgagaattggtatggaaatccaagagtttgtagggcattacaaaaatcacccagtgcttttcatcggcactggatttagcctaagatatcttcaaaactcattcagttggaatggccttctagagtttatatcctttgaactgactgagaatgaagagttttactatgatttaaaagctgaatctatggtaaatggggagtatagctatgatctattagcaagtaaattggagttagaatttaacaaacgactagccgaagaccgaaaagggaagtttgtaaaaattaatgacatattttatgacagcatgaaagaaggtataaagttaagcagattcaaaatctatttaactcaattactgacccctctgatgataaaacccgaaaagagtaatgaaattgacgcattgattagagcacgaaaaaatataggctctgtaattacaacgaactacgacagattgtgtgaaaaattttttgaatttaacccactaattggcaacgatattttattaagcaatccttatggctccgtatataaaatacatggttgcgtcagtgactctaacaatatcattataacacgtgaagactacgataatttcaataacaaatatgaattaattcgtgcacagttattatctattttcatacataacccgatcatattcattggttatagcattagtgactccaatataaaatcactcttgaagacaattttttcctatgtaaatgtcaatactgcactagcaaaaaaaatccgtgataacttccttttagtggagtatgcgccagacaatcaatcaatagagataaccgaacacgatattgatattgaaggcatggcaacgattagaataaataaaatcaaaaccgataattacacagccatatacgacgcgctgtctaaactcgtactacctgtatcagcaatggatatcagaaaagttcaaaaagtatggaatactataaaaagtggcggtgaaataaaagttaacatcactgaaaatatcgacgaactaaaaaacgaggatatggtgttggctgtcgggtccgagaaaacagtcaaatatgagtttcaaaccaaaactgaaatgattcaaaactattttaaaatagttgatgaagcaaactcccaacttatttcgctcctaaataagcaagtaatatcaacaagagaaaggtttccaatctttgccttttcttcaatttgcgaaaaccttatcaatgtagataagtacaaatcacgacaaatagacaagattatagatgatctaaaaagatatgttagggattgtgaaaacaattatacatcaattactgacataactaacaatctcgcagactggaaagttattggaggaattatgtatgcagtcatggaagataatatctcccttagtgagcttaaaaaatatcttgaagacaacgcaggtcgatgtgataccgatttcaggaagttattatgcctgtatgactatttagcatactgagcacaccacatctcctctcaataaaaaaaccgccaagaggcggttttttatttcatgaagaaaataaaatgtctgaaaccattctctggggcgacctggaaacctattgcgaaatcccgattaccaacggtacccacgcgtacgcggagagcgtcgaggtgatgctgttcgcctgggcgatcggtaacgagccggttaacgtctgggatttaactgctggcgagccaatccccggccctctatttaaagcccttaccgatcccgataccctgctttatttccacaattcacacttcgaccgcacggtgctacgccacacccacccccggctggctccgccggttgagcgctggcgcgacacgatggtgcaggcgctggcgcacagcctgcccggcgcgctgggggcgctctgcgaagtgctgggtgttccgcaggacaaggcgaaggacaaagaaggcaaatcgctgatccagctcttctgtaaacctcgtccgaagaacagcaagctgcgccgcgcaaccagcaaaacgcacccggtagagtggcagcggttcgttgcctacgccgggctggatatcgaggcaatgcgcgaagtctataagcggctgccaaagtggaactatcagggcgctgagctggcgctgtggcatcgcgaccagcagatcaacgaccgaggcgtctgcatggatgtgcagttcgcgcaggcagcgatcgaagccgtggaccttgaacagaagcaactggcaaagcgtacgcaggtaatgaccgacggcgaagtgcaggcggccacacagcgcgatgcgatgattatgcacatcgtcgaatcgtacggcgttgacttgccggatatgcagcgcagcacgctggaacgccgtattgccgaccctgatctgccgtcgccagtgaaagagctgctggctatccgcctgcaggccagcaccacgagcaccagtaagtacaaatcgctgatgaagggtatcagcagcgacggacgtctgcgcggtacgctgcagttttgcggcgcatcgcgaaccgggcgctgggccgggcggctgttccagccccagaacctgccccgcccgacgctcgagcaggaacgtatcgacgagggcattgaggcgcttaaatccggctgcgccgatttgcttttcgataacgtcatggagctgaccagctccgcccttcgcggctgcattatggcgccagcgggtaaaaagcttgtcgtatccgacctgtcgaacatcgaaggccgaaagctggcgtggctggccggtgaggcgtggaagctggacgccttccggcggtatgacgaaggcaccgggcccgatctctacaaactggcctacgcccgcgccttcaacatatcgcacgaagacgtgaccaaataccagcgccagatcggcaaagtgatggagctgggccttggctttggcggtggcgtggcggcgttcctgacctttgcgctggtctacggcctcgatctcgaagagctggcgaccgccgcgctgccgaatatcccgcgcgatgtgcagcgcgaggctaagagctggtatgacgaatcggtgaagcgtaaagcgacatacgggctaactgagcgcgtattcatcgcttgcgattcgcttaagcgcctgtggcgccgggcgcacccggaaacctgcgatttctggttccagctcgaacgcaccgtacgcgccgccatcgctacaccaaagaaaacactctattgcggctatatgaaagtgcgccgcgatggcgcatggctgcgtatccagttgccgtccgggcgcgcactctgctacccgtcgccgtcgattgagaaaggaaatatcacctacatggggatcaattcctactcgcggaaatggcaacggctcaaaacctacggcggaaagctggtcgaaaacgtcacacaggctgccgcccgcgacgttctggccgggaacatgccactgatcgagaacgccggatacagcattgtgctgaccgtgcacgatgaggtgatttgcgaagcgccggactccgacaactacaccgacgccgcgctttcttccctgctctccactaaccccacctgggcgcccgatataccgctgaacgccggcggctttgaagcgcttcattaccgtaaggaatgacccctatggcattcaagtacagagacagtccgctgtattaccggtctgcgcgcgaagccgtgcagctggagcaagcaggcgagttcgaccgcgcggcgaaggtctgggcgaaagccaaccgggaatcgcgcaacgagctcaatcaggaatggagcgaacggcggaatgatttctgcctgatgcagaacatgcgcgaacggcgcaaggcggtggacgatgagttatcgaggtaaggtcttgttgcagctggtattactgttggtgtttctgctcgtatgtttatgggcgttgctggcgtggactatcgcggaggtgttatgacaatcgtgaaaacgcataccgggaccgttatcaccgtcgacggaccgaagaccgtgaaactgagcgagacgaaaactatgtgggtagtcggcaagaatgagtgctaccacaaagaaaccggccgccgccattttgcagagcgtacgcgccggcgtttgctgctcgaatccatccgaccgatcgaggggcccattcatgcccctctggataaaagctgatggcctacgaacgcgagagcattattgaaaagcaccttgccgcggcggtgaaagccgccggcggggttgcctataaattcgtgtcgcccggccgccgttcggttcccgatcgcatcgtgctgctgcccggtggccgtatcgtttttgtggaatgcaaatcaccaggcaaatcaccacgcgccgaccagctgcgcgagcacgaacggctacgcgcactgggctttaacgtggtggtgcttgatagcaaagatctggaggaaatactgatagatactctagcttcagtaaaatactaacgttttttaggtggcggattttcaacctggttcggctgggtttgtcgcggaggctgatagccattgttaaccggcgcccggggtatttcagtcgttcttggcggctgccagccatcttgggcaatacctttattatctttaactgtcataaattactccgttatctcatcacgtaccagacgcaggtgtactggtaatctcaataaactctatactctcaatctcattagtcaaaatgataattccaagcgtatctctcaacttatgatccagatcaccatcggcatctaaggcccaatgatgctcaagatatatttgctctggctcaggagagcttgaggcaaatgattccgaatcatatctacccccatattttttaccattttttagagttacgataacccagctttttttagcttttttaaaataaaagtcccaaggtctgccagttggatggggcataaaacgtgtgaacccacgtcttgttctgatatagattaacaacactggcaatgctattggaagtataaaaaaggtaaacaagtaaaagaagtaataccaaactggatgttttagcattaaattagatgtttctacgtaataaataggcactaatagcaaagcgtaattaacgcaactataagcaattacatctattaacgtttttgaataatcctgcccgggtcttgactgaaatacatcataaaccttcatacttatgaagccgggcatgacaaacaatacaaaaataaaaaacttactcttctcccatatatccatttttccccctgcgtatcgcccagcacgtaaggccacaattatgacgaataactttaaagagtttaaacccagagtatatcaagatctcatcattaaccacgaaattaatatagagcgctgcaacatctgggcgggtatgggtatgggcaaaacggtggcgacgctgaccgcgctggaagatctcttcatgtgcggcgcggaaacccagccggcgctggtcctcgcgccgctgcgcgtggcggccagcacctggccggatgaggctggaaagtggggccacctgcgcaatatcgaggtgcagcccgttgtcggtaccgccaaagcgcgcgctgcagcgctggcaaacagcaacgccagcgtgttcaccatcaactacgacaatctggcggggctggttgaagagctcggcggtcgctggccgttcggtaccgtcagcccggatgagagcacccggctaaaatcgttccggctgcgcggcgggggtaagcgagctgcagcactcggtaaagtggcgcataagcacgtgcgccgctggatgaaccttaccggtacaccagcgccgaatggcctggttgatttgtgggggcaagcgtggttcgttgatcaggggcaacgcctcgggcgcacgtacggcgcgtttacctcccgctggtttaactcgatacaatttcccggccagagctggacaaagctggagccgttcgcgcattcgcaggacgaaatacagcgcgcactcgccgatgtgactatctcgctcgacgccgccgactggttcgatatcaaagagccaatccataatgtgatccgcgtggacatgccgccgaaggcacgccagcagtatcgcgagatggaaaaagaaatgttcctcgagctgaacggcgaaggcatcgaagcgccaaacgcggcggccaaaaccgttaagtgcctgcaaattgccagcggcgcggtgtacaccgacgacgcggggagctgggcggagttgcacgacgcaaagctgcaggcgctggacagcatactcaccgaagcagctggcgcgccggtgctggttgcctaccactggaaacacgacctcgagcggttacttaaagcgttcccacgcggccgccatcttgaccaggatccgcagacgctacgcgactggaacgccgggaaaataccggtactgttcgctcacccagccagcgcaggccacggcctgaatatgcaggacggcggcaacatactggtgtttttctcgcactggtgggacctggagcagtaccagcaaattatcgaacgtatcgggccaacccggcagatccaggccggacacaaccgcccggtattcatacaccacattatcgccgccagcagtatggatgaaatggtgatggaacggcgcaattcaaaacgtacagtgcaggatatcctgctcgatgccatgaaaaaacaggccagtaggccgtaggaggtggttagtggccagcattgaaatgataaccgagaaagaagtgatgcagatgatgcgcatctcatcgcgtatgactatatggaaatataccgagcgttataattttccaaaaccgatacgcacccaccccaaacaatacctgctgtcggaggtggaagcgtggatcttaaacggcggaatcaacccgaaatcttcttgatatgccagaatatcttttctgcgtacagctcgtaggcgtctttctgttctgctatccagtcatgcttattgtacacagtcaggacgccgccaagctcatgccccagcatcttctcgataacatgcggggcaacgccctcttcagaaaggcgagttgccagcgtgcgacgaaagtcatgtgcggtaaattcgccaatccccagtgaaagctcgattcttttcaggaagcgattagcaccggcgatagacataggcttagtcagatcaggcccgggaaagagaatatttccgtaggtcatttctgcctttttcagcaaagtatccgccgcgtcaaaaataggtcgcctgacaacttttttggtcttactcctttcggctggaagcagccagatcccctcttccctgttaaactcaccctttaccgaatcccgtatctcgctatttcttgcgccataaagcattaataactgatgtaacagccggtttgatgttgaaccgcggctgcgctcaatagccagccagatttttgcaagctgattgtaactcagcgtcacctcaccgactgagggcttaacaccgatatccttaggctgcaggagcatcagttcaggtgcactgacaaactgcctgcgaacgcaccatccaatcgccgatcgtagctgaatcagcagctgcctggcacgccgggggttgatacgctcctcttcagtgaacagctccacccacagccgtacggggatatcttcgacaggaacccccgcaaacacatcgctcaaatgtttaatgactgtcgatttatagagcgcctgtgttttttccctcaacgagatatcgacgtaattttccttccagtagtccaggcactcttttaccgtgggcttgttttgggcgcgtagcccgccggccataatccgggggtcaatccctttatcaactgcctcgcgcaaatcagcaaccttgttgcgagcgtctcttaacgttaaggatgggtaacgcccaagccccagacgatgctgtttgccgtcccaacgaaaacggaactgaaagctgattactcctttaggcgttatgcggatcccaagcccgtctgaatcagtgatttcagccgggcccgaatatggtttaccatagagagaacgcagttttgtgtcgctaattgccattctgttttttgtactcagctaaatgatgatttatgtacttatcctgtactcaatatcgcatgtactggcgtaatcgacaatgtttagcggtgtacaaaagttatcaagaaatggcagtcaagacgttaaaacaaactaaaatcaaatacatataacatagagcgcatacatcaggtgacagtaaaaaacgaaagcatacagagcacattcctcttccacgattatgaaaccttcggcaccagcccttccctcgaccggccggcgcagttcgccgccatccgcaccgacgcggagctgaatgtgctcggcgagcccgaagtgttttactgcaaacccgctgacgattacctgccgcagccgcaggcggtgatgatcaccgggatcacgccgcaggaagcgctggccaaaggggataatgaggccatatttgcccgccgcatccacgatctgttcacggtgccgcaaacctgtatcgtcggctataacaacgtgcgctttgatgacgaagtgacgcggaatatcttctatcgcaacttctatgacccttatgcctggagctggcagcacgataactcgcgctgggatctgctcgacgtgatgcgcgcctgctatgccctgcgcccggaagggatcgcctggccggagaatgacgaagggttgccgagcttccggcttgaacatctgaccgtcgccaacggtattgaacaccagaacgcccatgacgcgatggccgatgtgtacgccaccatcgccatggcgaagctggtgaaaacccggcagccgcggctgtttgattatctctacagccaccgcaataagcgcaagctggcgacgcttatcgacgtgccgcagatgaagcccctggtgcatgtctccggcatgtttggcgccgcgcgcggcaacaccagcctggtggcgcccctggcctggcatccggaaaaccgcaatgcggtgattatggtcgatctggcgggcgatatggcgccgctgctggagctcgatgccgatgccttgcgcgagcggctttacaccccgcgcgccgagcttggcgatctgccggcggcgccgatcaagctggtgcatctcaataaatgtccggtgctggctcaggccaataccctgcgcccgcaggatgccgaccggctggggatctccattcagcgctgtctggagaatgcccagctgctgcgggcgaatccgcaggtgcgggagaaagtggtggcggtctatgccgaagccgagccgttcgtgccgtccgaaaacgtcgacgcccagctttacaatgggttctttagcgatgccgaccgcgcggcgatgaaaatcgtgctggaaaccgaaccgcgcaatctgccggcgctggatattaccttcgccgataagcgtatcgaacgcctgctgtttaactaccgggcgcgcaacttccccggcacgctcgatgaacatgagcagcagcgctggttagagcaccgtcgtcaggtgtttacgccagagtttttgcaagcctatgccgatgagctgcagatgctgtatcaacagtatgcggatgataaagagaagctggcgcagctgaaggcgctgtggcagtacgcacaggatattgtctgattggctgaaatacccgggttgcggctaacgccttacccgggctacaaactcagttgggtgtccaacttttgggggcagtccagcagcgccgccgggtattgcgtccccagttcacgcttacctttttgcccggtggcggcttcgccttaccgggcctgggcgctggtaccagagtagcccgggtaagacgcctcgcgtcgcacccgggaacgttgcttagcttttcgcgcggctggcgatgatttcatccgccacattacgcggcgcttccgcgtaatggtggaactccatgctgtaggttgcccgtccctgcgacatcgagcgcagcgtggtggaataaccaaacatctccgccagcggcacgtcggcgcggatgatctggctgccgaagcgctcttccatcccctgcaccatcccgcgacgggaagagagatcgcccataatattcccggcgtactcttccggcgtctccacctcgacgtgcatcaccggctcaaggatcaccgggtccgctttgcgtgcgccctcccggaagccgaagatcgccgccatgcggaacgccatctccgaggagtccacgtcgtggtacgacccgaaggtcagggtcgctttcacgtcaaccaccggataacccgccagcacgccggtgcccatcgcttcgcgcagccctttctccacggaagggatgtactcgcgcggcaccacgccgcctttggtggcgtcctcgaagacgaaaccgctgcccggctccagcggctccagggtcagcacgacgtggccatactgccctttgccgccggactggcgcacaaatttgccttccacgtccgtcactttcttgcgcagggtttcgcggtaggtgacctgcggacggccaatgttggcctcgacgccaaactcgcgcttcatccggtcgacaatgatctccagatgcagctcacccatgccggagataatcgtctggccggactcttcatcggtatgcagacggaacgacggatcttccgccgccagccgctgcagcgcgatgcccattttctcctggtccgctttggtcttcggctcaatcgccagcgaaatcaccggctccggaaactccatccgttcgagggtaatgatcgcatccggatcacacagcgtatcaccggtggtcacatccttcagaccgacgcaggccgcgatatccccggcgtgcagttcgtcaacttcgtgacggtcgttggcctgcatcagcacgatacgcccgatgcgctctttcttacccttcaccgggttccacaccgcatcgcctttcttcagcgtcccggagtagacgcggataaaggtcagctggccgacgtaggggtcggtcatcagtttgaacgccagcgccgacagcggctcatcgtcgctcggatggcgttccgccggctggccttgctcatcgacgccctgtatcgccggaatatccagcggcgatggcatcagctccaccaccgcatcgagcatgcgctgcacgcctttgtttttaaaggcgctcccgcaaagcaccgcctggatttcccccttcaccgtgcgctggcgcagaccggcaacgatctccgcctcgtccagctcgccggtttccaggtatttatccatcagctcatcgctggcttccgccgccgccgagaccattttctcccgccactgctgtgccgtcgccagcagatcgtcagggacaggcccatagctgaaggtcatgccctgggtggcgtcatcccacaggatggcgcgcattttcaccagatcgacgacgccggtgaaatgctcttctgcgccaatggggatcacaattggcaccgggttagccttcagacggtcgatcatcatctgcaccacgcggaagaagtccgcgccggggcggtccatcttgttgacgaaggccagccgcggaacgtggtatttattcgcctggcgccagacggtctccgactggggctgcaccccaccgacggagtcatacaccatcaccgcgccgtcgagcacgcgcatggaacgttccacctcaatggtgaaatccacgtgccccggggtgtcgatgatattgatccggtgcggctcgaagctgcggtccatccccggccagaagcagcttaccgccgccgaggtaatggtgatcccgcgctcttgctcctgggccatccagtcggtggttgccgcgccatcgtgtacttcacccagcttatggctcatcccggtataaaacaggatgcgctcggtggtggtggttttaccggcatcgatatgcgcggagataccgatgttgcgataacgttcgagagggatgggtcggggcatgatgcgtccttagtcgttttgacggtcagtctgcggtcgaaatgatccgcagttcatttaactgcgtctatcttagtacaactgtacgagtatattcgaactatttttgctatcattacgattgggcaggttgcggcggcgcgcgtggtatctgaaccggagtttgggtatagtagccgccagccgccgatatgggctgcggctgccatgcgccgcgccaccgccgacacaggattattatgatcgccaatcaccccgaacgagaacaaattcgcctggaaaatgtcctttccgcgctcggtaacccactgcgactggagatcattcgtacgctggccgacggcagcgaactgagctgcaacgccctgcgccaggaggaggtggccaagtccaccatgacccaccactggcgcgtcctgcgcgacagcggtgtgatctggcaacggcctcagggacgggagaacatgatttcgctgcgccgggaagatctggacgcccgttttcccggcctgctggatacgctgctgaaagttatggtgcaggcaggataagctcttctgccgggtggcggctgcgcctgacccggcctacggcggcctcccgtcagcttatgtcccccaggcccggcaagcgccgccctgcaaaaaaatcaggcctcgatgtcgaaccggcgcagacaaaaaaaagccggaggtttccctccggcttttcttatttacatcacgctatgccttaggccacatcttcgtactgcggcaccgggttgcggaagcttttggtcacgcaggccaggtagaccagaccgataccggcccagatcaggcccagaatcatcgagctctcttccaggttgacccacagcgcgccaactgtcagggcgccgcacatcggcaggaacagatactggaagtggtctttcagcgtcttgttgcgcttctcacggatccagaactgggaaatcaccgacaggttaacgaaggtaaacgccaccagcgcaccaaagttaatcagcgccgtcgccatcaccaggtcgaagttaatcgccagcagcgcaatcgcgccgaccaggatgatgttcatcgccggagtgcgccaggtcgggtgcacgtagccgaagaagcttttcgggaacacgccgtcgcggcccatcacgtacatcagacgcgccacgccagcgtgcgccgccataccggacgccagtacggtgatggtggagaagatcagcgcgccaacctggaaggctttacctgccacgtagagcataatttccggctgtgacgcatccggatctttaaagcgcgagatatccgggaagtacagctgcaggaagtaggtggcaaagatgaagatcaggccgccgatcagcgcggtcaggaagatcgcgcgcggaatgacgcgctctgcatctttggtctcttcagacaggttgctgatgccgtcgaaaccggtaaacgagaagcacaggatcgtcgccccggtaatcatcgggatcacgtgcgcgtcaccggaccagaacggacggctgctggccagcgtaccggcgccctcgccttcaaacacgccataaatcaccatgccgaggataacggcaatcagcaccacctgcagcaccacgatcacggtgttgaaattggccacggatttaatgctgcgcaggttaaaggcggtcataaaggcgaccagcgcgataacaaacacccacgacggaatcgaaggcaccagcgcttcaaaatagattttcgccagcagaatgttgatcatcggcgcgaacaggtagtcgagcagcgaggaccaacccaccataaagccaacggtcgggctgatggatttccgcgcataggtatacgccgagccggcagaagggtaacgacgtaccagcttgccatagctcagggcagtaaacaggatagcgattaacgcaaaggcgtaggccgtcggcacgtgaccgtcggtcataccagagacgataccaaacgtatcgaacagcgtcatcggctgcatataggccaggcccatcattacaaccggaactaacgtaagcgttttacgtaattccacgcgagaggtatttggagtagcgttatgcgacatagttatccccttttacggtgaacgccagcgcgtaagcaaaaaattgccccatttctttctattcctcagcgacaacgactgtcggtttttagtaaatatctatccggtacgaagcccggcctcttggtattgaatgatgtgtctttcgaccaaaaaaataaccgacactttaaaaaaaagcgtcggctagtctctggttttcaggccgcatattttgcaacaaattcaacggcgttgacaagatgttatgaagttcattgcgtaagcataatttttaacgtgctaatatctatacggtttccgtatgataaattgtaaaaatagcactatttgctaatagcgtttcccgccaccatttgccagccaaaccgcaggtggcgtcattccaggcgatccacgcgcgttgacgaggcgacagcccgcgcacggtcatgcagaccagctcgccgctgtccagcagaccctgcacctgatagcgcggcaggcacccccagcccagccccaggcgcagcagcgccagctgccccgcggcgtcacacaccgtcagggtctcctgatcgctgagtagcgccccgccctcgccggtggccaccgcccggtaacggcgcagggttcgccagcttagcggtgcgcggtgtcgcgccagcggatgctgtggggcaacgaccagcagcagctccagctcgccgagggggagatagtcataaccgctcagcggcggcggctcgccgagcgcccccagcagcagatcggcctgcccgtcagtcagcggccgccagtccagcagggaggggttcagcgtgaagtgcagccgggtcagcggctgttgttgataaaatgccgcgattggcggcgagagcagcgccacgggaaaggtgctgtccaccgccagacgaaggctattctcccacccctgctgcagcttaaccgcccggatctccagttcgcgggcgatatgcagcacctcccgccctttctccagcagcatctgtccgctgggggtaaagcgcgcgcgatggccgctgcggtcgagcagctgaatattgagatcgctttccaggcggtgaatggtgtagctcagcgccgagggcgttttaaagagctttgccgacgcggcggcaaagctcccctctttttccagggcatccaggatcacgaggacatccagcagtggtttcatcgctaccccccttacggtatgcgaatcaccgctggcggatcactccatcggcatcaccagcggatcggggtactggtactcaaaccccagctcattgcagatacgattgccatctacaatcttgccctggccgccgcccgggctgtcgctgaacaccggcggcggcagaccgagctcgcgggccatctgcggataaaagaggccgcgcgccggatggcggggcgcacatagattatagatgtgcccgcccttcggggcctgcagcagcagttcgatagcggccaccacatcctgcaaatgcaccagattgaccacgtgctggccatccggcgccgacttgccggcgaaaaaacgtcccggatgacgggaaggccccaccagcccggccaggcgcagaatatccaccgacgtccccggcaggttgtgcagccagtcctccagctccttgagcacctgtccgctggcggtttgcggcagacgcggggaattctccttcactgtaccgttgacgttgccatacaccgaggtggagctggtgaagacgatccgcggaatatggtacgccagcgcggtatcgacgatctcctgcaccgcctgtagataaaacccttcccctgccccggtacgccgggccggcagggtgatcaccagcgcatcgacgttcatcagcgcgtcgaggtcctcggtatcacagaccagctgcggctccaggcgcagcggatagctgtcgatcccgcacatccgcgccgcctccacgccatcctgcgtagttttactgccggtaacctgccagcctcgcgccgtcaacgacagcgccagcggcatccccagccatcccaaaccgactatcgcgacctttttcatcccaggctcctgactctttcgctgtgctgattacaggctacgccagccagcggcaactgacaatttcttcgctcaatatgaaatgaattaatgatagaaaaaagcccttgctttctgcggcggaagtggtttaggttaaaggacatcaaatgcatagtcattcacagagaatttttatgaaccgcgttcaatttaaacaccaccatcatcaccatcatcctgactagtctttcaggcgatgtgtgctggaagacgtttggatcttccagtggtgcatgaacgcgcagagagcccccggaagattcacttccgggggcttttttttggaccaaattcggacagattcagacaggtattcagaggaaaagaacaatgttagacaacacccgtttacgcatagctattcagaaatcaggccgtttaagcgaagattcacgcgaattactcagccgctgcggcattaaagtcaatttgcacacccagcgtctgattgcgctggcggaaaatatgccaatcgatattctgcgcgtgcgtgatgacgatatcccgggcctggtgatggacggtgttgtcgacctcggcattatcggcgaaaacgtgctggaagaagagctgctcagccgccgcgcccagggcgaagacccgcgctacttcaccctgcgccgtctcgacttcggcggctgccgcctgtcgctggcgactccggtggatgaagcctggaacggcccggcggcgctggacggcaaacgtatcgccacctcttacccgcacctgctgaagcgctacctcgatcaaaaaggtatctcctttaaatcctgtctgctgaacggctccgtggaagtggcgccgcgcgccggcctcgccgacgctatctgcgacctcgtctccaccggcgccactctggaagctaacggcctgcgcgaagtggaagtgatctaccgctccaaagcctgtctgatccagcgcgacggcgaaatggccgacgccaaacagcagctgattgaccgcctgctgacccgtattcagggcgtgattcaggcccgcgagtcgaaatacatcatgatgcacgccccgaccgaacgcctggaagaagtggtggccctgctgccgggcgccgagcggccgactattctgccgctggcaggcgacaagcagcgcgtggcgatgcacatggtcagcagcgaaaccctgttctgggagaccatggaaaaactgaaggcgctgggcgccagctccattctggtgctgccgattgagaaaatgatggagtaatcggccagccggtcacgggacacacaggggaatacaatcatgagcttcaacacaatcatcgactggaacggctgtagcgcagaccaacaacagcaactcttaacgcgcccggcgatttccgcctccgacagcatcagtacaacggtgacggagatcctgaataacgtcaaagccaacggcgacgcggcgctgcgcgaatacagcgcgaagtttgataaaaccaccgtcgccgcgctgcaggtgagcgaggcggagatcgccgccgccggcgagcgcctcagcgatgagctgaagcaggcgatggcggtggcggtgaaaaacatcgagaccttccacaacgcgcaacagctgcaggcggtggatgtcgaaacgcggccgggggtgcgctgccagcaggtcacccgccctatcgcctccgtcggactgtacattcccggcggctcagcgccgctgttctccacggtgctgatgctggcgacgccggcgcgcatcgccggctgtcagcaggtggtgctctgctcgccgccgccgattgccgatgagatcctctatgccgcgcagctgtgcggcgtaaaaaccatctttaacgtcggcggcgcccaggccatcgccgccctcgccctcggtaccgagtcggtgccgaaggtagataaaatctttggcccgggcaacgcttacgtcacggaagccaaacgccaggtcagccagcgtctggacggcgcagccatcgacatgccggccggcccgccggaagtgctggtgatcgccgacagcggcgccaacccggactttgtcgcgtctgacctgctgtcgcaggcggaacacggcccggactcgcaggtgatcctcctgaccccggacgccgacatgggcagccgcgtcgccgaagccgtggagcgccagctggccgcccttccgcgcgccgaaactgcccgcgtggcgctctccgccagccggatcatcgtggcccgcgatctggcgcagtgcgtggctatttccaacctgtacggcccggagcacctgatcattcagacccgtcaggcccgcgagctggtggatagcatcaccagcgccggttccgttttccttggcgactggtcaccggaatccgcgggcgactacgcctcgggcaccaaccacgtcctgccgacctatggttacaccgccacctgctcaagcctcggcctggccgacttccagaagcggatgaccgtgcaggagctgtcgcgcgacggctttgccgccctcgcctcaacgattgagatcctggccgccgccgagcgccttgacgcccacaaaaacgccgtaacgctgcgcgttgccgccctgaaggagcaagcatgagcattgaagatttagcccgcgccaacgtccgcgcgctgaccccgtatcaatccgctcgccggctgggcggcaaaggcgacgtctggctcaacgccaacgaattccctaccgccgtagccttccagcttaccgaacagacgctgaaccgctatccggagccgcagccgaaggccgtgattgagagctacgcccgctacgccgaggtcaaaccggagcaggtgctggtcagccgcggcgccgacgaaggcatcgagctgctgatccgcgccttctgtgagcccggcgaagacgcggtgctctactgcccgccgacctacggcatgtacagcgtcagcgccgaaaccatcggcgtcgagtgccgcaccgtgccgacgctggccgactggcagctcgacctgccgggcagcaaggcgcggctcgggccctgataaacacccccgcgccc

SEQ ID NO: 156 - DNA, 54353 bp, Unknown
  source: /note="Description of Unknown: MKP2_2161_1 Mutant Bacteria sequence"
atttccgcacagatccgcgataacgcctccgccgattatcgccgggcgcacgccgagcaggagaaggccaaagcggataaaaccgtggccgaacgtcagctggcggtgctggatgctcgccagcagcaaatcctggctgccctggcgcaggcccaggctaacctcgagatggccaggctgaacctcagctataccgacattcgcgcaccgttcgatggggtgattggcaaccgccgcgcgtggtccggctccttcgtcagcagcggtacgcagctgctctccctggtacccgcgcacggcctgtggattgacgctaacttcaaggaaaaccagctggcgcatatgcgtgccggccagccggtgaccatcgtcgccgatgtgctgccgaaccatacctttaaggggcatgtcgccagcctggcgccggcgaccggctcacgcttcagcattctgccggcggagaacgcgaccgggaatttcactaaaatcgtgcagcgggtgccggtccgcattgcgctggaaggtgacggggcaaagcttgacgtcctgcgcccgggactgtcggtgatcgtcaccgtgaacgaaaagagccctcgatgagcaccgttcaggcgctgtccgccccgcagggtctgtcgatgccgacggcgaagaagatcttcgccttcgccagcatgtgcgtggggatgtttattgcccttatcgacatccagatcgtctccgcctcgctgcgggatattggcggcggcctgtcggcgggcgacgatgaaaccgtctgggtacaaaccagctacctgatcgccgagatcattattatcccgctttccggctggctggcccgggtcatgtcgacccgctggctgtttgccgcttccgcggcgggcttcacgctgatgagcctgctgtgcggctgggcgtggaacatccagagtatgatcgccttccgcgccctgcagggactggcgggcgggtcgatgatccccctggtgttcaccaccgctttcgccttttttcagggcaaacagcgggtcatcgccgcggcgacgatcggcggcctggcctccctcgcccctacgctgggtccaacggtgggcggctggatcaccgaaaactacaactggcactggctgttctttatcaacgttgttccggggatttacatcgcggtggcagtgccgctgctggtaaaagtagacagcgccgaccccactctgctgcgcggcgccgactatctcagtattctgctgctggccttgtccctcggctgcctggaatataccctcgaagaaggtccgcgctggggctggtttgatgacgcgaccctgacgaccaccgcctgggtcgccctgctctgcggcgtggcctttgttatccgcaccctgcgccatccgcagccggtgatggatctccgcgccctgcaggatcgaaccttcagcctcggctgctatttctcgtttatggccggcgtcggcatcttcgccaccatctatttaaccccgctgtatctggggagcgtgcgcggtttcagtgcgctggagatcggcctggcggtattttccaccggtctgttccaggtcatgtctattccgttttattcgtggctcgccaaccgcgtcgatctgcgctggctgctgatggccgggctgatcggctttgcggtgtcaatgtacagctttgttccgatcactcacgactggggggcggaccagttgctgctcccgcaggcctttcgcggactggcgcagcagtttgccgtcgcgccaacggtgaccctgacgctgggcagcctgccgcccgcgcgcctgaagctggcctccgggctgtttaatctgatgcgcaacctcgggggcgccatcagcatcgccctgtgcggcacggtgcttaacgacagaaccaatctgcactacagccgcctggcggaccatctgaataacgccaacctggcaatgagcgattttgttcagcgcagcgcggcaaacttcaccgtccaggggatctcgccggatgccgcgcagacggcggcgctgaaaaatctttccgcactgacgctgcgggaggcgcgaactcaggcattttccgatgctttctacctcatcatgatgggttttttaattgccgcgctgctggttcccttgatgaaaaagccgccggcacactgatactacaggagagttaactatgggcgtttccgttaaacgcattgtcgtcaccgggatggggattgtcagcccgctgggctgcggcgtacagcacgtctggcagtcgctgctggcaggaaagtcagggatcacccgactcagcgagcagctggtcgcggatattccctgcaaagtggccggccaggtgccgtccattgacagcgatccgctgcacggcttcgacccgctggcgaccatcccggcgaaagagcgcaaaaagatggatcgctttattgagtttgcgctggtcgccgcccgcgaagcgctggcccaggccggttggtcgccagcatctgaggccgaacaggaacgtaccgccacggtgatcgccaccgggatcggcgggttcagcgagatcgccaatgcggtacataccaccgatgaacgcgggccgcgtcgtctctcgccgttcactatcccctcttttctggccaacctggccgccgggcatgtgtctatcgcccacggcttccggggccccatcggcgcgccggtcaccgcctgcgcggctggcgctcaggccattggcgatgcagcgcggatgatccgcagcggcgaggcggatattgccctctgcggcggcgcggaagcggcaattcatcgcgttagcctggccgggtttgccgcggcaagggcgctgtccagcgcctacagcgaccagccggaaagcgcttcccgcccctttgaccgtgaccgcgatggttttgtgatgggagaaggcgccgggcttattgtgatcgaatctctggagcacgcgctggcgcgcggggccacgccgctggccgagctggtgggctacggcaccagcgcagatgcttatcacctgaccgcaggcccggaagacgggaacggcgcacgtcgggccatggagatcgctattcgccaggccggggtgaccgtcgacgagattgaccatatcaatgcccacgccacctcgacgcaggtcggtgataaaggtgagctggcggcgattaaaacgctgtttggcgcgcatccggtcgccattacctcgacgaaatccgccaccggccatctgttaggcgcggccggcgggatcgaggccatcttcaccattcaggccctgcgtgaccaggtggtgccgccgacgctgaacctgcatcaccccgatgaagacgcggcaggcatgaacctggtggcgctgcaggcccgcccgcagaagatgcgttatgcgctgtcgaacggttttggctttggcggcgttaacgccagcctgctgctgaaacgctggcaataatcgtcagctcccctgcggtactggccgacgggggatttccaccgttgcggcttttgccctgctgctggagtaaatcaagtacagcgcgatacccagggagacaatggcgcctattcggctcatcgagaatggaatcgacgcattgtccagccagccgaagttatcgatcaaggtcagttttgagcgaagaacggaccacactatctaaagaatgatatcgcctattatgttgggaccgctcatgttaaaaaagggatagcttttcttttcattgacgataacgaaggaattttcatggttgaggttgaggaaataaaaaagaaatatcccggcgcagatgcctggcaaatgggtgacagtccgcaactggctaacgaacttgctgacctgatcaaaaaagggatcaaaacggcctcttgcggatcttttgcctcttaccagcaggaagaatccgccccgagaatcgggagttataacattattcttgatggtcagaatgttccagtttgcgtgatcagactgatttcgatgcagctggttcgtttttgtgatgtcactgaagcgttcgcccgcaaagaaggtgaaggcgatttaagccttgaatactggaagaaagagcatcagagatttttcagctctgaaggtcatttttctgaagatatggagttgatcgcagaagaatttgaagtggttgaggtgctttaaggcaaggtcaacgggctgacgttttatcactggccactcataacactgttcgcttctggcgcggagcggacaagctgtcgagctaaaggtccgcattgagcaaggagctgacgtgccagctataattggtaataaaatgagagtagaactattctgatttgtttaaaaaaacatttttacatccaagggcaaaatattttttatgctatcttacatgctatctcaatatgccaggctacctgtgcctgaagttactctacgttcatggttaaaacaatggttgtcagagcaggaatcgaggtgtacagacagaagtttctcggcgcgatttccctggagagaaactggattatgtcaggaatattttttacaacgaaaactcaaaattgatggaaagcaatttcttactggcccccgttatcagggcggaaatattaacaaaccttttattgatattgtaggtatggattctgacctaaatcatactgcattagaactcattagtaaggaatggtcacaactcagagctcagtatgtccgcattcttgtacccggccagtccttcccgcagggtattcccgaccagtatatatatgccacttctttttctgaaccccctgaattcaatgataaatctcttactttgcaagtggcgacatacgaagattttgactggtgttgtcaggccctgggcgatgcctataagcatacatggcagacagttcgcgaactatctgcaagcaatttggtagcagttgatgacgaagagttgtgtgaccatatttctgagagagaagtatatattatctatgaaaacgatgttcgcgccgggttgctaatatgccagaaaggaaacatcgcttttctgagaggatatcgtattactgacaaagtaatacttcctgcttttcgtggtcgatcattgtcggcccgagcgcaacgcctgctgtaccgattattaactcattccgattcggaactatctttgtatatgggcacaattattccgcagaatatcccctcgatgaaaactgcagaaagagcgggacgaacttgcatcctaagttatcaatttctacccatctgcagaacccacgattaacagcaatgctaatttatcttcagcctacacaggggacgtccagggcccgggagtactcccctggacgcattaatgggcaggatgtgattgttgcgcaggctatcatatggcgtgaggtacagcagaatcaggcttcgtagcaatgaggggctcacagcgtccggaatccacccggtgccgtaaatcaccgtaaggtctgtcataaggtaatttcatcacgcatcgcgacaccttttttcttcatgcaggccttctctttcacggtttgtcagaactgtggaccgcagtaatctccactccgtgctttaatcaatgagagtgtgtcgggtgcaaattaaactacctttctcaacagcaaaggcgggatacccctgccctcgcagggtttctgcgtctggtaatatgcccatgacagtctcaaagaccgctttgagggtttcccggtttaaggcacaaaatcgcgtggcgttgcccccaaaatgcagcgaaaagcagcggtaaaggccgccgggcatgagaaaccaagctggtaagcgacctgtttgattggaacaccgttcgcgagaagatccaacgaagcgcaaattctggctctctgcttccatgttctaaaactaaagcctgtatccttcataaacaatcgggaaaaggtccgttccgacatggccgacataaaagccagctcgctcagcgatgcttcccagcgctgattgaccagtagcgatctggcagcgctgaataatcgctcatcattcggcatgggaagcgccatcgttaaaggtggagcctcgctgagaatttccagaagcaacaacgctatcttccgttgactcggtctggcgtagtcctcactgaacagccctgcgataagctctttgactaagggcgtagccgtgatcacatgcacctgctgactcttcgtaaagctcgtacattctgcgataaggctactgctgaaatagatcgccctgagatcggtttgtgaaagcagatggtaactatggatatgcaaaggcggtagccataatgcccgctgaggagggatcacccaacggtcactctctgtttgcaccagcataacccctctggtggcgaagagtagctgcccctcaacatgatgatggggaggatctgcctcgccgcgttgatagcttatcgcagtactggaccagcctgtggcttcatcatgtcttggcgctttatctatactacctggcatttcagatttagcccctgccattatcatatcgaaactggaaccacccggagtagagccttaggcaatgggtgcgtgacttatcatcctgatcatcaaagatattacaggagcttaacctcatgcgtgtacactttatcgtacatgaaagttttgaagccccgggcgcatatgaaacctgggcaataaaccagggtcatgatgtaacttactcacgcgtctatgcaggcgatcggctacctgatgacgccgtaggcatcgattttcttatcgttatgggcggtccgcaagatcctgacaccacgcttgaagagtgcccgcactttaatgctaaagcggaacaggcgctgattgcttccgcggttaaaaccggtaaggcggtgatcgatatctgcctgggttcacagctaatcggtgaagcgctgggcgcgccgttctctcatagcccggaaaaagagattggtaaattcccgatcacattgaccgaagacggcagtaaggatgagatgttctctcactttgggaaaacactggcagtgggtcactggcataacgatatgccaggtttgacgccagaggctaaaattatcgcttacagcgaaggctgtccccggcagatcgttgcctattcagaccgcgtctttggtttccagtgccacatggagctcacattggacgttgtagaacggctgatcgctcattctgagaaagacctgagccgtgcagcagaatatcgtttcgttgacacgcctgaagcgctccgggcgcacgattacagtgaaatgaaccaagtgctttttgactttctgcataagctggaagcacgttacaaagcagcgcaagcataatgttatgctcggtgagcttgccatcggttttgattttaatgtccgctcctggcacagagcggacaagctatctgagttgaaggtctgatatgagcgatcagcggacgttggctacactgttaaacgtcgcagactcagcttctgactgccagtttttcgcgagttgggccttcaaagtagatgctcctgatatggcaattacggggttgagtcagcacaaagcgaattgcttcccagactgaacgcccattcatcagacgttcccccattttgggctggctatcgacaaacgcctctaaccctgtcagctcgaaatccgggggatacaacccagtcacacgtatattttctttagacaactggtacgaaagtttagttgtaaacccgctaagcccgtgtttactggcaaaaaaagcggggtgcgcaattgaatctgtaaaattaggaatcccacatgaagatataattgagacgatatccgcactttctgaacgtcttaacccgggtagcaatgcctgagtcagcagaatagaacctgtcaggcctgaactgatagtatttatgatttctgtgtctgattgatcgtctaacgttcctgaaagccactgagcagcattgaggattaaaatgtctatgggcttgtctaaagttaacaactgtgaagaaaactgagaaagggattcaggtagggttaaatcacagagatgccctttcgccattccgccttcagccgtaatgatactgcaagttttttgaatgtcatcagcgcgcctcgcgcaaaaatccacctcgacgccttctcgcgctaaccatacgctcagcgcctgaccaaatcccgtgccaccaccggtaattacagctcttttacctctcagcatcttcatccatcctttattaatgaataggggggaatgtagatatatatgaggaagcagattgacatctttcagttagtgccattttttgacgatagggataagttgtactgctacatttccatcgcgctcctgtgggcatgcaacatccgctcctggcactagtctgccgtaaagggcagctttaagggaggagcggacgagctaacgcaggtgaagatccgctgtgagcgaaaagcggatttttgtcgttctgtcatcaaaactggcgacttatattaggatatcgcaatacccctcgccctcaggctacgtctgcttgaattgattgcctcaagaaggcggaggcggctttccgctgattgccgctacgcgcacagcaggcgtaccggtcatttatgtcagcgtcggattccgcaaggggtatccagaggtcagcaaaaacaacactatcttcgcttcgattaaggagaatggagtttttatggctgataacgagagcacggctattcatcctgatgttgctccagcagaaaatgaagtcgtcatcgtcaaacgcagagtcggagctttctcgtttactgaacttgagatgatccttcgtgctcaaggcatcgaaaacctgattcttacgggtgtaactaccagtcgtgtggtgctttccacagtcggacaagcttttgatctggattaccgccttatcgttgtgaatgattattgcgcagatccagatcctgacaccaatatgtttttacttaaaaaagttctacctcaacatgcttttgttaccagttcctctgaaatatcaaaacctgggcataaaactatgaatttctgacgtcaaaaaacgggaggatataaccggggatccccagtcatctgaacgtccgctcctggtggcgatagtcagcatcatgtctggcccaggagaaatctccagaagcgtcagtgcgagaaggaaagtcataaacgtttcgatgaaaggcatcctggtagagtccgaaaacatatttccgctacgttacctccgttcgatgcgggcaagaagcggacgttgtacttcaatcatcatcgatttgaatgacagcaaggtaacggctaatccaggtgacgtaaatgtgtcgcgatcccccagcttagaacggtacagcttccattaatcaactcgaaaacggcgtaactcgcattgggttgtgcatagcggtgaaaatcatccacagatccactttttaatgtcgcaagcacgccctgaatgacctgcccgtgagacacaatacatattgttcgatgatgatgttttttttccagactggataaaaaatgtatcattcgctgcgaagcatctgagagagactcaccccctggcggacaatactctgcatccagggtgaataatgcttctgcggcgtccggattattttgcagcagcgctacggttgtcatgccttcaaactgaccaaaagcctgttctttcagagccggttcagctatcagtgaacaataaaaacgctcagccaggcgctgtcccatttgccaggcccggccaagtggagacgcgtaaacacattctacccggtaatcactctctgcaaacgctgccaataaagctgatgtttgacgctccccacgaagcgtcaatgcgctatcactgtgtccctgaataatattttttacattccattctgtttccgcgtgtcgaaccagtatcacttgcatcattgcagggtcacataagccgttatttgaaatgttatcatctaaaaaccctcctttgatatgcaggcaagttctcagctctcgacgaaaaacaggaacaagcgtagctgataatggttatgttcagcttcagaagtgacgtagttatcgacgttaacgtctgctctggcacagagcgaacgcttccccttgtcgacgcgaaaagcaactctgcccatgcctctatctcagtaaaacctgaatcagctgcacgacgatatacactcccgctaccacctgtatgatccgaaacccccatctcagatagcgccattgatggcgttcgctggcatcagcggcttcaatggcgggatcataacgttttcttttcctggttctgaaggtatcgaatccccacaggacgagaagaatgatgatgatgattttttcaacgataagatggttcacaaagagagactccggtcttctcacggttacaggcagaatagataaaccgcctggatgtagccaccactaaatgtaggggtacctgaaaacgaagccaggccttcctggattatctgtcttatgaccgcgtaaacgcatagcaacgccataaaagcgacattcatttccgacacatgctgcgggagtccccttctccgacgcctcaggctgggtgataaaacgacggcggctgcccggtcacgcggcggaacatggtggcgaaagaggacgcattgtcgtatccaagggataatgccacttcgttcaccggtttgcctgctatcaaccatgccagggcgctcaccacgcaggctcgctgtcgccaggcggaaaacgacaggcccagctgcttcaggaaatggcggcgaaaggtactaggactcataaacagcgccctggcccagcgcgccgcaggatcatggatagaggggttaagcaaaaaagcctgacaaagcgccagcagcgccggatgctgcggcaacggaatgtcaaattcgcggaccggcatggcggccagttccagcaacatcaactgtatcagcgcgcgatcgcgtgggctgtcgtacaacggtggtaaatccacagcctcaagcagtagcgggcgcaacagcggcgagacgctgatcacttcgcaacgacggtgtttaatgaaagcggccacacaatctggctcaatatacaagctacgcgtggtcacccctgcaaatctgacggcatgcacggtttcaggggggatccagacagcgtgttgcggaggaaccacccattctccgtcctgcgtagtgacatacatcagtccggtcgcgccatacagcagctgtgcgcgacgatgctggtgcgggggcaggataaacccttgcgcatagtcattacctaacgccaccacatcacgatcgagtcgatcgacctcgtcaatttttacgttgcgcacacctgcctccctctgaccgatttacaaaggtaattgagcgctacgcaaatgggaagcagtacgcgaccggtataagctgctcgctcattttcaggtcggggatactctcttgaatgagatcgttattattgcgctggcaggctttactaccggcattaccacggtgctgttcggcttcggcggcggctttgtggtggtgccctttgtctatcaactgatgctccggcagccggcgatcgcgggcaacgccatgcatgtcgcggtggctacctcaacggcggtgatgatatttaacgccggctgggtcagctatcgaaactggcgggcgggcaggcttaccgcgcagacgctgtttccgttgttatggtttattgccattggggcggtggtaggctcctgtctggcggggatattgagcgagaagatcgttcgcgtgctgtttattctctatatgctggcaaccatcagcgattgtttgttgcgcaagggttttttcacgggcagcgctcggcgtcgcctgtccctgccagtggtcaccggcggcggtgtgattatcggtacgatcgccgcattgctgggcgtgggcggcagcgtcatgacggtgcccctgctacggcgacacgggtatgcaatgcaggagtgcgttagcgcatccaacccgctttctttgcccgtggcgctatgcggggctgtgacctatgccgtcattggctggcacagcattccgctgagcggatttttggggtttatcagcctgaaaattttaggcctgctcgtcctgaccggctgggccgggatagtgtttagccgccgggcaatccctgcggtacctgatgtatggtatgcgcgaatctatgtgctgctgctgtgcctggtactcctcgccatgcttattcaataatcaaattacattctggtgaaccggtgcaacagacgcggccgggcggagccctctccctggagagagggccaggttcaggggcaacaagctacccgcgatacggatgggtttcgcgccagtggtcggcaatctgctgccgggtgcagacccacaccttgtcgtgctgctggatatagtcaaggaaacgctgcagcgcgcggaaacggcccggacgccccagcagccggcagtgcatccccacggacatcatcttcggcgcggtttctccctcggcgtacagcacgtcaaagctgtctttcagataggtataaaactgctccgcggtgttgaatccctgggcggtggcgaagcgcatgtcgttggcgtcgagggtataaggcacgatcaggtgcggccgctggctgccgtcgctgcaggccacttcgctccagaaaggtaaatcatcgccgtaataatcgctgtcgtagtcaaagccgccgtgctccaccaccagctggcgggtgttagggctgtcgcggccggtataccagccggtgggcggtttgccgaacaggtcggtcagtacctgcaccgctttttgcagatgcgcgcgctcctcggcgatatccatgtgctgatagtggatccagcgccagccgtggctgaccacatcgtaatccgcggccttgattgccgccacaatctccgggtgccgcgccagcgccatcgccacgccgaaaacggtcaacggcagcccgcgctggctgaactcacgatggatgcgccagaaccctgcccggctgccgtactcatagagtgaatccatcgacatatggcgcgccgggtagctggcggcgccgataatatcggacaggaactgttccgaacccgcatcgccatgcaggacgtgattctccgcgccttcctcatagttgaggacgaactgcaccgcgatccgcgccccacccggccagcgcgcgtgcggcggctcccctgcgtaacctcgcagatcgcgaggatagtgttcctggttctctcccatctcctgccccttttaaaatggatttaacgactgaaactgtccgcttaacgcttttttctccgggaacgctaagtccccatgcttgctggtcgccaggcccagcgcgaccagagactccaccatcttcaccgccgcgctgacaccatcgatcaccggcacccgcagctcgcgggtcagctcctgcgccagggtcgccatcccgccgcagccaagaacaatcgccccgctaccatcctctttcagcgcccgaatgcagcgctcacgcactttctcctgcgccaggccactgccgtcttccagcgccagcaccggcaaatcaatggcgtgcagcgccgcgcaatgttgatgaaatccgtactggtgcagcaaatgacgggcgatgatcagcgtgcgcggcagcgtggtcacaatggagaaacgggtggcgaccatcgtcgccatatgcattgccgcctccgcgataccgatcaccggcccctgggccagctcccgcgccgccagcagccccgggtcgccgaagcaggcgatcacatgcccatccactccctgctcgcgtccggccctgatctgctccagcacgccgaccgccgcgatggcttcgtcaaagtggccctcaattgacggcaccccggcgcggggacagaccgcaaggatctcggtgcccggcgcagcgaccgcacgcgcggcggcgcctatcgtttcggtcatcgccaggctggtgttggggttaatcacttgtatacgaacggaagacatcacgactccttgtggccggcgaacagccgggaaaaatcgggcaggctgacgccatcgcgctcgaagcacaggctggcgacaatatgatcaaaatggtgcatcagcgcctcgctgagcggctgcagggctttatcccgcagcaaaccgaccagctgctggtgatcgtcgcaacggcagccctgtcgccagggggcgccccaggcggcaatcactaaagaggagcgctggctgaggcgggtcaccatctcggtgagcaccgggttgccggagatagcctgcagctgaatatgaaagtcagcggagtggcggatcgccgccgggccgtcgtgcgtcgcatgggcctgctgttcacgctgaataatgttctccagcgccgccagatgcggcggctgacagcgcgcgatcacatcggggagattggcgacctcgagcagcgcccgggtgcgaaagatcgcctgggactcttccacgctcgggctggtgacgtgtgcaccacgtttgggcgtcaacgtgaccagttgcacagcggcgagtcgttgcagcacctttctgatgccggtgcggctcacggcgaacacctccgctagcgcctcttccggcagtttgctgcccggcggcagctgatgttcgacgatagccgtcatcagcgcctggtaaatgctttcgtccttgtcctgcagcgctggcgcggcctggagacgatgttcattattcattaacccactccggtttcacttatcgatagcagatcgtatacataaaatttattttttgtatacaagattcatcattctggcctggatcctgcaatagcctcagcaatccatatcaaagggttttcattcagaggagcaggtttcatgccacattcatcccacacgcagcagacgaagactcacgaggcggccgccggctacagtccgcggctatgtaatgacgatctggcgccgacccgcgaccagaactggagctggtacaatatcttttcattctggatgtcggacgtgcacagcatgggcggctacgtagtggcggcgagcttctttacgcttgggctggccagctggcaggttctgctctgcctgctggtgggcatctgtattgtccagctgtgcgccaacctggtggcgaagccgagccagatggccggggtgccttacgcggtgatttgtcgtcaggcgtttggcgttttcggcgccaatatcccggcggtgatccgcggactgatcgcctttgcctggtacggcattcagacctatctggcggcgaatgccctgatgctggtcctgctcaagttctggccctcccttgcctcgctgaccagcagcagctttctcgggctgtcgcccctaggctggctgagcttcgccactatgtggctgctgcaggcgatggtgttctggcatggcatgaacgccatcaaacgctttatcgatatcgccggtccggcggtttatgtggtgatgctggcgctggccggctggattgtatacaagaccggtctggatgggatctcctttaccctcgccagcaaatccctgagcgccggcgagcagacctggcagatgatcaccgccacggcgctggtggtctcctacttctccgggccgctgcttaacttcggtgacttttcccgctacggcaaaagcatgggcgagatccgccgcggtaaccgctggggactgccgtttaacttcctgctattctcggtggtgaccgtggtgattgtctccggcacccagtcgctgttcggcaaaatgatcaccgacccgatcgaaaccgtcagccgcgtgggtaacgatctggcggtggccatcggcctgctgaccatgatcaccgccaccatcggcatcaatatcgtggctaacttcgtctcgccggccttcgatttttccaactgcgcgccgcagaaaatcagcttccgtaccggcgggatgattgccgcggtgggctcgatactcctgacgccgtggaacctgtttaactcgccggagctgatccactataccctcgacgtgctgggcgcctttattggcccgctgtttggcatcctgatcgccgacttttacctgatcaaacgcggccgggtgtcagtggacgatctgtttgacgatacgccgcagggtaaatactggtaccgcaacggctttaacccgaaagcgattgccgccctgctgccgtcggtgggccttgggctgattatcagctttattccgaccctgcatgaagtggcgaacttcagctggtttatcggcgtctttctcggcgccaccgcctaccgctggctggctcgcgacgagcgtgaagtgcaggcgaaagccgccttccgctccggcgcggtggcgcaaaaagagtaaccttccccttctgccgcggcgtctggccgcggcaggctgcaaactggcaccaatcttgctgtttatcactattcccagagcgttaagagaaggcaggttcgatgatggattaccagaccgcggtgcgcggtgcattttttgatatcgccggcgtggcggagaccccggatgaggtggccgcccaggctcgctatctcgatgatggcctgttgtttctgcaggaggggaaaattatcgccctgctgccatggctggagggtgaagcctttctgcatccgctgaagggctatgtcgacctgcggggcaagctgctgttgccgggttttgtcgatacccacattcactatccgcagaccgagatgatcggcgcctttggcgaacagctgctggagtggctcaccacctacaccttcccggtggagagccagtttgccgatgcggagtatgcccaggagatagcgcagttttttgtaaatcagctgataagccatggcaccaccaccgcgctggtgttttgtaccctgcatccggcatcggtggaggcgttattcagcgaagcgctgcgcctcaatatgcgcctgatcgccgggaaagtgatgatggatcgccatgtgcccgactacctgtgcgaaaccgccggggagagctacgagcagacccgggcgttgatccgccgctggcatcagcgcggcaggctgggctatgccatcaccccgcgctttgcccccacctcgactccggcgttgctggaggcggtgcagcgcctgcgggccgagtttcccgacacctggctgcagacgcatctcagtgaaaaccgggaggagatcgcctgggttaaacagctgtggcctgagcatgcgcgctatctggatgtctatcatcactatcagctcaccggcgaacgcagcgtcttcgctcacgggatccatctcgatgatgccgagtggcaatgcctgcatgacaccgggtccgccgtcgccttctgcccgacgtcgaatctgtttctcggcagcgggctgttccgcctgcccgcctgctggcagcaccaggtgcggatgggcatcggcagcgacgtcggagccgggaccaccttcagcatgctgcggacgctgggcgaggcctacaaggtaggacaactgcagagctatcgcctgcgcgccagcgaggccttctatcacgccaccctcggcggggcgcgcgccctgcggctggaggagaaaattggcaatttccagccgggcaaagaggcggattttgtggtgattgacccggcggtcaccccgctgcagcgcctgcgcataggccgctgccatgacatttatgagcagctgttcgtgctgatgaccctgggtgatgaacgcaatatcagcgagacgtgggtgaacggcgagcgggtgtggtgtcaggattgacccgtttgagaagcggaaacaaccttcggtaagacaagaaatcagcaccaagccctaaaggatcttaaaagatccttcagggggattaggctggttaccagttaccgtaagggtagtgcttccctttgataaaatctataatatctttgtcatatccataagaaaaatcgctccttgttatatctttacaaatatctaatttattacctgatacggttttcaggactgacggagtgacgcggtaattagattcagatccacttccctgtaaccagacggccacttttccttctggagccagaccaatttgcattctgtcgtaccaggcaatacgtccccgataatccttatatttactcggcataagcatctgttccagtaccgatttagggatcgtcaaatgggtttcatacacttttttatcaataatcgagtcccagcaaaaaataatatgtcgtggagggcgctttacgtgattccagtaccctaccggcgcacggtctttgtcgttccactcgccgatcacgccaggcagatcgggtgtgctattcagcgtgttaaagcgatagtcatttccatcaacgtcaagaatagcggcaaacgtcaccacggcgggtaacgctttgggtgtgaaaaagttaaaactccactctgttggcgcatcactatgcatggcggtgttgggcaaaggttttccctgacaggcagccagcgccaataatggaagcagacaggccgcacgtattatttccatattttatttccgtccatatcgtaaacggtacgctgccagcggtcatcaggccggttggtgaatgtcaccagcttcgccggtttgaccgcaccgctgataataccccgactgtctcgtataacgctgttccagttggccgagcagtggatatatttttcggccaacatccgcaattccggtgtggtaaagcctggggcagacttaccactccttatggctcggcccatcgcaatcgctttttcacacaaaccgttcagttcttgcctaagctttaagtgtgcatttgtatctcgaataggttcaaacaccgccccggcatcctgggccgcatcgatcatcacccgcaataccacttttgaccagtcgttgaaagtcggacggttgataaccagagctgctccactgcgtttctgtagcgtgccgtaacggtcagctggcattctgtcgtcatgccaggtatcgacgctcacctctaccgcatttagcagtagagctattgccggatagccgtccatggttttaagttttgcacaggtctgccggtaaatacgcgtttccgtatccgggatggaaaaggggacggtttcaaactctggtcgggtaaggaaataagcttcattctcgttgggattatagccgccaccaatgtcggagtgcgcaccgggtagcgccagctccggccacgctggctttacgctgttcaatgcaaagttaaaacgacattcatgctgcgcggtgatgtgaaaaaccttctccgctacacctggacgtagcgccagattgacatctcctgtgtctgcgctgtgcgggttaaagccgttaaccggggtgccgatcgccgccacggtatcaaatatgcccagaaagcgggttttaccacccggtgcaccggagaattcaataccattcaaaccggctctaatcgccgtgataatgtcacggtcctgactgaatacccgattggcaaagtgccgtgccgcaccagccccgcgactgaaaccgaatatatcaaattgtatctctttgatggtgcaggaaccatcgcttgcatgctgaagtaaatattcctgaataccgacagtcagagctgcaactgccttatcggtttttctcaccacaccggtatcgcctcgaccagtacccattccgtaagtattgtcgccagctccgtcttccgtgccaataccttcaacataaatggcgtgctggcctgctccgctatcgggtcggatatcctgcctgtacaatatatacaaccagtgcacattgctataatagccaatatagctccctgcggcagtaccactatagccatgctttagtcgcacgcactgagagtacgccgttaccgcatcggcgtcattcatcccgaaatgttcgccggaacaggcggcctgacggtcaccgctattattcgcattgtttccggttccatcaaaaaacacaccgatggttagtgtgatttcccgttttttctttgcggcctgcgcacgctgttcaggctcgggctgttggttttttttcttcgccgtttccgcccgttcagctacccgcccggcattgcagtccctatcgtaggagtgagaaaagacggtcgggacgaaccgagcacgacacgggcaagagctgtagctgtccagtgagccagcccattctttcagggatccaccgacatcgtaggtgtcacccattcccccacagacgcgaaatcgcccctcgtgcttaccgcaggtcaccggatcgcccaccctgacctgttgccgctcaatgccgccaatgtggtaagtgtcatcaggcgcacccgaaagtatgcgtcccccacaggtggttttatccaggtgatacagaaagaatcccttcgccataatccctcacgaatgtaatggttataaaatcaacgcatcataccctgaagcatggctaagtcgaaattacctgtttctgattattgttaccgcgcctgaattggcccatttgcaggactatcaaaaactcattgccaggcctacaccatagcctgtggtgttattgccgaacatatagcgcgccaccagccgggtgcgggtgataaagaccgggtatttactgctgtccagctcgaggccaacccccaaggaggtcaaaccggtaaagcccagcgcccctcgctgctcgccgagaaattcagtatgcgccccctccagcacataacgcagtgggttgcccagcagcgtccagtcggctatcggcgcgcggcggcgcagatacaggccgagattctccgcgctggcctcgccctgcaccacctcggcgctactgccgaaactttgcagatgcatataggagtaacgcagttcggcatcaatatcctgggtggcagagaagcgttcgtaatccagcatcagtgccccgcccagcccccaggcgttgaaccgaccgccgtcgagaaattgcagatcggcgttggtttttcgctcaattgcccagctaccaatacgcgcatcgctggccagggtaccgagcatcacattgacgatcggccgcagcaccaggttgcctccgaggctgtcccggtgcagcgaaaaatcccaaccgacgccgccggtggtggtcagactgttccatttggtcggcacattccgcgtctgttcgccattgctgaccacaaagcgcgggtcgtaacggctgtaacccatcgtaccttcaaggtacagaggaaacgactcgctgagggttgccccgccgccaaactgggtgatggccagattatgtttgtcgttgctgccggaaccaatgttgagatcgctggcggtcacgtcagggacgacggtatagctcatcagagtcaatacggcatcggcacgctgtttgatggcgtggccgttcgccgccagcgtcgctggcgcggaaagcgaaagtaccgacaggagaacgaaaagacgcaccatatgtcgtttgccacctcagcgacaggctaacaatattgccacctaaatcagcaggctggcgttcactcagtatagtcggtgagtcaacctgcgcgtccggcggggagaaaaagcatcgggctggtcaggccgcgcctccgcggctatgcagcagttccacattttcaaaaggcatgcgcgtcacccgattacgcccatcattttttgccgcatacagcgctttatcgacgcgggaaaacagttgttcaaccgtttcgccgtcatgatgttcagccacgccgatgctgacggtcaccgacagcgtctggtattcgctaaccgcctggcggatcccctccgccagtatcagcgcgcggccgatcggcgaatggggcaaaaaaagcagaaactcttctccaccccagcgataaattttatcttcgcggtcgaccgacgtttccagaatacgagagagcaccagcaggacctcatcgcctttttgatggccgtgaatatcattaatgctcttgaaatgatcgatatcgattaacagcagacaataaccccgggggataaaagttggcgcctcaaccagacggtgaaactcccggcgattaagcaagccggttaacggatcgtgggcggcggaaaattccagctcttttttcagatgcacttcttcggtgatatcgtgaatgatgcatagcatcagtcgaatattatacagcaccaccggcccggcataagtttggacatgacgtagcgagccgtcagccagaatatgcgtaaaattaagcggtttgtgaccgccaggcagattggcaatattattcataatggggatgacgtcccggcccagggtatttatttgccaggtatgtttggtgcgcatttcctcatcggaataatgataaaaacgtagcgcggcaatattggcatcgacaatccggccatctttatgagggtcgatcaacagcatcggcgcggtattggtcataaaaaagcgagcgaaaaagccattgttacgccgctggtagcggcgggagccggtatgaatcgactgattttgcgccagcagcttcacggcttcaaacagcagcaagcaaccacagtcttcggtatcaatcagggtggttttgcaatacaccgactgcaacccattggcggtgggtaacgtccagacttcgaatatctcgctcatggtgtcgagatagcgaaggtagtgctgcagttgcgtttccggacaggtggaataaataccgttacgcatctcattgagcgacatctcgccgctcaatgtccgggaagcctgattggcatagaccaccctttcgttaaaaggatgaactacccatatcggggtgcttaagacctcaaaaacagccagctcttttaataacatacaggccccaaaccgacccactgccggcgcggaacggcacttaacgctgtgcagccccaacgctggtttaaagtgaaagcaaaatagacaccgagaaaccgcaattacgcgcgagcgcgccaagtatagtcggttatgcgcccagtaaagccctctgagggtgactttgcgcgcagtttaaccaacagaagcgatgctgcctttaataataattttatttcaacagcatagcagcaatgccagaacgggtagtcgcttttgatcacagagtgtgcatcgccaacaggggttacccggcaggcacagcggcatagtccagggcgggcagagagtcgcttttctgcccaggctaaccgtgatagtttctatcattacgctcattcatagcgacaattgccttgaaaaaaatcgccactaaagtcacccttgccgacattgcgcgtgaagcgcgcgtcggcgtagccaccgtcgaccgggtgctcaataagcgcgcggcggtgaaagagtccacggcgcggcgcgtgctggaggccgcccgccggctgggttttaccctcgagcagccccactatcgcctggctgccggcaaagcgccggtcacgatcagaatgggctttatcctgctgcaggagagccactccttctacctgccgttggcccgggcgctgacgcgcgaggctgccccatggctaccggcgggccaggcgccggtgatactgcattttgccatcgatgcggtggaagcgatggctcaggccattcaccgactcagcgatgaagtggaggtgctcggcctggtggcgctggatcacccgctgattcgccacgcggtggcccgggccgccgcccgcggcgtgcgcgtgttcaccctgctttccgatctgtcggtcccccagcgcagcgggtatatcggcctcgataatcataaagccgggcgcacagccgcctggtttatcgagcgcttatgccgggggaatggcgaaattggcattatcattggcgataatcgttttacctgccaggaaagctgtgagatcagctttcgctcctgcctgcgagaacagggcaaggggcaacagatccttgagccggttcgcagtcatgaacgggcggatatcgccaggaccgtgacggaacagatgctgactcagtacccggccctgcaggcgatctacgccccctgcggcggcgtcgaagggatcgtcgacgcgctgcgcgacagcggccgtcagcaggagatcgctctggtctgccacggtccgctcagcgacagtgaactggccctgatcgatggcaccatcgacatcatgcttaaccaccggctggatgagtttgccgccgttacgctgcgcgccatggcggacgctgcttcacgcccccatagcgaggtgatttcactccctcagcctttcgatatcatcaccaaagaaaatatgtaaattttcggctccgtctccagcggagacggttatcgggcggaccgcgccacctctcgacttgataaaaaattatcaaaaaatccatcaattaaaatcatgatgattatcataaaatcaaaattccatcattgttgataatgaaatctttattcaatactcagcggcatcccttgtatgaaaaaggaagccgacatgatacatcctatcgctaacgccccctgcagctggggcgtcgatgacccgaaaaaccctaacctccctgcctgggctaccgtgcttaaggaggcggcgcaggctggctatcgcagcattgagctcggcccctggggttatctccccaccgatccggccagcctgcgtgcggcgctggagcagcatcagctgtcgctggtcgccggcacgatctttgacgatctggtgagcgaggcccatttccccaccctggtggcgctgacccatcaaatctgccgcaatctgtcgcaggtagccgctgccgaaccgatcccgggccgccctttccagccgccctatctggtgattatcgacttcggcaaccccgaacgggcgcgctttgccgggcgcggcgcgctggctccgcgcctcaatgacaaagactggcagcgcatgatggagcacattatcgcccttagcaccctcgcctggcaggagtacggtgtgcgggcggttatccatccgcacgccgggggcagcattgaattcgcggatgagatcgagcggctggccaacgatatcccgcacgacgtcgccgggttgtgtctggacaccggacatctctattacgccgggatggatccgctcgactggctggatcgctattaccaccgcctggactatctgcacttcaaggatgtcgacccgcaggtttatcagcgcgctatccatgaaggtatcgacttcttcactgcctgcgccgaaggggtgatgtgcccgctcggcagcggcgccattgactatccggctatcaaagactttcttgcccgccgggggtatcagggctggataaccattgaacaagagcgcgacccgcgccatgccgcaggcagcctgcaggcggtcacggaaagtctgcgctatctgcgcgacgtcggattctgacaggaggcacgacatgattaacggtttaaaacctctcgaccgcaccctgcgctggggcatggtcggcggcggcggcagcagccagatcggctatattcaccgctctgcagcgctgcgcgatcacaccttcacgctgcaggccggcgcctttgatattgatgccgagcgcggacgccagttcggccaacggctgggggtggatcccgaccgctgttacgccgactatcaaagcctgttccgcagcgaggctgcccggcctgacggcattcaggcggtgtcagttgccacgccaaataacacccactatgccatctgccgggccgcgctggaggccggactgcacgtggtgtgcgaaaagccgctgtgcttcagcagcgaggaagctgacgagctggtggcgctcagccagcgacggcgcaagattatcggggtgacctacggctatgccggccaccagctgatcctgcaggcccggcagatgatcgccgacgggctgctgggtgatatccgtatcgttaatatgcagtttgcccacggttttcacgcccagccggtggaacaggaaaacgccagtacccgctggcgggtcgatccccgcttcgtcggccccagctatgtgctgggcgacctggccacccatccgctgtttctggtcgaaaccatggccccgcagctgaagatcacccggctgatgtgcgccagacaaagcttcgtcaaaagccgcgcgccgctggaagataacgcccatgtactgatggagtatgacaacggggccatcggctcactgtggagctccgccgtcaactgcggttcgatgcacgggcaaaaggtgcgaatcatcggtgaaaaagccagtctcgaatggtgggatgaacagcccaaccagctacgctacgaaatccagggcgaacccgtgcgcatcctcgagcgcggtatggactatctcgatccgctggcgcgtcaggatgatcgcatcggcggcggccatcccgagggcctgtttgaggcatggtcgaatctctatcgccgcttcgccatcgccatggatgccgccgaccgtcgcgacgaggcgctgctggccgacttctggtacccggacgcccgcgccggggcgttcggcgtccgctgggtggaaaactgcgtgcgttctgccgacaacggtgcctgctgggtcgacttccgctaactcgccggctcagggcgttcgtcctgagcctttacggctatttttctgtccgcgccagctgggttttatccgcctcatgggcgcggtccgccagcccctggaacgctccggcgccatagtattgcgcgggaaccggcaatgcctgcatatcgtgccctggatagatctgcagttcgccgaggtcgcataagcggaatcccccgacctgctccggcatggtcaggcgatacggcggcatggtttcgaatgggaccggcgtcggcagccggttttcctgtagatcgtagttacgcttcagtaccagaaacttatccggcacccgccggtgactgttccaccagtcgccgtcgatctgctgaaacatcgcttccgtctcaccgcgcgtcgccaccagcagccgggtcagcacttgtttcagcgccgcatccatggcctggttataatcctccagcgaaccgccgtggccgctgaggatgacattaatcgccagcctcgcgcccagtaaattggagtagagatcctcgggcgaaaaagcggaaatctcttcggaaaacccggggaccgactggaagccataccactgggcgatctcatgccactgggcgatttcgaaggccagatgcccggcgagccaggccgccagctgatagcgctgcctaacgcccgcctgcggcgtaaaggcattcagctgcacgcggcgcacgcccagttcttcactgtagaagatccgccccgcctggcccagcgtcggcgcaatacgattgaacagataaaaggtgttgtccgccgtatcgcgcacatgggcgatatcaataaacccgccgcggcgggtatagataagcccgttctgctcctcgctgagccccagcagatttttcaccgcaccgaacgcgctgtcgttgtaatggtgcttacccagcgtacccagagtcaacacattaccgatctggtacatcgggatcggaatgcccgccgcgcgcacgtgcaggtcgtaaccaaaagcgcagcacggtcgcagcgactccggcggcggcagctcaccgagggtgggcgccgtatggatcgccgtcacggcgggtagcaccggatcctgcgccagcgccggcagcgccagcgcgaataatagccagaaggctttacgcatcaacagcctctccacagcaataaaagtgcgcgcatcttaccggcagatagcgcctgcggttttagttaaaaacggtattcagcgccgacaacgaaactattgcgcgcgtaaaagccgctcttccgttcgtcgcggcccggtggttagtagttcttgcgcggaaaagcgctggctatcccccattaccatcatcctgcggcaaggtggcgcggtgattgtattcaaaaggtgaatgtcgtataacatagcgctaccgaggggtgtcccgtgagggctgagatggcgcaagccgaaccctttgaacctgatctgggtcatgccagcgaagggacgggtcggcaattttgccagcattaccgccattgcctgttcacacccctgcacgcccggatctcccctgaataaatggaggtcctgtgatcgttcccgcttttagccaaggtctttacggccgtttacgccagctggccgccgctgactggcagcgctatgtggcgcatcctttcgtccagcaacttgcctctgggacgctggcggaaaacgcctttcgtcgctatctgacccaggattatctgtttctgattcactttgcccgcagctacgcgctgctggtgagtaaactgcgcacgctgccggagatgcgggccgcggccgcctcgatgaatgccatcctcaacgaactgccgctgcacgtcggctactgtgcccagtgggggattagcgaaccggagatggccgcccaacctgaagcccccgaaactctcaactatacccgctatgtgctggatattggccactcgggtgacgcgctggatctgctggtcgccctgatgccctgcgtcgcgggctacgccgaaatcggtctcgacctgctgcagcatcccgccacccgactggacgataacccctacgcctcatggatccgcaactatggcgatgaaggctatctgcagggcgtcagcgccgcgctggcgctgttggaaacggtgtggcagcagcgcgggagcgaggcgcgaatcactgagctgagcgagattttcaccaccgccacccgccttgaggcgcagttctggcagatgggcctcaacgccgcggcggagacccgggcgtgacggcgccgggtattgaggtccgtggcctgagcctgcatgtcggcgaccgtcggctgttcgacaacctgtcgtttacggtccccggcgggcagtgggtgtcgctgctcggcgccagcggcgccggcaaaaccagcctgctgcgggtgatggccggtctggcgcccgccacccgcggagaagtggtcgccagcgatgggcaaccgattcagggccgtctggcgtggatggggcagaaagatctgctctacccctggctgagcgttagggacaacgtcgccctcggcgcgcggctgcgcggtgaaaaagtcgatcgtgcccgggtcgccgccctgcttgaacaggttgagctttcatcctgcgccgacgcccgcccggcgactctctccggcggcatgcgtcagcgcgccgcgctggcgcgcacgctgtatgaggatcgccccatcgtgctgatggatgagcctttctcggcgctggataccctcacccgtacgcgcattcagaccctggcggccaccctgctggccggtcgcacggtggtgcttatcacccacgatccgcaggaggcctgccggttgagccaccgcctgctggtcctctcggcggccgacggcgacattgatgatagccatcacctcgccggcacacctccgcgcgcgccggacgcgcccgatctcctgatcggccaggccgccctgctgcagcagctgatgagggcccaaccatgactggacgtctctggcgaggaggtatggtgttcggcgggctgatgcttctctggggtctggccagccgcagcggcattccccattttcttttaccctccccgctggcggtcgccgaggcgctttgggttaatcgcgcctatctcggctggcatacgcttatcacgctcagtgagatcctgagcggcctggcgctgggcgtgacgctcggcgtcaccctggcgctgggcatgatcctctccccccgtctgcagcgctggctgatgccgctggtgctcaccagtcaggcgatcccggtctttgccctcgccccgctgctggtgctgtggctgggctttggcatgagcgccaaagtggcgatggcggtgctggtgattttctttccggtgacttccgccttctttgatggcttgcggcgggtcaaccaggagtatctcgacctggcgcgcagcatgaatgcctccttcggcgctcaactgcgacatgtccgcctgatggccgccctgccggcgctgggctctggcctgcgcatggcggcggcggtggcgcccattggcgcgatcatcggcgaatgggtcggctccgccgaggggctgggctacgtcatgctcaacgccaatgcgcgactgcaaaccgatatctgcttcgccgcgctgtttattttagtactactgaccctcctgctgtggctggcggtagataccctgctacaccggctgatcgactggtcgccggaataagaatgacgtaataaaggaaaacagatgaaaaagtcgctattcgtcggggcaaccttgacggccctgttcagcggccacgcgctggccaatgaaccgctgacgctggtgctggactggtacattaatcccgaccatgcgccgattatggtggccgagcagatcggcgcctttaaggcccaggggctggacgtcaggatagtccccccttccgatcccgcgctgcctccgcgcatggtggccgcccgtcaagcggatctggccatcacctaccagccgcaggtgcacttctttgctgacgaagggttaccgctggtgcgtgtagggactctgattaattcgccgctgaatacggttatcgccctggataagcagatcaaaaccccggcagatctgcaaggcaagaaggtgggctactcggtcagcggcattgagcaggccaccctggcgaccatggcgcaacatgcggggatcgatccggccagcatcaaactggtgaacgtcaatttccagctgaccagcgccctgctggccggccaggtggacgcggttatcggcggctatcgtaatatagaagcgcaggagctgaagctgcagggcaaaacgccggtagtgatgaacgtcgaagattacggcgtgccggcctatgacgagctggtgattgtcgcccatcgcgacgcaattcatgaggcgaagatccgtaaattcctcaccgccctgcaggcgggagtgggctatctgcgcgcccatccgcagaagagctgggaggcgttcgccgccgcccacccggagcttaggaccgaactcaaccaccaggcgtggttgcaaaccgtgcccctgttcgccaccgatccggcagcgctggataaagcgcgctacgagacttacgaacagtttttatataacaataagttggtgaaaaaagttacacctttaacaaattatgcggtggaactgcattgagtcttgctatcgctgacggaaggcattccgtcagcgctttaacgtagcggaaataaaaatatagagactttctcactaataattacactttaaagggttatagtgacagagtgttgttctattataattcagcacgttacgttaattttgcccctggtaagaataacgtcaaaatagcgcaatcaataaaacgttgaatgcggatttaaaaagccatatattgtgcgcgctttatgaatgccaattcaatttcttacaccaattattcaaccagcgttcaaccgcaatgctggttgtgggagtgatatgatgacggataaagtccgtattgatactttacgtgccgatttattagacgcaaacaacgaaacctttttggcccgtcaggccgaattcgaatcgaatgtcaggagttacccgcgtaagctgccgctggctatcactaaagccgaaggcgtgtggctgacggatgcggataacaaacagtacctggactgcctcgcgggcgccggtactctcgctctgggccacaaccaccctgatgtattgcagagcatccaaagtgtcattaccagcggcttgccgttacatactctcgatcttaccaccccgttaaaagatcgcttctccgaatacctgctctcttgcctgccgggcgaagggaaagaatattgcctgcagttcaccggcccgtccggcgctgacgccgtggaagccgcgctgaagctggcgaaaaaatacaccggtcgtaccgcggtgatcagcttctccggcggctatcacgggatgacccacggcgcgctgtccgtcaccggcaacctgtcgccgaaagcggcggttaacggcatgatgccggaagtccagttcatgccttacccgcacctgtatcgttgcccgctgggcatcggcggcgaagccggcgtgaaagccctgacctactacttcgaaaacctgatcaacgatgtggagagcggcgtccgtaaaccggcggcggtgatccttgaagccgttcagggcgaaggcggtgtgaacccggcgccggtcgagtggctgcagcgcatccgcaaagtgaccgaagagcacggcattctgctgatcgtcgatgaagtgcaggctggctttgcccgtaccggtaaattcttcgccttcgagcacgccggtattcagccggacatcatcgtgatgtcgaaagcggttggcggcgggctgccgctggcggtgctgggcattaaaaagcagttcgacgcctgggaaccgggtcaccacaccggcaccttccgcggcaaccagctggcgatggccaccggcctgaccaccctgcgtcatctgcgcgacaacaagatcgccgacaaagtcgccgcccagggcgagtggctgaaaggtaaactggccgagctgcagaaacgctacccggtgattggccacgttcgcggtctcggtctgatgatcggtatcgaaatcgtcaagccgaacgaagcgcaggatcacatgggctgctacccggctgacggcgaactctctgccctgctgcagaagaaatgcttcgaagcgggcctgatcctcgagcgtggcggtcgtcacggctgcgtgctgcgcctgctgccgtccctgctgatcagcgacgcggagctggacgtgttcctcgacaaatttgaacaggccctgctggccgccggcgtaaaaccggtctgagtggagtaagtgactgccatgtccacattgaatccgattcttgctggttcagcgcagagcgttgaagcctatcagcaggttatcgagcagaccagccaggccgttgtgcagtggctgaagcaacctgagatgtatcaggggaaaagcgttgacgagctgcgtgagcgtatctccctagaatttaacgaacagggtttgggtaaccaggcggcgattgatcgtgcgatcgagtacttcctgaaagacagcctgtcggtgcatcacccgcagtgcgtggcgcacctgcactgcccgagcctggtgattagccaggcggcggaagtgctgattaacgccaccaaccagagcatggactcctgggatcagagcccgtcggcaaccattatcgagatgaagctgatcgaatggctgcgcgcccgggtcggttttccggcgggcgacgccggcgtcttcaccagcggcggcacccagagcaacctgatgggcctgatgctggcgcgcgacgccttcttcgcccgtcagggccactccatccagcaggacgggctgccgggggatatccgcaagtacaaagtcttgtgctcggaaaacgcccacttctcggtgcagaagaacatggcgctgatgggcctcggctaccgctcggtaacgctggtgaaaaccgacgaattcgcgcggatggacgtgtccgacctgcaggcgaagattgcgcaagcgcaggctaacggcgagcagatcatggcgatcgtggccaccgccggcaccaccgacgcaggcgctatcgacccgctgcgcgacatcgccggtatcgctgcggaacatcagatctggctgcacgttgacgcagcctggggcggcgccctgctgctgtctgagcagtatcgcgactaccttgacggtctggagctggtggattccgttaccttggacttccataagcagttcttccagaccatcagctgcggcgcattcctgctgaaggacgcgcgccattacgagctgatgcgttatcaggcggcctatctgaactccgagttcgatgaagaacacggcgtaccgaacctggtgtctaagtcgctgcagaccacccgtcgcttcgatgcgctgaagctgtggatgggtctggaagcgctgggccagaaacagtatgcggcgatcatcgatcacggcgtcacgatggcgaaaaacgtggcggagtacgtgaagtcgcagccgacgctggagctggtgatgcagccgcagctggcgagcgtgctgttccgttcccgtccggcgcagatggccgggagcgacgcggcggctatcgcgctgctcaaccagcgcgtcggcgacgccctgctggcctccggccgcgctaacgtcggcgtaaccgagcacaacggcgttacctgcctgaagctgactctgctgaacccggtggtgacgctggatgacgtgaaggttctgctgaacctggtggagcgcaccgctcaggagctgctggcgcaataacctgccttagcgaggcggcgcctgccgccccgctgtcagccttgcctgcaataagccgataatgtccttatcggcttttttttatttctttccgcaccgctaatgctctcttcgcagggcccgttgacccctgcctctcgcgatgccacagtactatcccgaaaataacaacgttcaggataaacgtcctgaaaatggggataatgatggagaaacgcttaccagggctggatctcgacgccctgcgcagctttgtgaccggcatggagtgcggcagtttcgcccaggcagcgctgcgcctgtcgcgttccacctccgcggtcagcgcccagcttaaaaagctggagagccagtgcggtacggcgctggtgaccaaacaggggcggcatctggtgctcaccgcggaaggcgaaaagctgttgagctacgccagacgcctgttggcgctcaatgatgaaaccctgcgcgcgctgcagggtgagcggctcaccggcgagatccaccttggtatgcaggaagattttggcgaatcgctgatgccggagatcctcgggcaatttaaacggcatcatccgcaggtgcggatagtcgccagggtggatcgcaatggtccgctgcgccaggcgctggcggaagaggcgctggatctggcgctgctgtggcaaaccgaagatcagggtcccgggctgggcctctgcccgctggcgtggattgcgcatcctgacctggatattcgcgctttgctggtctccggcgagccgctgccgctggtgatgttcgacagcccgtgcctgatgcgctcccgcgccattgcctgtctcgatgccgcggggatcccctggcaggtggtgttcgtcagccacagcctgagcggcatctgggcggcggtgcaggccgggctgggcctgacgatacgcacccgcatcggcatgccaggcaacctgcgccctgcaggaggactgctgccagcgccaggaagtctggccgtcagcctgcgacaaaccccgcgtgaggaatcgcattccgccgccgtggcgctgctcggcgaactgatgaccgaggccctgcagggatggctcgaaaggtgacagtgtcacgccatttccattcatcctcaccctaaccctctccctgaagggagagggaaccgttcggcagcatctgttaccccactccacattctgtctcccgggcaagcgcagcccagcccagcgccgttcccgcttcaatgcccggtggcggctacgccttaccgggcctacattctccctgcgcgctgatgtaggtcgggcaagcgcagcgccgcccggcaacaggcacaagagatgaacggaaccgtccggcagtcaccggcaatggacattctgcgcctctcccgcttcaatgtccggtggcggctgcgccttaccgggcctacacgcggctccgtaacgatgtaggccgggcaagcgcagcgccgcccggcaatgggcacaagatatgaacgggtggatccgtccggcagccaacggcaatgggcattccgcgcctctcccgcttcaatgcccggtggcggctgcgccttaccgggcctacattctccctgcgcgctcctgtaggccgggcaagcgcagcgccgcccggcaatgggtataagggctggagggatccgtccgcccgacgcctgcgccgcgggtcaggctttgctctcctgcagcagctgctggatcacctgctcctggcgggcataatccccttcgccgaatgcggtataacgcagctgtccgcgagcgtcgaaaatgtaatgcgccggccagtactgattgccgaaggcgttccagatggcgtactcattatccgccaccaccgggtaggttatccgccagtccttcaccgcctggcgcagcaggggcaacgaacgctcccagggatattccggggtatgaacgccaatcaccaccaggcccgccgcgcggtatttgttcgcccagtcgcgcacgtaaggcagggtatgctgacagttgatacactcccgggtccagaaatccaccagcaccactttgcccttcagacgctccggagttaacgccgggctgttgatccatgcgctgccccccgccagagagggcatcgcgctgctgggctgcggcgcggcgatcggctggaggctggtcttttgctccggctgcggcagacgggcggccagccgctgctccagcgcctggctcagtccaccagcgctttgcagatagcgatcgccgccgctggcgatcagcgccaccgaggccagcatggccccccctgccaaccggcgcagccgttcgccgaacgcctgtccgcgacgcaatctggcgatcaacgccgccccgcaccaccccagcaggaataacatcagcgccccgccgctgccgtaggccagcagcaagccgccggtagtcgcctgccccggatgcacaaagcccaggctaagtatcgcccccaataccggcccggcgcacggcgcccacagtaggcccaccgccagcccggccagcagagaaccgatccagccgcgctggcgtgaactggcatcgttaagctgattccccaacgctaccaggggtgaggtcagccgttgcgcgacgcgttgcgaaagcagactcagcccgaccagggcgaagaacgccagcgccagaccgcggcctgcgagggtcagattcaccacccagccgctggcgaccgtcaccagccaggagacagcgccgaacatcagcgccattcctgccagcatgatcgccagctgcccccggcggccccggacgctggcgaacagcagcgggatcaccggcagcgtacaggggctcagcagagttaacatcccgcccaaaaatgcaattaatatcgacatcgccttctcctcattatgccgtcgctgccgagagtggcagccacgacattacagcaaggccatgtaaggcgaatgtgtcgggaaagggggagaattgtcggcttagttatccgtcttccccggagatacatcaggatacaatcccgccgcggcaaggcgaacgctggcgtccaggccgccctgcgggcggttggccaggcgcagcgcgccgtccatctggctgaccagctgcgcggcgatcgccagccccaggccggtgccgccggtatcgcgattgcgcgagtcctccaggcgataaaacggctgcagcaccgcctgtagcgcggcctccgggatccccggcccctcatccagcacatgaagggtgatatcccccacggcgtcacgggtcagggttaccgtggccgtcgtaccgaatttcaaggcgttatcgataagattggtcatcacccggcgcagagcctgcggcggtacccacaccaccccggcggtctcttcgggacaaaactggaccggccggccgacatcggcataatcgcagacgatagtgtcgagaaacgcatcgagattcagccgctgtcgcgcctcctccagcggctgcgaggtgcgggcgaaggcgatgccctcccgcaccagacgggtcatattgtcgagatcctgcagcagtttgtcgcgcagttccggctggtcggccatctccacccgcagcttcattcgggttatcggggtttgcagatcgtgggagatggcggcaaggatccgcgctcgctcctgcagatgatcgtggatgcgcgcctgcatcgcgttaaacgcgcgggcggcgcgacgcacctcctccggcccctgctcggccatagttcccgccgtgtcgctggccggctccagggcatttaccgcgtgggtaaagcgggagatgggcagcaatacctggcgaaccgcgtaccaggcgcaggccagcaggaggacaaactgagcgatcagcaccaccggcagccagcgggcgatggccggtagtttcggccacaggtcgagggtcaacggcgcgccgtcgtgaagggtaatatgggcctgaatatgctgccgcgggccggggatcgccacaatacttaccggatactgcgcgctcagcgcctcctgcagggagcgcgctgcgtcccgggcgcgccagctgtccgggtaatcgccgcgctccccggcgtccagcagatagcgataattgccgcgcgccagcttcggcagccattgtgggcgctcagcggccggcaggcggtcaaggatcgccacgctggtggcgacatcggaagccagattgcccagcatcacgctgcgagcgctgctcatacgctcataaaacagcagcgacagggttaaggtattcgccagcagcagcgccagaaacagcagcgccatcagcctcgactgcagcgaggcgggccagaacctcattcatgcctctcgcgaatggagaccggcaccgacagcacatagccttcgctgcgcaccgttttaatgtaggccggctcgcgggcatcctcccgtagccgttggcgcagtcggctcaccagcaggtcaatcgaccgctcaaacagttccgcgtcgcgtccctgggtcagattgagcagctgatcgcggttcagcacccgctggggatggtcgagaaacacccgcagcagccgatactccgccccgctgagggcgacaatcgccccgctgtcgtccagcaaatggcgagcggcagtgtcgagcagccagtcgccaaaggcgatcagcctgcccgcctcggtgatctgcaggttgggcggcagcgcccgggtgcggcgtaaaatggctttgatgcgcgccagcagttcgcgggccacaaagggcttaatcagataatcgtcagcccccatttccaggccgaggatccggtcgctgtcatcggtgcgggcggtgagcatcagcaccgggatatcctgctgcgggttggcgcgcagctggcgacagagcgttaagccatcctcgcccggcatcataatatccagcacaatcaggtcaatttgatggtttttgagtaccgaccacatggctttgccgttcgccgcgccgctggcgcgatatcccgatttttccagatagtcgacaatcagttcccggatgtcgcggtcgtcgtcgacgaccaggatgtggtcaatacgctccaaaggctgctcctgcggcaaaataaactcttcacaagcataagccgtgttgccggaagcgcaacgtcgcgcctccggcaaggcgcgggttacaaacgatcggcgtccaccaccgcctgcacaaacgccgtcggatcctcctgcggcgggttatggcccaccgctcccggcagatcccggtgctcatatttaccggtaaatttggcacggtagctggcgggagccggatgcggcgcgccgttattcgccccttccagggtgatggtgggcacggttatcggcggtagcgccgccagccgttgttcatagccggcatacttcgcttcccctttctccagccccaggcgccagcggtagttgctgatggtgatcgccacatggtccgggttatccagcgcccgggcggttttggcaaaggtcgcgtcgctgaattgccactgcggcgacgcctgatgccagataaatttcgcaaagtcgtgggtgttttgccggtaaccggcctccccacgcggggtggcaaaatagaattgataccaccacgacagctcagcctgcggcggcagcggtttttcgccaatctgctgactgctgatcagatacccgctcaccgagaccagggatttcacccgctgcggccacagcgcggcgacgatatccgccgtgcgcgcgccccagtcaaaaccggccagatccgcctgcctgatgttaagggcgtccatcagatggacaatatcggccgccatcgccgacggctgaccgttacgcggcgtgctggcggagaggaaacgggtcgtgccgtagccacgcagatacggcacgatcacccggtaacccttctgcgctagagccggcgccacctgggcatagctctgaatgtcgtagggccagccgtgcagcaggatcaccggctggccgtcgcgcgggccgatatccacgtagccaatattcaggtcgccggcgcggatctgctggatcttgtcgaacgcccccgcgtcttcagcggcgcaaacggcggcggaccacagggtggataaccccagcgccacagcgctggtatagcggatcagggataatctgttcatcgttttctcaccttttatcgtcatgaagagagtacgtgaccagtaaagcggaaatttgtatccgccatgtgcccgaccggggccatttttatctcttaatgtcagcgcagcaccgcgagatacagtgtgatacaaagtcgaggttggcaattgttgcgggcatgtgaatttatgcttgccccgggagataaatccgttaccgtggcaggcatttttcaccacttaagaacgcagaaacccgctatggcgatttttgatggtcacaatgacctgctgctgaatctctggcttcaccatcgcgaggatccggtgagcgccttctttgccgggatagagaacggccatctcgactatccgcgcatgctgcaaggcggatttgcgggcgggctattcgcgctattcgtgccaccgcaggaatatattgcccgtatgacgccgcaatacgccagccaacgatgggatccgatcgatatcctctggcagcaaatggccatcctgaagcaacttatcgcccactccgctggacgcttgagattgtgtctgagcgcggcggatatcgagcgctgccgcgaggataaggtactggcgatggtggcgcatattgagggtgccggaggttttgatggcgagggccgcgacctgcaggccttttatgccgccggggtccgcagcattggtccgttctggaatattgcgaaccgcttcggcagcggcgttaacggttcgtttcccggtagcccggacactgggcctggactgacagcggcaggtatcgatctgattaagcaggccaatgccttgaagatgcagattgacgtgtctcatatgaatgaaaaagcgttctgggataccgcccatcactcgacgtcaccgctggtggccacccactccaatgcccacgccctgtgcccgcagccgcgcaatctgaccgaccagcaactgcgggcgatccgcgacagcggcggcgtggtgggcgtcaatttcggcaatgctttcctgcgcgccgacggccggcgcgatagcgacacgcccttaaccaccattgtccggcatatcgactatcttattaacataatgggtgaggatcatgtggcccttggctcggattttgacggcatcaccctgccggacgagctgggcgatgtggccggcttaccgcggcttatcaatacgttgcgcgctagcggctatgatcaattggtgctggataagctgctgtggcgtaactggctacgagtattaaaaaatgtttggcaacaataggttatattgtaaacataaagttaattccctacagattccgggttgatctctctcccggtgaagcgcaatatgcggcagccgtcacagatccaccattatccgtgaggcctgtagtcatttttaagaggaacaaaacatgtggaagaaacctgcttttatcgatttacgtctcggtctggaagtgacgctgtacatttctaaccgttaatcgccccgcccgccgttcgcgcgggcaccttcattcattacccggtccgtcttcatgttcattaaagtcctcggttccgccgccggcggcggtttcccgcaatggaactgcaactgcgccaactgtcagggtctgcgcgatggcaccattcaggctgccccccgcacccagtcgtcaattatcgtcagcgacaacggtaaagagtgggtgctgtgcaacgcctcgccggatatcagccagcagattgcccatacccccgagttaaataaagccggcgtactgcgcggaacgcatatcggcggcattattctcaccgacagccagatcgaccacaccaccgggttgctgagcctgcgggaaggctgcccacatcaggtctggtgcaccccggaggttcatgaggatctctccaccggcttcccggtgtttaccatgctgcggcactggaacggcggcctggtgcatcatcccatcgctccgcagcagccttttaccgttgacgcctgtcctgatttgcagtttaccgcggtgcctatcgccagcaacgcgccgccctattcgccgtatcgcgaccggccgctgccgggtcataacgtggcgctgtttatcgaaaaccgccgcaacgggcagacgctgttctatgccccggggctgggtgagccggatgaaacccttctgccgtggctgcaaaaagcggactgtctgctgatcgatggcaccgtctggcaggatgacgagctgcaggccgccggcgtcgggcgcaataccgggcgcgatatgggccacctggcgctcggcgatgagcacgggatgatggccctgctggcctccctgccggcaaaacgcaaaattctcattcatattaataacaccaacccgatccttaacgagcagtctccccagcgccaggcgctaacgcaacaggggatcgaagtgagctgggacgggatggcaatcacccttcaggataccgcatgctgatcactgacacgctgtcgccgcaggcctttgaagaggctctgcgggctaaaggcgccttctaccatattcaccacccttaccacatcgccatgcataacggcgacgcgacccgcgagcaaattcagggctgggtggcgaaccggttttattaccagaccaccattccgctgaaagacgcggcaattatggccaactgcccggatgcgcagacccggcgcaaatgggtgcagcggatcctcgaccacgacggcagccacggcgaggacggcgggattgaagcctggctgcggctgggggaagcggtcggtttgagccgcgacgatctgctcagcgagcgtcacgtgctgcccggcgtgcgcttcgcagtggatgcctatcttaatttcgctcgtcgcgcctgctggcaggaggcggcctgcagctccctgaccgagctgttcgccccgcagatccatcagtcgcgcctcgacagctggccgcagcattatccatggatcaaagaggaaggctacttttacttccgcagtcgtctgagccaggccaatcgcgacgttgagcatggcctggcgctggcgaaggcctactgcgacagcgctgaaaaacagaaccggatgctggagatcctgcagtttaagctcgacattctgtggtcgatgctcgatgccatgaccatggcctatgccctgcagcgcccgccctatcacacggtcaccgacaaggcggcctggcacacgacccgactggtgtaatcatgcagaaaacgtccatcgttgcctttcgtcgcggctaccgactgcagtgggaagtcgcccaggagagccatgtgatcctctatccggagggtatggccaaactcaatgagaccgccgcggcgatcctcgagctggtcgatggccggcgcgacgtcgcggcgattatcgccatgcttaatgaacgtttcccggaagcaggcggcgtcgatgacgacgtcatcgagttcctgcagatcgcctgtcaacagaagtggatcacctgccgtgagccagagtaaacccaccgtcaatccgccactgtggctgctggcggagctgacctaccgctgcccgctgcagtgtccctactgttccaatccgctggacttcgcccggcaggataaggagctgaccaccgaacaatggatcgaggtctttcgccaggcgcgggcgatgggcagcgttcagctgggcttttccggcggcgagccgctgacccgtaaagatctgccggagctgatccgcgccgcgcgcgacctcgggttctataccaacctgatcacctccgggatagggctgacggagagcaaactggacgccttcagcgaggccgggctggaccatatccagattagcttccaggccagcgatgaagtgctcaacgccgcgttggccggcaacaaaaaagccttccagcagaagctggccatggccaaagccgtgaaagcgcgcgactacccgatggtgctcaacttcgttctccaccggcacaacatcgaccagctcgataaaattatcgagctgtgcattgagctggaagccgatgacgttgagctggccacctgccagttctacgggtgggcgtttcttaatcgcgaagggctgctgccgacccgggaacagatcgcccgcgccgagcaggtggtcgctgactaccggcagaaaatggccgccagcggcaacctcaccaacctgctgttcgtcaccccggactattacgaagagcggccgaaaggctgcatgggcggctggggatcgattttcctcagcgtcaccccggaaggcaccgccctgccttgccacagcgcgcgccagctgccggtggcgtttccgtcggtgctggagcagagtctggaatcgatctggtatgactcattcggcttcaatcgctaccgcgggtatgactggatgccggagccgtgccgctcctgtgatgaaaaagagaaggacttcggcggctgccgctgccaggcctttatgctgaccggcagcgccgataacgccgacccggtgtgcagcaaatccccgcatcatcacaaaatcctcgaggccaggcgcgaagcggcctgcagcgacataaaagtcagccagctgcagttccgcaaccgtacccgctcgcagctgatctaccaaacccgggacctgtaatgacgctggcgacccgcaccgtcattttgccgggcggcctgcaggccaccctggtccatcagccgcaggcggatcgcgcggctgccctggcgcgggtcgccgccggcagccaccacgaaccgtcgcgcttccctgggctggcgcacctgctggaacacctgctgttttacggcggagagcgctaccaggatgatgaccgactgatgggctgggtgcagcgccagggcggaagcgtgaatgccaccaccctggctcgccatagcgcgttctttttcgaggttgccgccgatgctctggctgatggcgtcgcgcgtctacaggagatgctgcaggccccgctgctgctcagggaagatattcagcgcgaagtggcggtgattgacgccgagtaccgcctgatccagcagcatgagccatcgcgccgggaagccgcggtgcgccacgccgccagcgcgcccgcggcgtttcgccgctttcaggtaggcagcgccgacgcgctggcgggcgatctcgctgcgctgcaggccgccttaggcgattttcaccgcacccattacgtcgcccggcgaatgcagctctggctgcagggaccgcagtcgctggaggcgctcggcgagctggcggcccgtttcgccgccgggcttgccgcaggcgagcctccgccgccggcgccgccgctgcgcctgggcgagttcactgcactgcagctggcggtctccagccagcccgcgctgtggcgctgcccgctgatcgctttaagtgacaatgtcacgttaatgcgcgagtttttgctggatgaagcccccggcagcctgatggccagcctgcgccagcgccggctggccggggatgtggcgctgaactggctgtatcaggatcggcacctcggctggctggcgctggtcttcgccagcgaccggccggaagaggtcgaccggcagataacccactggctgcaggcgctacagcaaacgacgcctgagcagcagcaacactactatcagctatcccgccgccgctttcaggcgctgtcgcctctcgatcagctgcgccagcgggcattcggctttgcccccggcgcgccgcccgccgggttcgccgatttttgcgccgccctgcaagtcgccccgtcggtcagcctggcctgtcaaaccgtttccccaggggagcctgttgccacccagggctttagcctgccgcttagccgctggcgccgccgccctgagtctgacccggcgctggcgttcgctttctatccgcaggccgctggcgatctcgttgccaaatgcccggagaaagccgcgccgctgctccacctcccgtcaccgggagatccgccgaggctcctgctgcgaccgcccttctactgctcgcccgatcaggccgaggggctggcgcgtggggaacagctgcgcccactgcttgccgccctgcgccatgccgggggacacggcgagtggcatctgttcgacggcagctggcagttgaccctccagctgccggagcccggccgacggccggaggcgatcctgcaggccatcctgcggcagctcgcgctcccggtcgcctcgctgaccccaccgccggaaagtatcgctatccgttatctcatggctcaactccccgaacggctgggtacatccgggcatcagaaaggttggctggcggccctggccggtggcagcgcagaagatgcgcagtgggtagcgcgtcagctgagcctgattaccgccccggttaatccgccgatgcccgctccggcgccctgccgccgcggcgtcgaacgtctggtttatccgggaggcgatacggcgctgctggtctttattccgctgccggatggcgcctcgctggcggccctgcggctgctggcgcagcattgtgagccgctatttttccagcgcctgcgggtggagcagcagattggctatgtggtgaactgccgctatcagcgggtcgccgatcgcgacgggctgctgatggcgctccagtccccggatcgccgcgccggggaattgctgcgctgtggtaaagactttctgcgccagctggcccccatggatgaggcaaccttcagaccgctacagcagcgcctggccgctcagatccgcgccagcaggccgccagaggcgcgggcgctgtccgccctgcgtcaggagtatggtttaccagagctaacgccgcaggcggttgacgcgctgcgcgttgcagaggtggccgatctggcacgcgaaatgacccgccggcgtcgccgctggcaggtgctgttcacgacaggggattaatggccgggggcatccggggtcagaaaggcgctgacgaagcgcgtaaggatcgccgcgccctgcgggctctcctgcacctcgtcgtgtaaccgctgcgcgtcaataccttccgcctgcagcaccgcctcccggtggcggatcagcgaacgggctatcggcgcggaaaattccgggtgaaattgcgtagagaccgcgtgcggcccatagcgcacaatctggtggagatcgtgggaggacgcggccagcaccgtggccccttccggcagacgagtcacggtttgcaaatggctcagatgcgcaggaaatgtggccggcaggccgctcagcagcggatcatcgacaccccatggcgacagcgtaatggtttggctgccgctttcccgcccgccaggatgatacgccacctcgccccccagggcatgggccatcagctgatgaccatagcaaacgccgaacagcggcatgtcgatagccaccgcctgccggatccagtcggcggtccgttcgctccacgccagacgatcggtcaccatcgcccacgagccggttagcaccgctatggtctggttatccggcgtcggcagcggttcatcttcaaacacccgcaccgtggtgagctgcgtctgccacggcgccagcagcgtgcgaaaccagcgcggcagatcgccatgcgcctggcgaatggccgtcggcggcgtgccggtctggaccagcagtaatcggttacgtgtcacctttcctcctcgctccgggtcatgttcccgtaaaacactatgccgccgggaagacgatgggacaaataaccaattactatggacgatgcgcctgcggaataagtcctgtcgcttactgggcatcggcgctatcacgctgcggcacatcggctgccgccgaagatgcctgctgcgggacaaaaatatggtccaggatggcgcgcgccgtcggtccggctaccaccccatccccgccgccgttctccagaatcagcgccatcgccaccttcggatgctgataaggggcaaacagggtgtagaagatatggtcgcgcagacgcaccgggatcattttggcgttataggtctggttttgcttcaggctaaagacctgcgaggtcccggacttcgccgcgatctgatacggcgcagtatgaaacagcttatagccggtgccgttgggctgattcgccatcccatacatgccgttgcgcacaatgccccagtacggggatttcgggtcacccacctgcggcaggttcgccggctgctgataacgttccacatggtttccctgcttcatcgaatagagcagatgcggatcctgtactttaccattgttcagcagagtggtaagcgccttcaccatctggatcggggtggcgatccagtacccctggccgatgccgaccgagatggtgtccccctgataccagggctttttatgcacccgctgtttccactcccggctgggcagcaccccggcgtactcctcattaaggtcgatgccggtggactggccgtagccgaacttgctcagccattcatggatccggtcaatgcccatctcgaaggcgacctgatagaaaaaggtgtccgctgactcttcgatggctttagtcacgttgagcatgccgtggccggttttcagccagtcgcggtagcggcgttgcgtgcccggcagcgtccacgtcggcgccccgaagaagctggtgttcggggtgatgaccccagcggagagcgccgacagcgccatatagggtttgaccgtcgaagccggaggatatagcccctgggtgacgcggttgatcagcggccggtccggattctccagcagcgatttataggcctgatagccgatacctttgacgaagggattaggatcgtagctggggctggagaccatcgccagcacgccgccatcccggggatcgaccaccaccaccgccgcgcgctgccccttcagcaccgactcaatatactgctgcaggtgcaggtcgagggtcagatagaggtttttcccggccaccggcggcacctctttcagtagacgcaccacccggccgtggttatccacctccacttcctgatagccggtggtgccgtggagcgctttttcataatagccctcgatcccctgcttaccgatattgcggtcggcggcgtagttctcctcttcgccgtttttcgccagccgctgcagatcgctgtcgttgattttcgacacatagcccaccacgtgcgccagctctgcgccgtaggggtattcccgttgttggtagctctccaccgtcacgccggggaaacggaattcgttaaccgcgaagcgcgccacctccacatcgctgaggtctgacttgagggtgaccgctttgtagcggctggtgtggtgcatatcgtcgcgaaagctggcgatgtcgcccggcgtcaggtcgacgataggcgtcagctgctgcaacagcgcggccatatcgggaattttgctcgggatcacctgcaggcgatacagggtgatattctgcaccagcggaatgccgttgcgatcgaatatcagcccgcggctgggggcgatgggcagcattttgatgtcgttctggtttgaccgggtctggtaaaaatcgtgctgctccacctgcagatggtagaggttaacgatcagcacgccaaagcagaccaccaccagcagaaaagcaattgcggcccggcggataaacagcatctcttccgcggagtggtcgcgaatttcatctctcaaaaggggcattagcggtacatcacctgaatcactggaaaagccaacggcgtaacggccgggaagcatagccttatcgcagcgtcagccctactgaaaggttgctaatgatctggcagaaatgtttcagcatgttagagggatcgttattcttaaccttgcccgtgacgcgtcaggctatattcacgatgcccgacgcgtcggcgcagctcactgttctgcgcgggccgcctcgtgggaggtagccgacttccctgaggtgtagattaagtacagcgcgagggccagacatatcaccgccgccagtctcgccggcgagaacgccatcgtgctgttgcccagccagccaaagttgtcgatcagcaggctcatcgtcagctggccaaagatcaccgccacggtggccgtagcggtgcctatccgctgcaccgccagcaccataatgacgatgtagggcacgccgcaaaaagcgcccagcagctgccacttaggcacctgtagcagatttaccgacgtcgctggagcaaaaaacaggatcagcaatcccgtcaccagcgcgccggtagcgaaggttaaaaaggcgctgcgcagcacccccacctggctgccaagacggccatttatcgccgcctggacgctaagcaatgcgccgccgcacagcgccagaatgatcactatcgtatccatttcccctccttaccccagagccaccagcagtaacgccgccataatcaacatcagcgccatggcgcgccgcggatcgattttgcgccgtgggctgccgaataacccgtaatggtcgatcgccaggcttttcgccacctgacccgccaggatgccgatcatggtcatggcaataccaatccccggcgtcgccacggtcaagatcaccacgtaccccgcccccaacagaccgccggtgagttgccagccgggcagagaaaagaacgacgggctgctacgcgggctgaaaaagagcatcagaaaaaaggttaacactgcgccaatcccaaagatgctcatggttgcccacagatcccccacctggctcgccagcggccccagcaggccggcctcgaccgataatcccatgccgccggcaatcactaataaaatgaataataacgccattactgcgcctcctctgtacaacaggcggctgaggataaaacagcgtgctgatgcgataaacggtataatgcagaaaacactattgcaggaattgcacagatggccgatgccagcagcgtcgattttcgcgcccttcagcttttcatcgcggtttacgataaccagagtttttccgtagtggcccgccgcgaaggggtctctccctcgttgatctcgcgaaccatccagcagctggaagatgccctcgggcagcagctgttctaccgcaacacccgtgccgtggtaccgaccgaagcaggacgccttttcgcagcgtccgcccgggaactgctgggacagtacgccgacgcacaacgggcgttacaggatcgggcacaggtccccggcggactggtgcggatcaatgcgccggtctattttggtcagcgtcatatcgccccctggcttccggaactggcggcccggcatcccaaactgcagtttgacctgacgctgaccgacgattttatcgatccccatcgcgatgcgacggatatcctttttcgcatcagcagcctgccggacgcgggctatcacgccagagtgtttggcagccagcgctattacctgaccgcctccccggagtatgtttcacggtacggcagcccgacttcgccggaggcattgcatcaacatcgcacgctggtgtatggcggttcgcagggagccaaccgctggctgtttcgccagcgcgaagaggcatgggtgcactatccgttgaccccgctcatgacctcgaacaatgccgatgccctgctcacttcagccatcggcgggatggggatcgtgttatttcccgactggatggtcagcgaagcgctgcacaacgggacattagtcacgctgatggaccgctattcggcggccatcagccacacgccatcgtatatcgcggcgatttatccttatacccgccatccctctctcaacgtgcggacagtgattgactattttgccgacgtgtttggatcgccgccctactggcagcgctaatgcgagtttcgtagtaaaacttgtcatatctcaaacaattagcattccttcgcccagcttgacgcggatcgtttcctttgccgcctcgttacggctatggttactaatgaggttaatctcaatctccaggccgacacggtcccaccagggggttgcctaacccttcattgaacggaaatagctattaaatccgtagattcattcaaatatcgcttattggtagcagtgtatatcgtaacggcattcacaaaagcaaacggagcctgatatgagcacgtctaacgacccatccaacaatgcatcccccgggaagtgccctttccacgccgagacgccaaaacagagcgccggcagcggcaccgccaaccgcgactggtggccgaaccagctgcgtgtcgatctgttaaaccagcactccaatcgctccaacccgttgggtgagaattttaactacagggaagagtttaaaaagctcgattactccgcgctgaaggctgatctcagagcgctgctgaccgattcgcaagagtggtggccggcagactggggtagctatattggcttgtttattcgtatggcctggcacggcgccggcacctaccgcaccgttgacggtcgcggcggcgcaggtcgtggacagcagcgctttgctcccctgaactcctggcctgacaacgtcagcctcgataaggcccgccgtctgctgtggccggtgaaacagaaatatggccagaaaatctcctgggccgacctttacatgctggcgggtaacgtcgctctggaaaacgccggcttccgcacctttggctttggcgccggtcgcgaagacgtctgggaaccggatctcgacgtcgactggggcgatgagaaagagtggctggcccaccgtcatccggaaagcctggcgaaacaggccatcggcgctaccgaaatgggtctgatttatgtcaacccggaaggtccgaacgccagcggcgagccgctgtccgccgcggcggccattcgcgccaccttcggcaatatggcgatggacgatgaagagatcgtcgcgctgatcgccggcggccatacgctgggcaaaacccacggcgccgcagaaaccagccacgtcggcgccgagccagaagccgcgccgctggaagcgcagggtctgggctggcactccagctacggcagcggcgcaggcgcggacgccatcacctccggtctggaagtggtctggacgcagacgcccacccagtggagcaactactttttcgaaaacctgttcaaatacgaatgggtgcagacccgcagcccggctggcgcgatccagttcgaagccaaagacgcgccggagattatcccggatccgtttaacccggagaaaaagcgcaaaccgaccatgctggtcaccgacctgaccctgcgcttcgacccggagtttgaaaaaatctcccgccgcttcctcaacgatccgcaggcctttaacgaggcgttcgcccgggcgtggttcaagctgacccaccgtgatatggggccaaaatcccgttacctcgggccggaagtgccgaaagaagatctgatttggcaggatccgctgccggcagcgacccatcagccgagcgcggaagatatcgccagcctgaaaaccgccatcgccggcgccggcctgtcggtcagtgagctggtctcggtcgcctgggcgtccgcctccaccttccgcggcggcgataaacgcggcggcgctaacggcgcgcgcctggcgccggccccgcagccacaccggccgctgatgccaccccgccgccgccgccccccggtcgtcccctcgctcgctcgtccgcggcggcagttgtgtataagcgaccggaatctgatcgatccctccgccctgcgcgtgcagcggggcgatctcccggccgctaatgccgatatagccgcggatcacccggccatcgcggatcagtttatccataattttggtcgctaactggaa

SEQ ID NO: 157 - DNA, 53649 bp, Unknown
  source: /note="Description of Unknown: MKP2_2161_1 Mutant Bacteria sequence"
gctttattgtaggtgggccagttggtgattttgaacttttgctttgccacggaacggtctgcgttgtcgggaagatacgtgatctgatccttcaactcagcaaaagttcgatttattcaacaaagcctttttttatatacgatctgacgaattcagcagaaggaaactcatcattcgtgacgaaataaaaattagtttccccattaatatagaaatgagtgtttactcacagaaagaaaatcaggagtaattattctgaagacagataatacagaagtcgtacagcgcatttaactcacttctcaggaggttaatcactctctatttgtggacaaccgacatgtcttaaggctctggaataacgtgttgatatttcgatgcgtagcatgcagcggaatattaccggatcaataaagcaggaagaggcgttttaattctttccgcaggatgatagtagggtgactgccatgtctgattataatgaaaaaagtgcgatctccgcacttctcgcaggtcattgttccgatccattttccgtgcttggcatgcactcaaccgatgcgggtctggaagtgcgcgcattattacccgatgccaccgcggtatgggtgattgaaccgaaaaccgggcgcaaagtcggtaaactcgaatgcctcgacacacgcgggttctttagcggcgttctgccgcgccggaaaaagccttttcgttaccagctggccgtcacctggcacggtcagcaaaacctgattgacgacccctatcgctttggcccgctgctgcaggagcttgatgcctggctgctcgctgaagggactcatctgcggccctacgagacgctgggagcccatgccgacaccatggacggcgtcaccgggacgcgtttttccgtctgggcgccgaacgcccgtcgtgtgtcggtggtcggacagttcaactactgggacggccgccgccacccgatgcgtctgcgcaaagagtccggcatctgggagctgtttgtccccggcgcgcataacggccagctgtataagttcgagctgattgacgcccacggccacctgcgggtgaaatccgacccgtatgcctttgaggcacagatgcgcccggaaagcgcgtcgcttatctgcggcatgccggaaaaggtcgaacagccacagtcccgtcagcaggccaaccagtttgatgcaccgatttcgatttatgaagtgcaccttggctcgtggcgccgccacgccgataaccatttctggctcagctaccgcgagctggcggaccagctggtgccttacgcgaagtggatgggcttcacccatctggagctgctgccggtaaacgaacatccgttcgacggcagctggggctatcagcccaccgggctgtacgcgccgacccgccgttttggtacccgtgaagacttccgctacttcctgaatgctgcccatgccgcgggtctgaacgtgatcctcgactgggtgccgggccacttcccgtcggatgactttgcgctggcatcgttcgacggcaccgcgttgtatgaacacagcgacccgcgagaaggttatcaccaggactggaatacgctgatctacaactacggtcgccgtgaagtcagcaactttctggtcgggaacgcgctgtactggattgaacgcttcgggatcgacgccctgcgcgtggatgcggttgcgtcaatgatctaccgcgactacagccgcaaagagggggagtgggtgcccaatgagtacggcggccgggaaaacctcgaagcgattgaatttctgcgcaataccaaccgtgtgctcggtgagcagacgccgggagcggtcacgatggcggaggagtccaccgacttcgccggggttacacgaccgtcttcgacgggcggtcttggcttctggttcaaatggaacctcggctggatgcatgacaccctcgactatatgcagctcgatcccatctatcgtcgttatcatcacgacaagatgaccttcgggatgctctacaactacaccgaaaacttcgtgttgccgctgtcacacgatgaagtggttcacggcaaaaaatcgattcttgaccggatgcctggcgatgcctggcagaagttcgccaacctgcgcgcctactacggctggctgtttgccttccccggtaaaaagctgctgtttatgggcaacgagtttgcccaggggcgggagtggaaccacgacgccagcctcgactggcatctgctggaagggggcgacaactggcatcacggggtgcagcgtctggtgcgcgatctgaaccatacctatcgccaccataaggcactgcacgaactggattttgacccctacggctttgaatggcttgttgtggatgaccatgaacggtcggtgtttatctttgtccgtcgcgataaagccgggaacgagataatcgtggcgagcaacttcacgccagtaccgcgtcacggctatcgcttcgggattaaccagccggggcgctggcgtgaagagctgaacaccgactcgatgcactaccacgggagcaacaccggcaacggcggctgcgtggcaagcgaggcgatcgccagccacggtcgggagcattcgctgtcggtgactctgccgccgctggcgacaatctggctggtacgggaatctgcagggcaataaaacgcgcagctgatttattgcagctgacttattaccggaggtgatcacttctgaattattttgcagaagagtgaggctttttcttcattattttcttttatggcttttatttaatagcaggacattattatgagtaaacttgaatatactgacaacttaatgctgtcgcgccagttaccgcttaaatccgtggccctgatcctcgccggcggacgtggcacacgattaaaagacctgaccactattcgcgcaaaacctgcggtgcatttcggcggtaaattcagaattattgattttgctttatcgaattgtattaactccggaataagacgtatcggggtcattacacaatatcagtcccattcactggtgcagcatattcaacgcggctgggcattctttaacgaagaaatgaatgagttcgtggatttattaccggcgcagcagcgggtgcatggtgagaactggtatcgggggacggcggatgccgtgacccagaatctggatattatccgccgctatgatgcggaatatgtcgttattctggccggggaccatatctataaacaagattattcgcggatgctgctcgatcacgttgaaaaaggggcgcgctgtaccgtggcctgcctgccggtcccggttgaagaggcaagcgcttttggcgtcatggccgtggatgagaatgacaaaatcattgaatttgttgaaaaaccggctaatccgcccaccattcctggcgatgaaacccgctcgcttgccagtatgggcatttatgtgtttgatgcggaatatctctaccagctgctggaagacgacgatcgggatgaacactccacccatgattttggcaaagatattattcccaggataacggcggcaggtgaagcgtatgcgcatccgttcccgcgctcctgcgttcagtcggataataatgccgagccatactggcgcgatgtcggaaccctggaggcgtactggaaagcgaatctggatttagcctcagtagtgccagagctggacgtttatgaccgtaactggcctatccgtacctatgtcgaatcgctgcccagcgccaaatttgttcaggaccgttccggcagtcatggcatgaccatgaattctctggtctccggcggctgtattatttctggctcggtggtggtgcagtcggttctattttccagagttcggattaactcgttctgtaatattgattcgtcggttttattaccgggcgtctgggtcggtcgctcctgcaggataagacgctgcgtgatcgaccggggatgcgttattccggaggggacggtgattggcgaaaatgccgttgaggatgcgcgacgcttttatcgttcggaagaaggcatcgttctggttaccaaagaaatgctggacaaacttgaggtatgagcccatttgcggaaaaagcgtgtccggcggcagagaaaatattgccctgtcgcgggtcgtctctgtggctgaataataaggagcatacatgcaagttttacatgtaggagcagagatgttcccgctgttaaaaacgggcggactggccgacgtcaccggcgcgctcccggcggcgcaaattgccgaggggctggatacccgcgtgctgctgcctgggtttccggcgatccgcaacggggttcaggatccgcaggtggtggccagcagggagacattcgccgggcggatgacgctgctgtttggccattttaacggtgtgggcatctatctgattgatgccccgcatctctatgaccggacgggtaatccttatcataaccagcagatgcaggattatcctgataacgtcctgcgtttcgcgttgctgagctgggtcggggccgagcttgccggtggtcttgacccgttctggcgtcctgaaatcgtccacgcccatgactggcacgcgggtctcaccccggcttatctggccacccgcggcaacccggccaaatcggtgtttacggtgcacaacattgcctatcaggggttgtttcaggcccggcatatggcggagatcgcgttaccgtggtcgttcttccagatgcacggggtggagtttaatgggcaaatctccttccttaaggcgggtctctatttcgctgaccatatcaccaccgtcagcccgacatatgcccgtgaaattaccgaaccacagtacgcgtttggtctggaagagctgctgcggcaacgtcagcgggaagggcgactgtcggggatcctgaacggggttgacaaaaatatctgggatccgcgccgcgatccgctgctggcagcgccttacgaccagaattcactggcggagaaagcgaagaacaagcagcagctgcagacgtcgctggggctgaaggcggacgatcgggcgctgctgttcaccgttgtgagccggctgaccagccagaaggggctggatcttctgtttggcgcgctgccgggaattatatctaagggagggcagctggcgctgctgggatccggggacccggatttgcaggcccgttttctgaccgccgaggcgcaataccccgggcaggtgagtatccggatcggctacgacgaggcgctgtcgcatcagatgattggcggcgccgacgtcatcctggtgcccagccgttttgaaccctgcggtctgacccagctttatggtctgcgctacggcacattaccgctggttcgccgtaccggcggactggcggataccgtcgccgactgttcgctcgaaaaccttgttgacgggctcgcgaccggatttgtgtttaccgacagcgagacggaatcgttattacatgctatccaccgggccagtgtcctgtggtcgcgtccctcgctgtggcgttacgtgcagcggcaggcgatgagcatggattttagctggcaaagtgccgcaaagtctttccacctgttgtatcagcgtattatttaattgctacggataagaaaaatggaaccacgcataagttatatttcacccaggctgaatgaagaagcgctgcagcatgctatcgcttataacctcatgtttattctcggtaaagacccttcacttgccaataagcatgaatggctcaatgctacgctgttcgccgtgcgcgatcggctggttgagcgctggttgcgggcgcatcgggcgcggatctcgcagcaggcgcgccaggtatattatctgtcgatggagtttctcatcggccgtaccctctcgaatgccttactgtcgctgggcatctatgaggatgtgaaaacagcgctggccgggatgggtctggatctggaagagctgattgacgaagagaatgacccgggcctgggcaacggcggtctcggtcgtctggcagcctgttttctcgactccctggccacgctggggctgccaggacgcggttacggcatccgctacgactacggcatgttcaagcaaaacatcatcgacggccggcagatggagtcaccggactactggctggagtacggtaacccctgggaattcgagcgccataaaacccgctataccgtgcgctttggcgggcgcattcagcatgaggggaaaaactcgcgctggctggaaaccgaagagatcatcgcggtggcctacgatcagattatcccgggttatgaaaccgatgccaccaacaccctgcgcttgtggagcgcccaggccagcagcgagattaacctcggtaaatttaatcagggagattacttcgcggcggtagaagataaaaaccattccgaaaacgtctcccgggtactgtatccggacgactcgacctactccgggcgcgagctgcgcctgcgtcaggaatatttcctcgtttcggcgacggtgcaggatattctttttcgccattaccagttgtatcaaacctatgacaacctggcagataaaattgctatccacctcaacgacacccatccggtgctgtcgatcccggagctgatgcgtctgctgattgacgaacaccgcttcagctgggatgacgctttcggggtgacctgtcaggtcttctcctacaccaaccataccctgatgagcgaggcgctggagacctggccggtcgagatgctggggaaaatcctgccgcgccatttgcagattattttcgagattaatgactattttctgaaaaccatgcaggagcactatcccgatgatattgcgttgctgagccggacctcgattatcgatgaatccaacgaccgtcgcgtacggatggcctggctggcgggggtggtcagttacaaggtgaacggcgtgtcggaactgcactcccggctgatggtggagtcgctgtttgccgatttcgccagaatctttccgcgccgcttcaccaacgtgactaacggcgtcacgccgcgcccctggctggctgccgctaacccgtcccttgccgcggttctggaccgccatatcggccagacctggcgaacggatttaagccagctgagcgaaatgggggaatatcaggattatccgctggttaaccaggccgtcagcgccgccaaactggcgaataaacagcgtctggccgattatatcgcccgtcagctgggcgtggtggtgaacccgaacgcgctgtttgatgtgcaaattaaacggatccacgaatataaacgccagctgatgaatgtgctgcatgtgatcacccgctacaaccgtatcaaggcggacccgcaggccgaatgggtgccgcgagtggtgattttcgccggcaaagccgcgtccgcttaccacacggcaaaacagatcatccatctgataaacgacgtcgccaaagtcatcaacagcgatccgcagattggcgacagactaaaggtggtgttcattcccaactacagcgtcagtctggcgcagatgatcattccggccgcggacctttctgagcagatttcgctggcagggactgaagcctccgggaccagtaatatgaagttcgccctcaacggtgcgctgaccattggcacgctggacggcgccaacgttgagatgttggagcacgtgggtgaggacaatatctttatcttcggtaataccgctgcagaggtcgaggcgctgcgcagcaacggttatcagccgcgtgattactacgaccaggatcaagagctgcgccaggcgctgacccagatggggaccggggtgttcagcccacaggagccgggccgctatcgcggtctgctggattcgctgatcaactttggcgaccactatcaggtgctggccgattaccgcagctatgttgactgtcaggacaaggtggatgcgctctaccgaaccccggaagagtggaccgccaaagcgatgctcaacataacccacatgggctatttttcatcggaccgtacggtgcgggagtatgcgcaaaagatctggtatatcgacaaaacgcaactctgagcgcgtactgacaaccaggaaacgccggggcgggtggcaggagaccggccccgtcgatgagcgacccggcagcaacacataaataagcctgacggatatgacaggagagaaaaatgacggacagtaaacgcgcaggggagcctgcacaacagagtgatttgattaacgtcgctcagctgaccgcgcagtactacgtactgaggccggaagcgggcaacgcggagcatgcggtgaagtttggtacctctggccatcgtggcagtgcagggcgccataacttcaatgagcagcatattctggcgatcgcgcaggcgattgcggaagaccgcgccaggaacgggattaccggtccctgctacgtgggtaaagatacccacgcgctctccgaaccggcctttatttccgtactggaagtgctggcggccaacggcgttgatgttatcgtgcaggaacacaacggtttcaccccgacgccggccatttccaatgccatcctggtgcacaacaaaaaaggtggtccgctggcagacggcatcgtgatcacgccgtctcataacccgccggaagatggcggtattaagtacaacccgccgaacggcggcccggcggataccaacgtcaccaaagtggtagagaatcgcgctaacgaactgctggcctcgggtctgcagggcgtcaggcgcatctccctcgatgcggcactggcatccggtcatgttaaaaagcaggatctggtacagccgtttatcgaagggctggcggatatcgtcgacatggcggcaattcagaaagccggcctcaagctcgggatcgatccgctgggcgggtccggtatcgaatactggaaacgtattgccgggcactacaagctcgacctgactatcgtcaacgatcacgtcgatcaaaccttccgctttatgcatctggataaagacggcgccattcgcatggactgctcatctgagtgcgcaatggcgggcctgctggcgctgcgcgataagtttgacctggcttttgctaacgatccagattatgaccgtcacggcatcgtcacgccggcagggctgatgaacccgaaccactatctggcggtggcgattaactacctgttccagcatcgcccgcagtggggccaggatgtggcggtgggcaagacgctggtctcttccgcgatgatcgaccgtgtggtgaacgacctcggccgcaggctggttgaagtgccggtgggctttaaatggtttgttgacggcctgttcgacggcagcttcggcttcggcggagaagagagcgcgggcgcctcgttcctgcgttttgacggaacgccgtggtcgaccgacaaagacgggatcatcatgtgcctgctggcggcggaaatcaccgccgtcaccggtaaaaacccgcaggagcactacgacgaactggccgcccgcttcggcgcgccgagctataaccggctgcaggcttcggccacttccgcacagaaagcggtgctgtcgaagctgtcgccggaaatggtcagggccagtcagctggcgggtgacccgatcactgcgcgtctgaccgccgcgccgggcaacggcgcatcgattggtggcctgaaagtgatgaccgacaacggctggttcgccgcccgcccgtcaggtacggaagacgcttacaagatctactgcgagagcttcctcggggaagcacatcgcaagcagatcgagaaagaagcggtggaaatcgtgaatagcgtgctagcggcgcaccagtagagcagttgacgtactccgctgagccggagtacgtcatagttacccggcgacaccaatacaggcaccactttgtcagaacataaggaacgggacgcttcgcaaaaggtattgctgcggggactatatgaatatctatgttattaccaataataatttcatgcttgtaggtctgaaatgtatgttcagcgacaacagcctctccgtcaacagggttgtgttttcacgggtcagcgatattgccttcagcaacagcgatgtggtgattgtggagtcagagctgaacaccggcgatgccgaacgtctcaagtacctacacatttcaccggtcaatcttatctttttattaaaaccggcgtcaggaatgagcgggacagggcgtgaagcggtatgcattgacactgaattaagcggtaatgaatatctcatgatgaggcaggcgtttaaaaaaatggggatcaatctgaagagggacaagttgtcatttaccaaaagagaaacacatgttatcaatatgattttaaatggttattcgatagatgaaatttcccgtagcctgctgatctccaaaaaaacggttcagtcttttgtcggtattgttttgcataaactgaataccaccaaaataagtggaatataccgcaaaaaaaatctcatcatcgacagttttgccaggaggagcctgcatcgttaggatgccctataaactaatgatctgcttatggaaagtcactatttcatatattaagtttcaactaaatttgttataaattattttatgttgttatgttgaacggggtttgattattggtatgcttcagaaaaaataaacatacatcatgggtgctaacatgatgaaaatatatgaaaccatagtcatcaaatgatttaagcatacaataaataatataggattatatcctctatctgtgaatggtgggcggcagaggaaaaacgggatatatatttatgcatttcatctttttattataaaaaactgttatgtaaattctgtagcgggagggggtatgtttagtgaagacgcacactatgaatttctaaaaagatattacagagcggagttttttgaaggaagaaatggttccatttggggaataaattattcttacaatttggcaagggtgggtatgaatatgcttgaaagatatggctatgggataatattaaagcatgaatctatcactggtgaaaccatttactatgatcgtagtctgacgatactatttggtgacagaattacacaggccctgggaggtcagtattgcaacagagaaatgagagaataatgatttaatatattttttaatcgctcgttaaacattggaacttttctcagaacgtgactgcaatgtcttcaacgcatctaacatgtcgtcgccgttcagtgagcgctgcgattatttctctgttggttttctgcgccgccgcaaagagccatcaccggcagggatcgcctgtgaacggttgttatcgcgtttatcctgaacatcaatctaaattgaaatgtccgcatgtaggttatgtttcagcctttgccgaagatgtctttactccgggtctgaagttgctgcagggcttccagcatgtcgttatggtccagacttcgttgtgatttcttgccgggttgtttctttctgcgtgaggtctggccgtccagtgatggcagggcctgtgagcgggtgttgtcccgtttgtcctgaaccagctttatcatttccagggcacgtcccagacgcttgttgtcgatgatggcgccctggtccagttctcccagtcggtcgtaagtggtaaagggcagggaagtgccgctggcccggagctcaatgtcaccatccgggtattgccatacctcgatgtacttcccctgaaaacgccggttttcttcattatcttcaagcagataaagctttttatcatactgtaatgtcaggtttttcgagaccttacgctgctcgcgccaggtgaatgtcgcctgcaggttttcgccattatccagctggcgatgtacgtcaaaatcgtgacgtggcggctttgcaaaccgacggttgtaatcttccatgaactcatcagcaaaggcgtttgcagcctcaggtgtgctgataccgcggagccgcagttccttgaccaggcggtcctgtaatgtcagatgagcccgttcaacacgccccttggctgaactggtgttggcacagataccagtgatattcagctcgttcatggcacgaccaaactgagtctggccatctccgccggtggcctgcttgttgttgatcctgaagacgctggctttgtcgctgtagaatgccagaggcttaccgtagcgctccagatatccccgggtggcttcaaaataggtgaacgtggactccgaactgacgaacagaagctgcatcaaccgacttgttgcatcatcaacgtaaacgagcagcgtgcaggccggaccacggtcctcgaaccagcgatgttcactgccatcaatctggatgagttcgccggtgcaggcccgacgtgggcgtggctgatgcacacgaggtggccgtaacttacgagggatccataaaccatcccgggtcataagcttacgtacagtctctttagcaagataaaggtcatgaatctcagcaagcttctcgcaggccaatgtcgggccaaagtcggcgtaacgttcgcgaatgatgcgcagcgcacgctcagcgaggccaggcatcaactgtcggttactaggctgaccacgtcggcggttaacccgcgatagcggtccgtgttcacgatagcgctcgagtagccggcggcagtgcctgtcagagatctcaagtcgggttgctgcaagacgcgtggtaagacgccggtcgataacgtcctgcaggatcctgagtcggtttacatcgttcatcgagaaaaactccgttccgtatgccgtcatgagtctcatcctttgaaagcagcgatcgcggtggcgagactgtagcgcggacatgtctatttggtcagagacggacatctcaatttagctgttacactgtatgtctagccaatgttgaaatgtcgtgctgaaaacaaagctgacctgacgtcagtggagagtctggacaatgcctttttaaggttgagtcaggctttggaggaagaacgtggttgccaggttttctcggctatcatcagtttacgtacggtctcttttgaaatccggacaccgtattctgtggtcagaattcgccagatggctgacggattcataccccggccgcgtgagcgaataagctgcagtgcctgatctctgatggtggtgtttaactgatgattgccgggctttccacggcgccggctgaccagaccggctggccccagctcgcgatagcgcttaatcaggcgggagcactgacgacgggtgagctccatggactctgccacttctgccagcgtgatttcccgcgccatataggcttcaatcaaatccaggcgtagcgcttcgtgaagtgtcaggagcactggtttgttgtcgtccatttttctctcatctgtcggccatatcagatccacaggtgagggaagggctcatcgcttcaggctggggataaaatcctgcggactggccagcaccgggttgatcgccctgagctcttccagtgcacgctcctgagcgcgcctgcggggcatttttgtactgcgcattcgctttccttcagcctccagctcgtcctgtttctgctgtgccagcctcagaacggcacccagtcgtttgttatcaacaaccgccccctgatcaacgcaggtcagtttatcgaaaatcttataacccagtggccggtgctgatgccggaaagtaatgcttccgtcagggtaatcataaacggtaattttttcacctgctatgcgcgtattttgttcggtgggttcaatgatatacatgactttatcatactgaaaagtcagtgctttcgataaggtccgtagctcctgccaggcgaagatatcattcagctccagtggactctgtgtgaccgcacggtgcagatctttagggtattttgccggccgggagaaacgacggttaaaatcagacatgaaatgttcaatccactgattggcttcagcaaccgagctgatgttctgcaggcgcatctctttaatcagtcgatcctggagcgttttatttacccgttccacgcgaccttttgcctggctgctgttggcacaaatcaattcgatcgccagttcccggagagcccgtccgaactgggttgtgccggtacgtcggctctcgggtccgctgaccctgaacaccgcatgcttgtcgctgtaaaatgcgacaggtttaccatgtttatcaatgtattgccgggtagccatcatgtagtcaaacgcgttttctgaatcacagaatcgcaggtgcatcaggcgacctgtggcgtcatccatgaagaccagaagacagcattttggggctcttccttcgaaccagtcatggtgagagccatcgatctgaaccagttcgccgaaacagtcgcgacgatagcgcggctggtaaacccgggttcgccggcgggaatgaggacgccagagaccgtcggctgtcatccagttacggatggtttcaacggagagatatatatgatggcgttcagccagtttttcggttgcgagcgttgggccaaaatctgaatagtggcaccggatcaaatccagggctttacagcgtgtttcttcatcgatccggttgtttgcaggacgtccacggcgggaagatgcaaatgcggttgcgccatctgtccggtacagacgcacaagacgctgcacctgacgaacactgagcttaagtatgtctgctgcgtcgcgctgaagcaaagcccggtcaaatactcgctgaatgatgccaagccggtaaagttctttgtctgtcatagtcaccaacataagatcgcggtcctgtgctgagcaaaatgaaggcttagcgtacacgacgcgtgtgaattgtgctgagacgacaataacgctttgtgctgacaatacaggtgcgcataacaaagattatgttaaatattaaaataaataacataaaaatcaatatgttaagacggtaaccagctactttcccattccagcaaccagtcatggaagctttagaaacagagtcctctcatgagtttgtgatgccttaaatccatggtgagcatagaaacctttggcttcttcagtaagcgcatgaaccattatcgcacgaaccccaatgttctcagctacgcgataacaccgtagaactgcatcgtggagtaaatcggcgccaaccccttttccgtgcaatgagacatctaccgccaggcgagcgagtataatcaccggtataggatctggcatgttacgccgaagactacctgtcgcttccgtatggttaacgctaccggtggccaaagagtaaaaaccagctacttgcttcgtacccgtcttgcaaacaacgaacgttcgggcagcgccaagagcttgattttttaaacctctctgttttagccattcatcgaggactgtctctccactgacgaactcagccagctgatgagagctggataacggctcgggcgtggttatacgtcccactgaggtttccttgccagtagtttattaatggcgggctcatcctcgactggtgcatcgagcatatcgatgaactctgcatactgttcgtcgttaaaattgaaaacacggcgatcaaggatcacattctccgcagccttgcaggccatctccaggataaagtcggttcgcgatttatgaaggatctctgcagcagcatcgatgagtgctctctgagactctttagctcttaggttgagttgaacatctgatttcatacacacctctcttgtatagcaattgatatacaagaataacacaacacgaacgtatagcaaatgctatacacttcaaagtaccgataatgcgttttatgttaaatatcatacatttaatgaaagatgatggctgatcttctgcaatagtcagctcattatcgctgcaggcgtggcttcattctggatagatggagtcttttctggcattaatgccctgaagacgaacacggtcgttatcaggcaaatggatacccatcatgcgaagaataaagccgcgccacccccggttaacctgaccgttatagtcatacaggtctgcattttcttttttaagctttgaccattcatgcatgagtgttagtgcatcgagctcggtgatgtgcttcacttcatcgccgatacgtactgtgttaatgcctcttcccgtcatgatgatcccctccggcaatatcagtttcagattaacgctgttatgatgatgatttaactacacactaaaggcaatctaacgtttaatcatacctctgataataaagaacatcatggttaatgaaaacacaatcagaagccagccaaagggtttggcatcaaaaacagtagtgatgcaatcattagtacaggtaaccaacttcggggtgacaatagaaattccccacccaaaaataactaccatagtgcctgctactgcggctaagaaaaaagtggtgaagaatgcgcatccgactacaagtaacaatccaatcagttcaaatatcatattcatgattgcgctccaggtgagataactgcgaacagactgatgctggctgttttatttaacatatttccagacgcctgcaggaattttatcataaaacttccccattgccatttccgccagccggtgatccactgcggcattaaagtgctcaagttcgtcatccgtcagggaatatttatttttttctattatcctttccagagtttccttagatgtacagcggcgtagtcttaaaatccattcctgtttcgtcattggttttttatatcctgaggtgtcccggtaatttcattttggaagaagatttcctttcagccggttatgagtgaaccattttgcatatatgatgtaacctacaaaagttaagagtgcggacagactatatatccctagaacaggtaccacgtgatgaaaacgtatcatctgaccggattcatctgccagactcattaatacattgctgtatatttcagtctgaaaaaactcgtagtaaggtaccatcactacatgaagaaaaaataaattaagcagatacgtcagagaaaacgcgtgttcctgcccgttatagggcgcatactgcgcaaaggcgaaaatccagcctgtgaaaagcagaaaacacatcgtgaaatacaccaccacccatatcgctgttttcatcactgcccctcagttatataatttttctgtaacgcaaatttcttcaggcgttatggcccgtgccgttctgcttcagataatcactgatgctcaggccggacaagcgaattttatccgaaatctccctgaactgctcctcccagccgtcctgcagctccctgattgccgcgatctggaaagcaacactgaaaggcgttctgcccagtttctcggaaagccagaaaagatgcgtaccgatctcttcatccgggaccggttcaagcgcatcactcagtaaggttttttcgtcttcctgccagggatgaccggctcgcggaaaacgcggatcaggctggcggtcttttttctcccttttttcccgtctggcaacggtcggcgcttcgccttttttcatgctgacgcgtgctttcatggcgccgatggccgccacggcccgcaccagggtttcacgctcctggcgcgtgagcaggctgtcctcacaaatcagggtgttcaggttatcgatcagcgtattcagtccgggttcagtgactttcattttatgctcctgttccttgtgtggtggcgatcagtcccggctctcattcacctgaacgatgaccggcaggcctgcatcaaaacaggcctgataccagctggccacctgcaggggatcgccctcttttatccggcgtatgccgccggcatccgtcagctgcaggcaggtggtaccgtccagacggatcacgtaggccgcttccctgatggtgtaatggccgtcacccagctgcagctccaccgcgtcaccggcagccgtctggcgtaacggcagacgccggacgtcggtcagtcgttgtcgtgccgtttcagcctcgcgttctgcctggaagagcggttctgcaatgccgcgaccggcctccgtcagctcgacggccagctgcaggttcggcgcgcgcagggtgcgcagccagcccgcggcttccatgcgccggcaggaggcgcgcaggttcggtccgtacaccggggcgtccccgccctgctccagcacccgctcgatatcccgcgtcgccaccggccccggacgtttcgcatcgagggcggccagcacaatcagtacccgtcgctgcagcggcgacggcctgcgggaggttgttactgctgccatgaacgttgttctgctgtgggagcgcgcaggagcattccggtgaggcgcagatggtccctgtcggcgacgtcttccggggcacggcccgccatcgccaggtggtaccagagttcgatcgcgctgcgtgcccgggcaatctccgcatcggcatcattgcagtccgcacggtttgcccgttcaagacacgcgttaataaaatcttccgtgtcgccaagcatggtttcataactcaggtgaaagaatactttctcatccatcctgcacgctccgtctgattatgtgattaaagaagataaatcatattatatatgatttgttattcatcatttaaacatcatatcagatattattatgcggttaatgataaatatcatatcaagtatgattttgtgagtgtgacttaattatcatatcacttaccggtttcccgccgcgcagatccgatttctggctaagtcggatctctgtaacacacatgtattttccccggaaagtaatggacgtataccagcgtgacagcgtcatctgacactttcacacattcgattttccgaatatatggttgttttttttgtcttcgggcgtatgctttacgcaaccgaacaggaggaataatgccccttacagcccttaagcttttcaaaaacctgtccgatgaaacccgtctgggtattgtcctgctgctcagggagctgggagaactgtgcgtctgcgatttctgcacggcgctggatgagtcccagcccaagatctcccggcatctggcaatgctccgggaaagcggtctattgctggatcgcaagcaggggaaatgggttcattatcgcttatccccgcatattccttcctgggctgctcaggtgattgagcaggcctggttaagccaacaggacgacgtacaggccatcgcccgtaagctggcatcggcaaactgctctggtagcggtaaggctgtttgcatctaaaaaatttgcctgaacatatgtgttttttcgaatgtatgaggtattcagaatgaagacgttaacggtgtttgacccggcaatgtgctgcagtaccggtgtatgtggttcagatgtcgatcaggttctggttgatttttctgctgatatgcagtggctgaaaggacgtggcgtacaggttgaacgttacaacctggcgcagcagcccatgagctttgttcacaatgagaaagcgaaagccttcctcgatgcatccggcgcagaagggcttccgctgctgttgctggacggcgaaacggtgatggctgggcgatacccaaaacgcgctgagctggctcgctggttcggtattccgctggagaaggtagggttagctcccaccagttgctgtggtggtaatacttcctgttgctgaatatgtcaggaggacatatgaaattattacagaatatcccgccttacctgttttttactggcaagggtggtgtaggaaaaacttccatttcctgcgcgacggctatccaccttgccgaacagggtaagcgggttttgctggtcagtaccgacccggcctccaatgtcggtcaggtattcgatctggctatcggtaacacgattcgccctgtgacagcagttcctgggctttctgctctggagattgacccgcaggaagccgcccggcaatatcgggccagaatcgttgatcctatcaaaggtcttctgcctgatgacgttgttaacagtatcagcgagcagctttcaggagcctgcaccactgagattgcggcgtttgatgagttcaccggcttattgacagacgcttccctgctgacccgtttcgatcacatcatttttgataccgcgccgacgggccacacgattcgccttctccagcttcctggtgcctggagtagctttattgaaagcaatccagatggtgcctcctgtcttggcccgatggccgggctggaaaagcagcgtgagcagtatgctcatgcggtagaggcgttatccgaccctgaacgtacccgcttggttctggttgcacgactgcaaaattctacgctgcaggaagtcgcccgcactcatgaggaactggctgagattggcctgaaaaatcaatatctggtgattaatggtgtgctgcctgaagccgaagctgaacatgacgccctggccgcggcgatatggcaacgtgagcaggaggcactggcaaatcttcctgccggtttatctgagctaccgacagataccctgttactccagccagtcaatatggttggtgtttcagcattgaagggactgctggctacccgttctgaggcattaccgctcccggtaacgaacatcctgtacacgcctgaaaacttatcactctctggcctggtcgatgatatcgctcgcagtgaacacggcctgattatgctgatgggcaaaggtggtgtagggaaaaccacgatggctgccgccatcgccgtcaggctggccgacatgggatttgacgtgcatctcacgacctctgatcctgctgcgcacctgagtacaacgctgaacggcagcctcaaaaacctgcaggtcagccgcatcaaccctcacgatgaaaccgaacgctatcgccagcatgttcttgagacgaagggaagagatctggacgaagcagggaaacggttactggaagaggatttacgctctccctgtactgaagaaattgccgtgtttcaggccttctcccgtgtgattcgtgaagcgggtaagcgctttgttgtcatggataccgcccctaccggacacacgctgctgttgctggatgcgaccggggcttatcaccgagagattgccaaaaaaatggggagtaaaggtcattttactacccccatgatgcagcttcaggacccggatagaaccaaagttctgctggttacgcttcctgaaaccacaccggtgctggaagcggcaaacctgcaggctgaccttgaaagagcggggattcatccgtggggctggattatcaataacagcctttccattgcggatacgcgttctccgttgctttgtcagcgtgctcaacaggaactgcctcagattgaggctgttaagaatcagcatgctgaccgtatagcgcttgttccggtgctggcgtcagagcccgccggtattgaaaagctcagagagttgatgagttaattttttgacatctacagggcgacaaagtcgccctgtcaggaggttttatgttactggcaggcgctatttttgtcctgaccattgttttggttatctggcaaccaaagggattagggatcggctggagtgcaatgctgggcgcgggactggctctgatatctggcgttgtgcatgtgggcgatattccggtggtgtggaatatcgtctggaacgcgacggcgacctttattgccgtgattattatcagcctgctgcttgatgagtccggctttttcgaatgggcggcattgcatgtttcgcgctggggtaacggtcgtggccgtttgctctttacgtatatcgttctgcttggtgcagcggtggcggcactgtttgccaacgatggtgcggcacttattctgacgccgatagtcatcgccatgctgctggcattagggttcagcaaaggcacgacactggcattcgtcatggctgccgggtttattgccgatacagccagcctgccgcttatcgtgtccaacctggttaacatcgtttctgcagacttctttggactgggcttcaccgagtatgcgtcggtaatggtgccggtggatattgcagccattgttgccacgttggttatgctgcatttgttcttccgcaaggatatcccaccgacttacgacctggctcttctgaaagcaccggcaaaagcgattaaagatctggcaaccttcagaaccggctggatagttttaatacttctgctggttgggttctttgtccttgagccgcttggtattcccgttagcgcgattgcggctgttggagctgtgatcctgtttgcagtagctaaacgaggccatgccattaaaactggcaaagtgctgcgcggtgcgccatggcagatcgtcatcttctcattggggatgtacctggtggtctacggtctgcgcaacgccgggctaaccgaatacctttcaggtgtgctgaatgtacttgcggataaaggactctgggctgcaacgctgggtactggcttcctgacggctttcctgtcttccatcatgaacaacatgcctaccgtgctggttggcgctctttctatcgatggaagcaccgcaacaggcgttatcaaagaagcgatgatctacgccaacgtgattggctgcgatctgggacctaaaattacacctattggtagcctggcaacgctgctctggctgcatgtcctttcacagaagaatatgaccatcacctggggatactatttccgcaccgggatcgtcatgactctgcctgtgctgtttgtaacgctggcagcgctggcgctacgtctctctttcactttgtaatgagatactgatatgagcaacatcaccatttatcacaacccggcctgcggcacgtcgcgtaatacgctggagatgatccgcaacagtggtaatgaaccgaccgttattcattaccttgaaaatccaccgtcacgcgatgagctggtcaaactcattgcagatatgggcatttcagtccgggctttgctgcgcaaaaacgtcgagccttatgaagaactggggcttgaggaagataagtttactgacgatcagttaatcgattttatgcttcagcatccgatcctgattaaccgtccgattgtggtgacaccgttgggaacgcgtctgtgccgcccttccgaagtggtactggatattcttccggatgcgcaaaaaggcgcatttgctaaggaagacggcgagaaagtagtagatgaggcagggaaacggctgaaataaccgaaagggggcgatgccccctttctcctgcctcagcgtccgggtaccggactgtccggcagcgtacagctcccttttcccagctgacgctgcagcaacaccgtgtccagccagcggccatgcttgaaaccgatgtccttcagcgtgccgatttcagtaaatccggcgcgaagatgcagcgctacagacgcgacgttcgcactgtcccccacaaccgctatcatctggcggtatccctgagaccgggcccatgttaaggcatgatcgagtaaggcttttccgcccccctgccgctgataagccggatcgatgtacaccgaattttcaaccgtaaaccggtaggcatggcgttcgcggtagcgggagagataacagtagccgatgaccgtctccccctgcagggcgatataccagggaaatccacgtgactgaacatttttcacccgggcaagcatttcctgcgtgtccgggggttccgtctcgaagctgcctgtgccgtgcaggacatgatgggcgtaaatgcgccgtatggcgggaatgtgctgctcttcagcattgataatgtgcattgtatgactcctgtgacgttgactgacacactaccggaattcgcgacggcagattaagcgcttcatcttatgacctgtataaggaaatgttttaagtggaggtagggcgtcgccccacctgtcagcccgccatttcagccagcaggtccacgcctaccgggtcgtccttcagcagtggcgtcagggcaatgcgctgtgcataatgcccggcaacgtcgtcgatcagcggcagttcgcgacgggcacgggtgaccaggaacggggaggacggcttcgcggccgcgaggctgttattgatgacccacgcccagggttcaatcccggcccggcgtaagtcctgctgcagcccggccgcttccagtaccggcgtggtttcggcaagcgtcacgataatgactctggtcttctccggatcctgcagctgcatcattggcgttatcacgtgatcgtgagcctgccccatctggcgcaccatttcccggtgataggccccggttgcatccagcaacagcagcgtatgcccggtgggcgcagtgtctataatgacaaaatggtcgttggcctctttgatgatccgggagaatgcctgaaacacggcaatctcttcggtgcagggggaacggagatcttcctccagtaccgccagtccctcttcatccagaccttttccctgattttccagcacaaagcgacgatagcgctcagtctctgcttttggatcgatacggctgacctgaaggcctggcagcgagccatccagggtgtaagacaggtggctgccggatcggaggtggtcaggtggactttatgaccgcgtctggccagcgagaccgcgaccgcagccgccaccgtggttttccccacgcccccttttcccatcgtcatgaccagcccttttcccgctcggctgaggtcctccaccagggaggcaagctccggtaaatcgaccgtcgtgagcgtggctcccggatccggcagaacaagtgtgctctctgtaaacagcgccctcagggcttccagaccaaccagattaaaaggcttcagatacagcatcgaccggggaagatgcgcgaggttttcaggcatggcccgtaaggcccgttcctcccgcgccagaatactgtgcgccagcggatcctgttcaccggcaaagggaggcagcacgccattgatggcaaggtgctgatgctgcagaccgatagccgacagctcctcgtgggtatgggagacctctttcagggtcgacgcctgtgcgcgggcaaccagaaccagtcgcgtgagtgccgtatcagagagggctttcactgcgtcagcgtactggtcctgttgtttctccagccccaccagagggccgaggttcgccgcagcatcaggatgtgcatcgaggtacccgctccaggcgcccggcagctcaagcatacggatggtgtgtccggttggtgcagtatcaaagacgatatgatcatatttttcgcgcagttcatgactggtcagcagcgcggtaaattcatcaaacgccgcgatctccgtggtacatgaaccggaaagctgttcttcaatgttgctgatgacatcggcaggcatcagttcacgaacaggatcgagcacgcgatcgcggtaagcctgcgcggccgccatcgggtcaacttccattgccgcaaggttttccacggtgcggataccagtgatccggtggcccacagtctggctgaagacctgaccgacattggaggccggatcggtactgaccagaagcgttctccggccctggtcagccagccataccgccgtcgcgcaggccagagaggttttccccacgccgcctttgccggtgaagaagataaacggggggatattctgtaaaaatggcatcgtcattgttgagctcctccgggattaaggcatacggggaatgctgcagcagcgcggctgcgtgctgtcttcattccagtcctgcgtgagggaaataccggcccagcgggcgatatcttcccgggacgggagcttgcccgccatcaccagctggccgtcaagcagggtagcgggaagggactccattcctgacgtgttcaggaaggccctgatgacgggcgtattcaggaactgctgcgggttctttgccaagctgtaacgctgaatattcacaccatgctttttcgcccattcggcgctggcgttccatttgacggcttcatcgctgaccacgacgctgctggtcgcacagcagcctgcggcttcaaagatctcaatttttgacatggactgtttacctcagtgttgaatgatggggctttacactgaggtaaacgagtgaggcgggaaaaagatgcgcggttaatccatttttttatggcagcagacggaagacgcatcatccacttccacctggcagagttccgtcatcgtcttcttcagatgtttccgggcgcgaagcaggcgcgacttaaacgccgtcagcgtgatccccagctcgtcggccaggcgctgctggggacgccggttcagatcggcctcttctatcagccatctttcctcgtcaggtaaggcctgcagggtttcaggcaggcaaatctccagcgttgaaaccgcctcatggaaggcgtcaggcagcgggatctcgtcttccagcaccacgacgtctctggcggcacggtactcatccgtcagcagattcctcgccgtccggtacagccaggcccgcgggttctccatttcacagaagcggtctgcacaggcccgggcgcgcaggaagacttcctgaagcagatcggctgcctgctcccgatcgcctgtccttgatgccagaaaacgggagagctctgcttcatgctgttgccagaacacgctcatgcagttgttgaatgccgttacatcactcataccagccctcagattttgctctgattcacccgccgggaaagtgcttctgccgactctttacgttcactgtagcgatcgacgagatacgctgcatactcccgggtcagcagggtaaacttcatcagctcttccattacatccacaatacggtcgtagtacggggatggtttcatccgtccgtcttcatcaaactcctgccaggctttcgctaccgaggattgattaggtatagtaatcattcgcatccagcggccaagaatacgcatctggtttaccgcattgaaagactgggagcctccgcagacctgcatgacggccagggtttttccctgagaagggcgtactgcgccctctgatagtggtatccagtcaatctgggctttcataatgccggtcatcgcaccatgacgttcaggagagcaccataccatcccttcagaccagcgcaccatttcgcgaagttccataaccctgggatgcgtatccgctgcatcatccggcagagggagaccggaaggattaaagatgcggacatccgcacccatggcggtaagaagccgggcagcctcttcggtggccagacggctgtaggaccgctctcgaacggaaccgtacaacatcaggatccggggaggatggtcaactgtctttacacccaggcggaccccggtgagacctgtatcaaacagctcaggaacaacatttttcagttcagcaatcattttttctccggtggtgacataaaaccaggcggggcatattcgtctgcacagcactcttctgtcagaaaggcaatcaatgcagcaaggttgtcataacaggcgtggcagaacagtgttctcccctgcctttcctggcgaaccagtgagacggatatcagcgatgaaagatgatgactcagggtcgaggccggaatggcgagatgttgctgcagttcccccacgggcagtccctgacgtccggccttaacgagtgttttgtaaatatcgagacgagtggtgtggccaagttctttcagcaccatcgcggcgattttcagctccatcccattcctcgtaattttatttctatatttccagaataatagaaatatatagtgagcgcaaccacgtccataatatgactccatctccggggccttacacttacgcggcatggagaaaacatgatcggtgtttatacctctcagaaatgaggtacgtcacaatatatatggaaaaatgcatatgaatccgtcacagtagaaaccgattcccgctaaaaataaaatgaccttcatcctttgctgacgggcgcattatgtcccgccgccgggaagcccaggcaggctcgttttctgactgcctatgaatacagcaaacatacggtacagagaaatggcagagatcatcattagaaaaatgcacgaagaggactggtgtgcagtcagggaaatttatcaggaaggaattgcaacagggaacgccacctttcagaccgcagcacctgagtggctggaatggaatgaagggcatcttcaggactgccgctacgtcgccactgttgataacagagtggtgggatgggctgcgctatctcctttttcccgccggcatgcataccgcggtgtcgcagagctgagcatttatgtcagtactcattttcagggaaaaggcgcgggcagggctttgctctccgggctgataaagggctcggaaagtgcgggtttctggacgctacttgctggcatctttccggaaaaccaggccagtgttgctttacatcgcagccagggattcagggaagtcggctgccgggaaaaagtgggtgaaatgaacggaaaatggagagatgttctcattctggaaaggcgtagccggacagtgggttgctgaaaaaaagaatgcctctgttcatcagaggcattctgtcctggaagggactttattccggtgagggtgacttcagttgcggcataaacagctggcagcacgcaacagctacaagcccgccagacagcggagcggcccagtacagccactgattatcccagtatcccatggccaatgccggcccgaagctacgggccgggttcatgcttgcccccgtcagcggcccgccaataaaagcatcaagaaaaacagcaatgctgataatcgcggggtttctggtcgttaggatgctcataatcagaataaaagtcatgacaccttcgatgaaaaaggcattgtacagtgatacccccatatggacccgggtcaccccggccagcagggagtggccaaagacagccttcaggcacagtgcagcagcgccggcccctaacaactgagccacgatgtaattcatggttgccctgaaagagcaggccccgatcagataaaaaatcaggcttaccacggggttaaggtgtgctccgctgtcaacaacgggtaaaaagtgggtcttccgcaacttaggtggacaaaaattgatgaaactttttagttaacaaggatctaagctgttttaagttatgtataacaaaatggcctcacttaagagacttttacagctaccgcgcgggtggcaaacctgccgacagattactggtactgatggaataaccctccatctccgcgccacacgtaaaacggcatcatgtcctgagtgcctcacgcacagtcattctgttcatagttgccggcggaggcgagtacagcatcttccatgctcaggccaggccctctggttagtcttcgccatccggcactggtactgtcgtaacccttcctgttcacgtaaaatttttgctgaatcgcttgctccctttgcaggcccgcagcagcagtcttctgcattgctgaaaaatctgcagcatcagctggggcttatcgcaggtggtgaagcagggagacgagctgcagtagcttcaggaatacagatcagcgcggatactttactgcgcagagtggttcaagctccggaacaaacagagaaccggaccaggcatgttggtattgacgagtgggcatggcatcggggccacaggtacggcacactgatcgtaaatcttgatacccatcgccccctggtgttactgccaggccgggagcaacgcactctggcggcatggttcaaaaaatacccagaaatacaggtcgtctcacgcgatcgtggggggatctatgcgttagctgctcgcgatggtgcaccgcaggcaatacaggtggccgatcgctggcatctgctgaagaatattggtgatgcgctggagcgcatgatgtacagacacatgccattgatacgactggtggccaccgagttatccccccaaaaaacagaatgctgaagcgtctttggtgccaacgtcaacgttacgtcgccctgaacgtattaaacgagagcgacgtgacaaacggtatcagcgctgggctgaggtagactctcttcataaaaagggttgtgggataagagaaatatcgcgtatcaccggactgtcccgggtgacggttcgccggtggatacagtcaaaagcgttccctgaaatatcaactaagccacccagacccgggttacttgaaccatggcaggaatggctggaagaacaacggataaacggtaaccataatgccgggcagctatggcgggagatggtaaatgctggcttcaccgggagcgaaacgacggtcagggatgctgtggctaagtggcgtaagcaggttaacagtcccgttatcgccccagttcgactcccctcagcatccagagtaagccgctggttaatgccctggcgaatgatcagaggagaagaaaactatgcatcccgcttcatcgaatcgatgtgccagaaagaaccgcaactgaaaatggcgcaacagctgtcgctcgacttctatcgaatgttgaaaacgaagaataaatcgcagttaaatcaatggttctctgacgtcagtcaaagtgggctcattgaccttcagcgtgttgcggccggtatggaagcggatgcaacagcaatacacgaagcgataagcagcagatggagtaatggcgttgtggaaggccatgtaaaccgcctgaagatgctgaaacggcagatgtacggtcgagctggcttcgagttactgcgacgacgagtcatgagccctctggcttaaacaactccacctaagttgcggaagacccagttttgcaccgttggtaacagtatagcagcggtgtttgacgttctggccatgcatgacataggcacgcatcgcgcggagctgggagacaatatctgctcgctgccggtggaacagcacatgatctattttgtgtcatcacattcggtggttatgatcattcgtattctcagccagtctcaggatacggcgcggcatgaaccctggatataggatataaccgggaacgaaaataataattaaaaacaatatgatactgatatttttttcatgaactgaattctcgcgcaacataagttaaattttatttgatcagggccaattatgataatggtgatggatgcttttgatgacacttattaattacgaaaaaaaacgctcccggcgggagcgtaagccagtgacttcggcgtcaaatgagggtctgacaagtggagctgcgggttaattctgggtgatctggctgcgatgcttttcagcctgctgctgatgaatcactgaagactgaccattattcgccttctcgtgtacaacagcggctttctcatgctcgttcatttcggaaaatgattttgctgtttcgttagaagctgctggcttggatttcatcatttttttatgcatttcagccatgtcctgatgggcagaagcgttgccgttttgcatcatttcatgggtcattgcagcctgatcgtgaccgctcatatccatcattgtcatactgtctccctgaacagcgcttttttcagaggttgactgcatctgatgggcgggtgcctgggcattatttacctggtcatgcatgttcattgtctctgcagccatggcggatgaagcgacagccataatggcaacaaatgatacaaggatctttttcatggttgggtctccggtgttttcatacccaaacaatcaacggcttataacagagaaagcatttgatctcagggctggttgatcatcacgccaggaaccgggcgattgaattatcacgctgtcctgatttatggctgattataaaaaaccgcctctgtttatcgcgtgactgaacgatgacatttttgtcaccttccgggtttctcctgaataacggtattaatccattaacagacgcacactgaacacaatttcccgcccctgctgttctgctgacagctcgccgccgtgagcatgaatgatcgaccttgtaattgataatcccagccccgcgccttccgtgttgtagaaccttgatgagtctgcgcgatagaaccggtcaaacaaacgttccagattagcgggaacctggccggacatcgtattcgtaatcatcacgttcacacagtcactgtcacgctcaatgtgtatcgctgtacaggtgttatcgggagaatacttgattgcattggaaagcaggttactgaaagcacgtcggagcatatcgctgtctccggcaacaacgccctctccttcaaccgtgattgtctttcctgtttcgtctgccaggggctcgaacaactcacgtaattcattcagttcggctgccagatccacatcatgtttatccagccgcagcagaccatgctctgaacgtgccagaaaaagcatgtcactggtcattcgtgacaaccttttcagttcttccaggttagcgaataaaatttcgcggtaatgcgaaacatccctttccttagccagtgcaaactgcgtctgcatcatcagattactgactggtgtgcgcagctcatgcgcgatgtcagacgagaaatctgacagtttccggaatgccccctccaggcgatcaaacatattattgaactcctgcatggtctcagagatttccggcggagccagatcgggatttagacgctgatccaggctgtgtacggtcatggaggaagccagactggtcatttcccgtagcggtttcagaccaatacgtgtggtcagccagcccagaaaaacagaaataaagaccagaccgatattgaaccagaacagccaggtactgagtttgtccataaacagggtgtgatacccagtatccgtggcaaccgtaatgatgacatgtttgcttttaccctgttccggcgtcacggcaacccgccgcgagatactgcggtacacggtgttattttcttccgtctggatcatatagtcgagaatatcacccgacttattaagcaggaccgctggaacaacagaatttttggcatagagttcaacaattttttcattttccatgttttttatagaaatgaataagccattgtgccccaccatcgcatcgtttattttttctgataatgacttaatatccgttttgttcctgaacgtctctgttttaagaaactcttcggtgagctgaagtttacctgtcagaaaatcgcggtcctgattatcgaaatagccattcagggtgctaatcaggataaaacttgataaccaccataccgtaagcatcaccgcagaaaaaatcaggctcaggcgtgtggtcagggaaattttgaacctcactcttctctgatctccaggacatatccggcaccgcgaacggtatggatcagttttggctcaaagtcatcatcaattttacttctcagacgtctcacggcgacatcaatcacattcgtatcactgtcaaaattcatgttccagaccagggacgagataagactcctgggtaacacttctccggtgcgttgcagcagcaactcaagcagaacgtattctttaccggtgagatggatcttcttccccgaacggatcacggtccggcgcaccatatcaacggtcatatcggcgatggtgcagactgttgcggcctgcgagcgtgcccggcgcagtagggttcttacacgtgcaaccagctccgtaaaatcaaagggcttaatcaggtagtcatctgcgccaagctccagtcctttcactttgtcccgcacgttgtcctttgcggttaaaaacaggaccggttcttcgtgcccggactccctcagtgcgctgatgatttgccacccgtcgaggaaaggcagcatcacgtccagtattatcaaatcatactgtcccttcgacgcggccccgagaccatcgcggccattattaaagagatcggcctgatagccttcctcaaccagtccctgctgcaggtaacgacctgttttttgttcgtcttcaacgattaaaatacgctgcatggtcaactcgctgatatgaaagtaaaaatctcacgcatgagctttggctgtcccctagctgatctgagacggagcaagcattccaagccacgctacggcgcccagaatgataatcgcaacaacgaattctgtcaggatgctgtttcgcatcagggcaacgctgcgatcataattcccttccctgaccataacttcaagccggggacccaggtgaaaccggtttgctgcagccagaagaagcatcagaacaaacagagccgtcttggcaagcaatatcctcccccaggaactgttgaataagggagttaagttaccctcagcaatatacagatagttgaccagcgcactcaggatcagggctacaacaatcaccgttcctgccgtggcaaattttgccagggagtcagatatcacaatgacgctctgtgcattatgctcgtttctgcgcatcagcaggatagcaaatgcaaccagagcacctgtccaggcacctgcagcgccgagatgggtcagatcgctcagtaaatggagatagtaatgcagaccgtcatgcataacggcgtgtcctccccaggcaagtgtagccagcgccacgcccccactcatcgtcatcagcaggcaggacaatactctcttattagtgtaaaggaacaaagcaccgagtgtggtaaacagggcacagagtctgacaatccagctaatacccacatcagtttcttctatcaccatctcgataacatggatggataattctctgaggtcagttactccactcatggcattagataccaggagcatattaatgccagtaagaatgatgcctgtaacaacagcaaaggttataaacgacctgaaattagtcaggttataggtttcatgtctgacaccgcttattccatatatctgaaaaaatggcaatccaaatattaccatcaaatccagataaagaagaaaacgaataacaatcataatcaggtcgttcataatattacttcactgtaaaggtgtaattaccggtaatagggtgcgtatctgaagaaaccgcgcgccagtcaacacgataagtgccagcgggtaaaggctctcgcggaataatgaccatcgatttagggtcagcgcctggcgccacttttgccgcgaccggcatcggagaatgtgatgacatgcctttcatacccgtcatcgttaattttgcacctgagaatttcacggtcagattttccgagaaattaagctgaatcttttccggggccgctacggctgaatcagcctgtggcacagagctttttaattccggatgggccatagcagagaaagcaacgcccataacgaggccacctgtaagaatggctttatttaaaatcgacattttatttacctgtttagttgagtgttttatatcagtgcgttaaaaccagattctggctcccgccaggaatactacctgatggtctttctcaccttctcttttcgccatatcggatgttttcccgtaaagttgattccaggaaacgcctatatagggtgcaaactcacggcgtatttcatagcgcagtcggagccccagctctgtgtcagtcagtcccctgccgcgaccccgcgattcatcatcctgactgtagaaattcacctcataggatggctggagtatgagccggttagtcagtaaaacgtcgtattctcctcccagacgaagggctgcttttccgccattactgacaaaacccgtaatttcagactcaaaattatagagtgccagcccctgaaaaccgacagcagcccaggtccgggcagaagcaggtctgaaatcctgcctgacacccgcaaccaaatcccaccatgggccaaccgcatgtccccagagtaactgcgcttcagccgcctccgtttccccattgcttcgttcaccttcactctttagccaaatccgatctgtgtcgcctccaatccagctgttaacactccagctgaaattgttggtgttatccgaccgttgccattccagttgatccagcagaaccagataattaatcgcactgtcgtgaatcgcatgcccctgtaaattgccgaatgcagccttccggtcggcatcggtaacaggcggaattggcgttctgctctcagttacaatgggctccattgacgtcatctcagtgaaattctcatctgctggcatctgcatggcagacatgtcgtgcccggcgtggggatctgcagagacggagcccgccgcaatagaaagctgtgaggtaaacaaaccggcgaccagaacaggtatggccttcaaatttctcttcattcgcatcattcctccacccggacttcacgaaacattcccatttccatgtgatagagcaaatggcagtgatacgcccagcggccaagcgcatctgctgtcactctgtaactgcgttttgtaccagggggaacatctattgtgtgtttacgaaccatgaaattaccgttttcatcttccagatcgctccacataccatgcaggtgaatggggtgagtcatcatggtatcgttgatcagcgtgatcctgagccgctcaccgtatttcagcagcaccggtgcggcatctgaaaacttgattccgttaaatgaccaggcaaacttttccatgtggccggttaaatgcagttctatggtacggccaggttcacgtccgtcaggatcctcaaagcggcttttcaaatccgcgtacgtgagaacctttcttccgttatttcgaagaccaatacccggatcatttaatttcggagagacgctcatcgcctgcatatcaaccagtgggttatccgtttctgacgcaggatgactttgcatacccggcattccggccatccgggaatgatccataccggccatgctgctgtgatccatgggcgcggaggatgtcccgctatccggaaggtcagcaccgtccatagacatcatctctccgctgttatccatgcctcccatctggctgtggtccattcctgccatatcatgtcccattccccccatacccatatcttccatggtcaacagaggacggggatcgagggggggaacggcagcacttaacccttctctcgtggccagtgtccctcgagcgtaaccggtcctgtccatggattgtgcgaagatggtataggcctcaccctgaggctccacaatgacatcataggtttcggcaacggcaatcctgaattcgtcaacggtaaccgggtttacatactggccatctgcagccacgaccgtcattttcagcccggggatacggatatcgaaataggtcattgccgagccgttgataaaccgtaagcgtatcttttcaccgggacggaacagtccggtccagtttttcagcggggcctgcccgttcatgagataggtgtaggtgtagccactgacatccgcgaggtcagtcggattcattttcatttcagcccacattttccgatcggcaatggtggctgacagccccctggtattcacgtcgcggaaaaaagagccaacggttggtttattgaaattgtagtaatccgactgtttttttaattttttcagcaggctgtgaggattttcatcggtccagtcagacaacatgaccacatgctcacgatcgtaagcaaacggttctggctccctggcatcgatgataatggcaccgtataccccctcctgttcctgcagaccggaatggctgtggtaccagtaagtcccgttctgcttaaccttaaaggtgtaaacgtaggtatcatcaggctctatgcccataaaactcagccccggaacaccatccatattggccggaagaataatgccgtgccagtgaatggacgtctgttcattaagacggtttttgaccttcagggtaatggtgtcaccttctttccagcgaagaacgggccccggcaggcctccattgattgttttggcctgacgctcactgcccgtgatattgacggccgtttcaccaatggtcaggtcaaactgagtaccctgcagggatgcggcaactggcaggctcagactggaacgcgcattgaaactccatacgccaagacttccggctacgccagagagggttaaccccttcaggaaagttcgtcgagacgttttcaacagcatgcgcattcccttatttaaagtatggttactgacagaattcgagaaccgatttaaattaaattactggttcatccacttacaatgaaatgaatctagcacaccttaagaaacaaattcattacaatcgtgtaatgtacgtggctgtattacatttacgtcatcttctccacaggttgatttttttatatatgatcataaggacatcttttatgtacctcagaaggtaattacacatgaatatattaatcacgaccactgcgtttacagctttattttgtggggcagcttttgctcagtccagtgatattgcccatgaagcacatcgatttgttaataatgcctcagccgtcagtcatgtgaactcctcgacgcatgaaaacttaccggacagggttaataaaaacaacacgccctcattctctgaaatgaatgaacatgaaagggccattgttgctcattcatttatgaacaacagcgcgtcctatgcgcatcagaaaatgattgaggaacataaaaaaatgctgtccggcagtgatgcaaattcaaagacctcgtcttcttcttttaacgaactgaatgccggagaaaaagccgctctcgtgcatgagcaggtcaataatgccggtgcggaagcacatcagacgcaggcaagaaagcttcgcgggctgtattcgaccaggtaactgcaggcgggttagtgcttagcgtcaggtgcgcagcagggctttactgacgggttacgtagcaggacatgagccccatattgctctgccgtaacctgtttcagtcccgttaatcatcaccgtcgggctggtcatacagttcccagagcttcaggagcaaacgggaaacaagatatgttacaaaaatgacgaccatcaacggtgctcccgattaactgacagatgacacgcctcctgaaaacccctagcatacgccgcagtgttcatgctaacggcgaattccagtaaatgtattctaccgatgtcgtaaaagaaaatgcctacctttcagccacccgctcggggctggaatcgaacgagatcgctactcttcagcgctccttgccttcccggtttaatctgcggcatttgaaaaaaaatgaatcattaaaactcgtactgcaaaagaaagcgggaaaatcacgtgtcgtggcctataaatttacgtccggttcatttaattacacggcgtatcgtatatcagataaaaagttctataacctttccgatacttccgggaaaggcagtctcgattatccgttaccggccacagcaagactcagttcgcctttcaatcctgcaagacttaacccggtatcgggaaaagtgagtccccataatggcattgattattccatgcccatgaacacgaaaatagtcagcgtcatcgacggaaaaatcacccgggccgaatacaacagtaccatgggatattttgttgaagtaacgggaaaagccggtgttaaaactcgctatctccacctcaataaaatactcgttactaaaggggccagggttacccggggagacgctattgcgttatccggtaacagcggacgttcatccggtcctcatctgcattacgagctggtcatcaataacaatcctgttaactcactggcgttccgggcagcggcacccgctgataacaaacttgaacagcatgcctttgcgcatgccagagactacgaacgatacctggaatgataacggggccgcgacgcggccccgtctgccggattaattttttttatcgttttcacttccttgatgttgatgatctccatgccctccgtggccgtggaaaagatgcattagcgggcagaccagcaataacagatatggccagtaacctgccacatgtgaccagtgttcgcgcaggagggcaaatgccgcaatcgcggcgacagcaataagcgcataggtggtacttttcataccggactccttctgttagtaacagacccttcattcagggttatttcccgagcctgacacttttcagacgcaacgcatttgcaatgacgctaacggaggaaagggccatagccgccgccgcaataactggcgacagcagtattccatacacaggataaagcagacctgcagctacaggcaccccaagagcattgtagataaacgcaaaaaacagattctgccggatatttttcatggtgatttctgacagatgacgggccctgttgagtatcatcaaatcgcctttgagaagggtaacgccagcactttctattgccacatctgtacccgttcccatggctatacccacgtcagccgctgccagcgccggggcatcattcacaccgtctccggccatcgcaaccacatggccagacgctttcagtcgggttatcactgcttttttgccatccggcagaatcccggcttcaacctcatctattcccagtttccgtgcgactgcttcagcagtaagctggttatccccggtgagcataacaatgcggatccccgcctgacgcaaagctttaagcgcatccggcgtggttgctttcacgggatccgagatagctatcaggcctgcaaggttcccgtctgtggccacatagataacggtagcgccttccatccgcaacgtatccgcaacggccttttgattatcaataacgatactgttttcctgcatagccagttcattaccaataacaacccgttgaccttcgacatcgcctgagacacctttccccgacggggcattgaaattactgacggcaggtatcacgatccccttttcatgcgcggctctgacaacagccatacccaacggatgctgcgaacctttttcccctgcagctgttacacgtaaaagagatatttccccacccggactgagactgataatccctgtcaccgtaggcgaaccttccgtgagcgtgcctgttttgtcgacaaccagcgtgtccactttttcaagacgctcaagggcttcggcattcttgattaacaccccggcctgggcgcctttgcccacccccaccattatcgacatcggcgtggccagtcccagcgcgcagggacaggcaataatcaggaccgacacagccgcaatgagaccgtgcgccatcctgggctcgggcccccagagagaccagatcaagaaagcaacaaccgcgataagtatcaccagaggaacaaaccagcctgaaacgctgtctgccattctctggatgggggcacgcgaacgctgtgcatcagcgaccatctgaacaattcgtgagagcatcgtttcatcaccgactttctctgcacggatgataagactacctgtctgattaatcgtccccccaatgacagggtcacccttcgttttggtaaccggcatagactccccggtcaccatcgattcatcaacggttgttttgccttcgatcacgataccgtcgaccggaatactctctccaggtctgatgcggagcttatcgccaggcaggacatcttccgcattaatatccgtttcatgaccgtcatgatccagccgtctggcggttttgggggcaaggttcagaagcgcagtaatggcgcctgaggtttgttcccgtgcccgcagctcaagaacctgtcccagcagaacaagcaccgtaataactgctgcggcttcaaaataaacggccaccaggccatccatgtttctgaacgatgcaggaaaccaggaggggaagacggttgcaatgacgctgtaaacccaggctacgccggtccccattgcaacaagggtaaacatattcagggagcggttacgtaacgacattccggcccgggcgaagaatggccagccacaccacaacacgacaggggaggccagaagcaactgcagccatgtgttgtactgtggcggtactgtattcctcaagtcgggaaacagatgagatcccatttcgagtaccagaaccggaaacgccagcaacaaccccagccagaagcgtcttgtcatgtcgtgaagttcatcactcggccccgtggatgccgtagctacgagcggctccagtgccattccacagacaggacagcttccgggaccactgcggcgtatctccgggtgcatcggacatgtccacacaccttcagaattctctttttccgcctggttgtgaggctgttttatctgatcagggctgacttcgtgatgatcgtggtgatggtgatggtgatgggaatgttcactggcatcttcggtaagataacgatcgggatgggctttaaatttactctcacagctggcggagcagaaataaagttggtggtcctggtatcgaatgctgctgtgcgccctgtcgggcaggatggccatcccgcacacgggatctctcaccttatgcaatacgtggccctcgtccggggataatgtctgctcagaagcagtctggttgttgtgttgcactgcattgtcatttttcacagtaactctccttatgcataccgaagcatcttctgtcttcagggtatgtcatggatgcgattaccacgaatatcgccggcacaggagtgcctgctaccggcgtcccgttatcagccgttccgctgactattcgattcgctggaagacttttttacttccatccggtgagaatgcgataacatcgtaagcctcttttcgggctcccatctccattccaggacttcctgctggcataccgggggtggcgagaccgtatatacccgaaccagactgcattgccttatgtatcgttgtcgcaggcacatggccttcaatgatcaaattaccggcaaccgcggtatgacaacttcgtagtcctgcaggaatagcatgcttttctttcagggctgacagcgcctgatcattcatgacgtgagttcgtacttcaaacccgtctttttccatcgctttgccccacagggaacaacagccacagttttcagatttgtacatatcaatcactttttcactcgccatcgcgggtagtgaaaggccgagagccagcgccattagaaccacttttttcatactcacctctgtatattatcgatataaaccctgacgtcagggtgaatcagtaaagaaggacacccacagggggtgccctttcaggttcaggacacgctttttttatgtctgcgcagccagattaatttgtaggcggcaggaataatgaacagggacagcagcggagccgtgatcatcccaccaatcatgggtgccgcgatacggctcatgacttctgaacctgcaccggttccccagagtattggcagcagacccgcaatgatcaccgccacggtcatggctttcggccggacacgcagtacggcaccatgatagagggcttcatcaaggccttccggtgtgaacgtctctttacgggacaattccgggtgcgcttcaatggcatgacgcagatacatcagcatgaccacgccaaactctgctgccaccccggccagggcgataaacccggttccggtcgccactgacatatggaagccctgccagtacaggaaccatatcccgccaaccagggcaaacggcaggctcatcagaataagtaaggcctcatcagcccggcggaatgccagatataacaggatgaagatgatcatcaccgtcatcggtaccatcagttttaatttcttattggcgtgctcgagtaattcaaactgtcctgagaatgccacactggtccccggtctcagtttcactttctcactgatggccgtcttaatatcgttcaccaccgacaccatgtccctgccgcgggcatcaacataaatccagctggctggccgggcattttcggttttcagcatggttggtccggaaacgaccttaatatcggcaacatcgcccagcgtaatttgctgcttcattggggtcaggattggcatctctctcaacgcctgcggactgttacggtaatcctgcggatagcgaatgttaatagggtaccgggccacgccttcaaccgtctcacccaccatagccccaccgattgctgaagagacgaacagctggacgtcgcccacagtcatcccgtaccgggaagctttctcccggttgatatcgatatcgatgtagcgcccgccctcaagtcgctcagccaggacagacaccacgccaggcacggttttggctaccgcctcgatactctgcgccgtcgcgtcgatatcggacagaacagtcccggacactttgatacctatcgggcttttgatcccggttgagagcatatcaatacggttacggataggcggcacccagaggtttgccagacccggtaaacggactgtcctgtcgagttcatcaataatcttgtcaattgtcatgccgggacgccactgatcctcaggtttgagctggatcgtggtttccaccatttcgagcggcgcggaatccgttgcggtctctgctttaccggtcttgccaaatacagaagccacttcaggaacgcttttgattaacttgtctgttgtctgcaggagcgctgcagcttctgccggagagacgccaggcaaggtcgacggcatatacagcagatcgccctcgttaatcttcggcagaaattcaccgcccacctgactcagtggccagataaccgtgaaaatggacaaggccgcaaccagcagggttgtttttggccagtggaggacccgcagcagcaaaggatgatacgctttgatcagcacccggttcagggggttacttgtctcggcaggaattttcccccggatccagaatcccatcagaataggaatgacgatgatggccagtgcggccgctcccgccatggagtacgttttcgtgaatgccagcgggccaaacagacgaccttcctgcccttccagggtaaagataggaataaaggacagggtgatgatcagcaggctaatgaacaacgcgggtcccacttccacggaggcgtcggtaatcaccttccagcgggtggcgttgtcaatctgctcacccggatgctgatgatcccactcctcaagccgtttgtgcgcattttcaatcatcacaatggcggcatccaccatcgcaccgacggcaatcgctatccctcccagcgacatgatattggcgttcagtccctggaagtgcatgacgataaaggcgatacacaggccaagtggcagagaaataatcgccaccagggcagaacggacatgccagaggaacagtgcgcaaacgacagcaacaacgataaactcttcaagaagcttgtaactgaggttatcaatcgcccggtcgattaactggctgcgatcgtaggtggtcacgatttcaacgccttccggcaggctggccttcagcgtctccagtttatccctcactgccgtgataacgtcgcgcgcatttttacccgaccgcaggatcaccacgccgccagcgacttctccctggccgttcagctcggcaataccacgcctcatttcgggcccggtctgcacgcgggcaacatcccgcagataaaccggcacgccgttctcacctgttttcaggacgatgttattaaaatcatcaatgctctgaagataaccgctggcacggaccatatactccgcttcggccatttcaacggatgagccaccggcctcctggttagacgattcaagtgcctgtttcacttcgggcaggctgataccgtactgggacagttttaccggattgacctgaatctggtactgtttcaccacgccgccaaccgaagcgacctcagccacgttcgggatggttttcagctcaaatttcaggaaccagtcctgcagagagcgcagttctgaaaggtcgtgttttccgttgcgatcgacaagggcatattcaaaaatccagcccacacccgtggcatcaggaccgatttcagaactcacaccggcaggcagttttccctgaacctgattcagatattccagcacgcgggaacgggcccagtacagatcggtgccgtcttcaaaaatgacatacacatacgaatccccgaactgtgaaaaaccacgcacggtttttgcgccaggtacggacagcatggtggtggtaagtggataggtgacctggttttctacaatctgcggggcctggccgggatagctggttttgataatgacctgtacatctgacaggtcaggcaaggcatcgaccggcgtgttaataatcgtccatgtaccccagatgctgagaaacagggcccccatcatgaccaggaaacggttggcgacagagcgccggataatccattcaatcatcgtcgtctcctcagtgccctgaatgcatatttacaggctggtcagacattgctggcatactgctttctgttttttcagggtggcgcatacgttccagcgcgcccgtaatattggcttcggagtcaatgaggaacaggccactgaccaccacggtatcgccttcattcaggccggaaccgatgccggactgttgctgtgattcatgcagaacgtggatctgtttcggcacaaacttgccttcatcatcaacagtaatcacgcgctgttctttgccggtatcgataacggcctggcttggtatcagcagcatctcctggctcttggtattcagtttcagataggcattcatgcccggcttgagaaactcatccttattagaaacctggagacggacctgaagcgtacgggttgtctgatccacgctgggaagaatgttccatttttcgacatggaatgttttatccggataagccggtaccgaaatttcaaactgcgacgtatctttcagcagatatgcgatagattctggcactgcagcgctgatccagaccgggtccatcccctgaatctgagccactactttatctttcgaaatattcatgccggtgcgcaggtcaaacgcagtaatgacaccatcaataggtgctttaatggtaaaacgggtctggattgtgcgggttgaacgcagcctttgaatatcctcttccggcataccagccagacgaagtcgctccagaaccccttttatctgggttgacgtaccgcctgtaccggataacagcaggaactcactttgtgcctcaacccattcaggaatggtgatatcgataagcggagtgcctttcttcacatgatcgccaatcgtcaggggatacactttttcgacgaaaccgtcagagcgcgcctgcacaatgacaaactgatactcgttgtaactgacattagccgggattgtctgggaataattcagcattcctcgcgtgactttttgcgtttttaatcccagattctgaacctgcgttggatcgatacggatcccgccactgcttttatcgccactttcatcagcatatttcggcaccaggtccatatccataaagggagattttccgggtttatcaaatttggtatccggtttcatcgggtcataccagaaaagtacctttcgctccggtgccttttgttcggtttgtactgttttttgtgatgagtttacatactgccaggcagtaaccgatatcagcccccctgctatgaggctgctgataattattgcagcatattttatctttaaagaagccatacaatttctcgctgaaaaatcaaaacacctggcatatgcgcccgatcattcattcacagtaatcccttaatgaatgttcaggcgcactggatgtattcgctccggactgataatcaggattgcgtaacgttaatgcttttgagtaaggagatattgccctgctgaataaacgagaaatcgacatggttgccggttttcagggcattgatagcgtcgtctgcattaacaaaagtgaagcgcatggtcattgcaggccagcccacagcagggattgcttcgtgcgaaatggtaatctttttactattcatatcaatgtctttaacgacaccggtgcccttgataacctgctgtaccgaagcatcactggcagcattcatatcgccatgctgatgtgtttcagcatgaagaccggcagaaaacatgacagagaaggcaccaaataaaacggctttaagtgaattacgcatttttaatttcctgattaattaaataaatttactctacccaaccgccacccagcgcggtaaacagattaatttcgttaacctgtcgggaataggtaagatcgagaatggtttgctgcgtagcgaagagggaacgttctgcatccagcacttcgatgtaactgacagcaccacttgcatataatcctctggcacgctggagagttatctgaagtgaatcaagataacgctgctgtgactcaagttgctggctaagactgtcgcgcagcgcaagcgtgtcggaaacatccttaaaggctgactgaattttttgttcgtaattaaccaccgattgttgctggcgaatttcagccagcttcagattggctttattcctgccagcattaaaaataggaatttcaattttagggataaaattccacattccacttcctgacgtaaacaggcttgacagctccgtactgcttgcggaaagaccactggtcagggtaatggaggggaaaaaggccgctcgcgctgcgccaatattggcatcagccgctttcagctgatattccgcttccataatatccggtcgctgcagcaaaatttgtgaagatagatttggtggcaattttactggtgcgatctccccgcctttcatccctttttctgacggaagtgcgcggtacgttcccagcaccagttgcagggcattgtttgcctgagccagatcgccttctcgtttggctatttcggcgcgggtactttcgatttgtcctctcgcctgttcaagtgccagaacgttcgtactcccggtcacgagctgttgctcaacgaaagcataggactgttcataatttttcagcgtttcccgcgcaatacggagttgttcgtacgccagttgctggctgaaatagctctgtgaaacgttggagaccagcaggatgtgtacggcacgacgggcttcttcgctggcaaagtagttctggcgatcagcctcactcatgttcttaagtttgccaaaaaaatcgagctcatagctgagctccagacccgcgtcgtactcctgtgtggtcggcttgtcacctttcagaccaccgttgtatgtgatcccggatgaggcattcagttggggataacgatctgcatccgtgacgttgaactgggcccgggcctcttcaaccttcagggcagccattctcaaatcacggttattattcagggcttcaccgatcagcctgctgacctggggatcgacaaaaaagtttcgccagcccgtatcctgatagctgtttaccgcaggcgtcagactgtttttagacaatgaaaactgctggggaaccggagctggcggacgctgatattcaggtgccagagaaacacaaccagccaggatgaatatggtactgatgctgagtaattttaatttgaacataacgcttctcgtacaggcagacctggtaaatggttcaaacgaaatccagagtattgatagggatactttaccgaacgctctctgtttgccgggtgacaggataatgacaatgttgtcatttttgctgtaatccgttgataacgatcgtgggcgcaataaaatgacattagcagccagccggggagcatgatgaaaatattaatcgttgaagacgaaattaaaacaggtgaatatctcagcaaggggctgacagaggcggggttcgtcgtggatcacgctgataatggtctgaccggatatcatcttgccatgacagccgagtatgatttagtcatcctggatatcatgctgcctgatgtaaacggctgggatatcatccgtatgctgcgcagtgccggaaaggggatgccggtattactgctgacggccctttgcacgattgaacacagggtcaaaggacttgagctgggtgcggacgattatctggtgaagccctttgcgtttgctgaactgctcgcccgggtaagaaccctcctcaggcggggaaacacgatgatcacggaaagccagcttaaagtggctgacctctcggttgatctcgtatccagaaaagtcagccgcgccgggaaccgcattgtgctcaccagtaaagagttcagcttgctggaattcttcattcgccatcagggagaagttcttccccgctccctgattgcctctcaggtctgggacatgaattttgacagcgacactaacgcgattgatgtcgcagtaaagcgactccgcgctaaaatagacaacgattacgggacaaaactgatccagacagtgcggggcgtgggctacatgctggagatcccggatgcatagcaaaccgtccagacgacctttctcactcgctctgcggctgaccttttttatcagcctgtccacaatactggcgtttatcgccttcacctggtttatgctgcattctgttgaaaagcattttgccgagcaggatgtcagcgatctgcaacaaatcagcaccacactgagccgtatactccagtccccggcagatccggatgaaaaaaaagtaagcaaaataaaggaatcaattgccagctaccgcaacgttgcccttttgctcctcaatcccaggggtgaagtgctctttagctcagctcagggggcggcactacgcccggcagtgaattcagcagattttagcgagcacagccgcgcacgggatgtctttctctggacggtggaggatcctgcgggaccgatggataccgggtccgaaatgaagatggaaacatacaggattatcgcctcctctggtcaggcgatatttcagggcaaacagcagaactatgtcatgctgactggcctatccattaatttccatctccattacctcgatgcgctgaaaaagaacctgattgcgattgccgtcgtgataagcctgttgattgttctgatcattcgaatcgctgtccgtcaggggcacctgccccttcgtaatgtcagcaatgccattaaaaacatcacctccgagaatcttgatgcgcgactggaaccgacacgcgttcccattgagctggagcaactggttatctcgttcaatcatatgattggaaagattgaggatgtctttacccgccaggccaatttctctgccgatatcgcgcatgagatcagaacgcccatcaccaatctggtgacgcagactgaaatcgcactgagtcaggatcgaacacagagggaacttgaggatgtcctctattccagtcttgaagagtataaccggatgaccaaaatggtcagcgatatgctgttcctggcacaggcagataataatcagctgatacctgacagggtcatgtttgacctcagagcggaagtcatgaaagtcttcgagtttttcgaagcctgggccgaagaacgcaatatcacgctcaaatttaacgggatgccctgcctggttgagggagatccacaaatgttcagaagggcgatcaataatctgttatccaatgccctgcgttataccccggagggacaggcaatcaccgtctcaataagagagcaggagagcttttttgaccttgtgattgaaaatccggggaaaccgatccctgaagaacatttatcaaggctgtttgaccgtttttatcgggtggatccatccagacaacgaaaaggagaaggcagcggcatcggccttgcgattgtgaagtcaatcgtggaagcacatcacggaagagtgcaggtggaatcagacgtacgctccacgcgttttatcttatccgtgcccagactggagaaaatgatcccggaaacccaatgctgaaaataaagatgtaaatgacaaagatgtcattagcctgtcatgcagcaaacagaagccattcgatataattagtgcaacttatcaggaaggctggattgcttcatcaatacccggcgtcagagtacgccaggaaatgaatatccagccctcttccggagaaataaacgctgccgaacttgtttcagttatggaactgaaaacaccggttgtacttccccggacatcactaattcagaaatggagagttatcatgaaaaatatcgtattagcatctttgctgggctttggtttaatttcatcggcctgggccactgaaaccgtgaatatccatgatcgcgtcaacaatgcacaggctcctgctcaccagatgcagtctgctgaggctcctgtcgggatccaggggactgctcctcgtatgaccggtatggaccagcatgaacaggccattattgctcatgaaaccatgacgaacggctcggcggatgctcaccagaaaatggtggaaagtcatcagaagatgatgggaaataacacggtatccacgaccgtcccgtcaacgtcttacgcggcgatgaatgagcatgaaagagcagcggttgctcatgaattcatgaataacgggcaatccggcccacatcaggccatggccgaagcgcaccgccgcatgatcaatgcaggctgaatgcgacggtagtatccgtgctgttaccttttccctgatagattttcctgaaacaacgttgctacatttttgccccccgtcagggggcttttttgtctgactcagctacacttaaccggtacctgtctgaaaggaattattatatgggctatttgcattctagggttggaattcatccattctaacccttgattcttagtcggacaaaaagctgcttctggttggatttttctgtttttcaccaccctgcgaaaatctaacattggttggattctcagacgcgccctctctcgcgttaatccaactctccaccttctgcctgcttcaacaatgtcggaatgtgcggtccatactcgaccttgcctcgtcctgctcgaataccactgccaaccttgcgggcttctttggagtacaacgtctttgcacggatgatctcatagctataaccccgacctaaccggttggacatcttgatcaaaccgttgagcccttcggtatagccattggtgagtgagaacggcgcatcccagtaggcaaagatgtcgtcgtaatggttgtgtaccgtttttaccagttttttgaaaggctccatgccataaggcggcaggctgttcttccaagcctcaaaggcgttctgagcactctgcttgtcgggttcgtcgtagatgcagaagaaggcttccttgaagtcataggccatggcaagtgctgggatcgcctgctttacaacctccagcgccttttgctctgcgggcgtcaggttgccgggtcgcttcagggtaagccagcgaatggactttttgacgtaaatgcgatcttctttgcttaactgtgcctgggtaatgaccccaacttactgatagtgttttatgttcagataatgcccgatgaccttgtcatgcagctccaccgattttgagaacgacagtgacttccgtcccagccttgccagatgttgtcgcagattcaggttatgtcgctcaatgcgctgagtgtaacgcttgctgttaacgtgcagctttcccttcaggcgtgattcatacagcggccagccatccgtcatccataccacgacctcaaaggccgacagcaggctcagaagacgctccagtgtggccagagtgcgttcaccgaagacgtgcgccacaaccgtcctccgta

SEQ ID NO: 158 - DNA, 53511 bp, Unknown
  source: /note="Description of Unknown: MKP2_2161_1 Mutant Bacteria sequence"
gtttagcgccacccgccacagcctggcggtacgccaggaagtctgcgctatgatggcgttaaacatgctgcgtcgctggctgaatggccaaccgctggccagcgaacatggctggattaacgtggtggattccctctcgctgtaagtcattccccccggcgcaccgtatcctcggggcgccggtcgtccaacctgttgtactcttctgaaaaaattctgtgcgttaagtcgcaattttctgctgcgaacggtccagtatacgggaaaacgattgccccgcgatgtcgctcacactttaccgcccggacaatcgcaacactgattccagtattcaggattggagtccagtatgttggaatcaacgaaagtcccggcgctgacccgcgcgattgagatcctcaatttaattggccgcatcggcccctgcagcgcggcgacgataatagcggagctggggatcccgaaaagcacggtgtatctgctgctgggcgagctgaaaaagcagcgcttcatcagtatggataatcaggataactactgcctgtggaccaagctggtggagctggccgggcaggcgctgagcaaaatggacctgcgcgagctggcgcggccgcgcctcacccggctgatggatgagtgcggcctgctttgtcacctgggcattatcgatcagggcaacgcctactacattctgaaaattgagtctcccgccaccatcagcgtgcgctcgcatgagggtaagagcctgtcgctttaccgctccgggatcggcaaatgtttgctggcctggcagcccgccagcgttcaggcgtcgattatcgaagacctgcagtgggagcgggccacgccaacgaccatcaccgatgctcaacagctgcgggaagagctggggcggatccgcgcccggggctggagctttgataatggcgaggactatccggatgtgcgctgcgtggctgccccggtatttaacgccaataacgacctgaccgccgccatctcggtggtgggtacccgtctgcaaatcaatgaagacaatcgcgattacctggctggtaaggcgattgcctgcgcgaaagatatttcacgtctgctggggtggaaaagccccttcgaacaactcgcctcatcataaggagaacatcatgaccctaccgaaaattaaacacgtccgcgcctggttcatcggcggcgccacagcagagcagggcgccggcggcggcgattaccatgaccagggggctaaccactggattgacgatcatatcgccaccccgatgagcaaatataaacagtatgagcagtcccggcagtcgtttggcatcaacgtgctggggacgctgattgtggaagtggaagccgacaacggacagaccggctttgcggtgtcgacggccggggagatgggctgctttatcgtcgaaaaacatctcaaccgctttatcgaaggcaaatgcgtcagcgatatcaaactgatccatgaccagatgcttaacgccaccctttacgacgcgggatccggcggcctggtgatgaataccatctcctgtgtcgacctggcgctgtgggacctgttcgggaaagtggttggcctgccggtctacaaactgttgggtggggcggtgcgcgacgaaatccagttctatgccaccggcgcacgtccggacctggcgcaggagatgggctttatcggcggcaaactgcctacccactgggggccgcacgatggcgacgccgggatccgcaaagacgtcgccatggtggcggatatgcgcgaaaaatgcggcccggatttctggttaatgctggactgctggatgagccaggacgttaactatgccaccaaacttgcccatgcctgcgccccttataacctcaagtggatcgaagagtgcctgccgccgcagcagtatgaaggctatcgcgagctgaagcgccaggcgcctgccgggatgatggtgaccagcggcgagcaccacggcacgctgcagtccttccgcaccctgtcggaaaccggcatcgatattatgcagcccgacgtcggctggtgcggcggcttaaccaccctggtggagatcgcggccatcgccaaagcgcgcgggcagctggtagtgccccacggctcgtcggtttactcacatcatgcggtgatcaccttcaccaacacgccgttcagtgagtttctgatgaccagtccggactgcgccacgctgcgcccgcagttcgacccgatcctgctcggcgagccggtgccggagagagggcgcattcataaatcggtcctggataaacccggctttggcgtcgagctcaatcgcgactgcaacctgaagcgtccttatcaacactgattgcgtcgggccgcccggcggcccgcgcctgaggatattatgatgagcaacactctgctggagagcgtggtgaagaaaaaccgcgcccgcttaatcccctttatgctggcgttgtacgtgctggcgtttcttgaccgttctaatatcggtttcgccaaagagacctaccagctggataccggactcagcaatgaggcctacgcgctgggggccggtatcttctttgtggtctatgccttcctcggggtgccggccaatctgctgatgcgcaaatttggcgccaggcgatggatcggctgcaccacgctgctgtggggagtgctgtcggcggcgatggcgtgggcggatacggaagcgaaattcctgctggtacgtaccctgctgggcgcggcggaggcgggcttctttcccggaatgatctacctcacttcacagtggtttccccagcaaaaccgcgccagcattatggggctgttttatatgggcgcgccgctggccctgacgctgggatcgcctttatccggtgcgctgctggagatgcatggatttatgggccatcccggctggttctggatgtttgtcattgaaggcctgctcgccgtcgccgcgggagcgttcaccttcttctggctggacgattcgccgcagcatgcccgcttcctgagcgcagcggagaaacaggcgctgataagcgagctggcgcgcgaggaggagaaaaagattgcctcgcgcctgtccgatgcgctgcgtaacgggcgggtctggcagctggcgctgatttatctgaccattcaggtggcggtctatggtctgattttcttcctgcccacccaggttgctgcgctgctgggcaccaaagtcggcttcgttgcctcggtggtgacggccatcccgtgggtggcggcgctgtttggcacctggcttatccctcgctactccgatcgcaccggcgagcgacgcaatattgccgccctgacgctgctggcggcggcggtcgggattgcagtgtccggactggtggcgccggtgctggctatcatcgcgctgtgcgtggcggcggtcggggtgatcgccgtgcagccggtcttctggacgatgccgacgcagctgctgtccggcacggcgctggccgcagggattggctttgttaacctgtttggcgccatcggtggttttctggcgccgatcgtgcgcgtgcaggccgaaacgttgttcgccagcagcgccgccggactgttaaccctggccggcgtcgccattgtcggggtggtcattatcttttcattgagccttacccgcgcggtaccccagcgcggcagcgtacagcattgaataaaggaatcgctatgaacgcactgttatctaaccccttcaaacggggattattacgcggtgagacgcaaatcggcctgtggctgagctccacctcatcctacatggcggagatcgctgcgacgtcgggatacgactggctgctgatcgacggcgagcatgccccgaacaccattcaggatctttatcatcagctgcaggcgattgccccctatgccagccagccggtcattcgcccggtcgagggcaaccgcagcctgataaaacaggtgctggatattggcgccagaaccttgctggtgccgatggtcgataccgccgagcaggctcgggaggtggtctcagcgacccgttatccccccatcgggagccgcggcgttggcgccggcgtggcgagagcggcgcgctggggaagggtggagaattatatggcggaggcgaatgacgaactctgtctgctgattcaggtcgagagccgaaccgcgctggagaacctggacgctattctcgaggtggacggcattgacggggtgttcatcggtccggcggatctctccgcctcgctgggctacccggacgatgccggtcaccctgacgtgcagcgggtgatcgagcagagcatccggcgcattcgcgcggcggggaaagcggccggatttctggcggtcgacccggcgatggcggaaaaatgtcttgcctggggggccaactttgtcgccgtcggggtggataccatgctgtatacccaggcgctggaccgccggctggcgatgtttaaatctgccagcgcccagccgcaagagaaaacgagctattgacggcacaggctggcgctgggctcagacgagcgcctgcgccagcaccgtcagcggatgctcgcagcgtttgctggtggacatctcaatctgccatttgcaggtctcgcagtcggtgacgacgaggtcggccccgctctcctcaatctgacggaacagcggggcgccgatagcctgggataccgcgtaattctcagttttaaacccgtaggtgcctgcgatgccgcagcactgggaatccagcacctccagctgcaggccggggatcagccgcagcagctcgagggtatacagcgaccagcccatcttttccatatgacacggggtgtgatagaccaccttcagcggcagcgggcgcagcggtagcgtcctgccggcagccagctgtttccagatccagcgggtggcaagctcgacccgatcgcgaagatcgctgttatcgacatcgaggagatgggggtattcatcacgtagcgtaaaggcgcaggtcgaggaggtggcaatgatcggtagcgtgttttcccgcatcgcggcgacgttgctctgcgcctgcttacgcgccttgtcgaaaaaaccgttggcgatgagcggtacgccgcagcatttttcttttgataacaactgcaccccggtacccagtgcgttgacgacgcgaatcagatctttacccaactgtggatggttatagttgacgtagcagccatgaaagaaagccacctgttcgctgtactgcttctgacgggcggcgagctggcggtaagcgcggcggaaggtgccgaaaccatatttcggcagcgtacgccggtgatcgatgttgagcgtcgcgtcgagcagacggcgcaccggttttaagccggtggcggcgttgaccaggggggcaaagggggtggaaagggtacccatcaggtcggtatggctgaggatggcgtcgcgcagggtcggcttttgctggccgtactgtgcccgggcgcgttgaatgatatcgccaattttcacatccgacgggcaggcgacctcgcagcgcttgcagttaatgcagtacttcagcgcctcgtcgtacagcgcgccatccttcagacgcaggcgttcgccgtccggccccgcttgtttcgggccgggatagcgcggattgacccgacttaccgggcaggtggtggtacagaccgtgcacttaatgcagctttcaaaacgggtatcgttcatggccggcctccggcaagggcgtggatctgtctggcggcgtgcagcgcggtaacggcgcagacgccgccgccacagccgagctgaatggcatcgaacccgccgagcaatgagccgatggcgaacagattatggaacggctgcccgcccagcagggggcgcagcagggcatcggttttcacgccgaagcgctgccacggttgtgaggcgaagaaatcgcgctggtaccagctttcccgtggcagggtctggtgaaggtcgaggccgaggatcggctcgcgcacgctatcgcgagtggcgacaagaccgttgctgaaaaagctgccgctggccagcacggtaaagcgcggacgcagcgcaatatcgccgtgattgcgcgtccagaccgcctcgacggcgtcctgtcgatggctgattttcaccacctcatcgcctgcgagccaggcgccgccctcgcgaatgaactggcgttgcagctgagaatgcaaacgcatcccgggaaccgaaggcggcagcgtcggcagcagacgcagcgggcagggtagacgcgcctgcagccagtggtaaaggcgatcgtcggcgaggccaaaacaggcgggcatgatcagcaggtcatactgctgcgccagcggtagcagcgctgcatgcagggccggccacatattctcatcatccaggacgcgggcgatattggcggcgcgaaactcggtcgggttgtcacgcagcacatccagcagcggtaactcgatttccaccgccgcggcggtaactccgtgttgaccgagcgcggcggcggcgagatgcggctgaaaatcagcaaagccgctgatccccaccagacaggcgccctgcgacggcaggggcgcgacaggcacctcaaggggcgacagccatgccgggcgcaacgtccccagcggcgttacccgccggtgcggccggcgcgcatcgccctgcatcaccgcgccgcaggcggccagcagggcttcggtctgtgtcgcgtattcgagcaccgcctcggcgccgagccgggaataagggtgttcaggaagctgttcagcgagttgctgcagaccttgtgcgacgtcagtgacgtgatcgccgttgggcagcgccgagagcaggtctaacgacgcggaggaaaaatgcagcgcgctctgcccgcggctgatgatgacgctgcgcaggccgtgctgattcagggccagcccgcacagcaggccggcgagcccgccgccgataatcgcgcaatcaaacttcatcccggtgctcctgtggcaatccgcacaggccgaggtagacccagcgggtgaattcgctttcgcgcagcgcatcgccccaggcgatgggctgcacgcccttccagcgttcattgagaaattccgagagctgggttaacgactgcgcgggcgtggtgacgttaaagcgctgtagcaggccggcagcgcggcaggcgcagagttccccctgacaggtccccatgccaatccgggtgcggcggcgcaggtcgagcagggtgttgaccgccaggttttccaccgcgtatttcacttcaccggcagtgacggcttcacattcgcagaccaggctacggtgctggcggctgtcgccaagccaggacggggtgcgatcgccgtgacggtagacggccgagccgcgcagcggggtggggagggagataatcttttgcagggtactttccgttggctcctgtgaaccgggcagcggggcttcggccgtggtacagggggtggtgtttcccagcttacgacagacggcgtcggtggcccactcggccataaggcgataggtcatcagcttgccgccggtgatagtaatgaagccttccataccgtcacgctgggcatggtcgagcaggacgatgccgcggctgacgccgcgcccgctgggatcgttatcgctggccaccagcgggcggacgccggagtaggcgcggaggatccgggtgcggcccatgaccggcgccagcttttccccttcgcgcagcagggtatcgacctccgccgctgttacccggttgtcgtcaatttcgtcataaggaatatgcattgaggtagtgccgatcagcgagatggtatcgccgggcaccagaatatcggcgtcggccggcttacggcagcggttgatcaccaggttgttaatccgatgatcgaggatcagcagcgatcccttcgccgggaacatggtgatgcgcaggtcggcatattccgcaatacgctgcccccagatcccagcggcgttaaccaccatcccggcgtacagagtgcgggcctggtgaagttggcggtcgtatacctggacgccgcagacgcgatcgccccggcgcagcaggcctgttacttcgcagccggtaaggatctgcgcgccgtgttcgcgggcgtcgagcatattggccgcggtgaggcgaaacgggtcgatggtaccgtccgggacctgcaccgcgcccagcagcgtcgggttgacggcgggctcccggcgcagcgcttcctgcggcgagagcggcgtggcctctatgccagcctgctgacaggcgtcgataaaggtttgctgccatgccaggtcatcttcaggcagggtgataaacagcccattggtcggttcaatacagtggcgggcgatgcggcgcaggatgcggttctcactgatgcattcgcgggcggattcgttgtcggtcaccgcgtagcgggcgccgctgtgcagcagtccatgattccggccggtcgccccggtggcgatatcatggcgctcaatgagcagcgttcgtaatccgcgccgggcgcagtcgcgggcgataccggcgccggttgctccgccgccgatgataatgacctcgctatcaagacgtcccgtcatcttcagctcctctgctttcgttttacgccatttagccacaattagtaaggttattgtttgatttcgagcatattcgcgcgttatttgagcgtgttatgtgatttcgtgctcacattggaacgttttgtcatatttctgtaacaaattgtgcgatgtttcacagtatcaactctacgtattgcctaccatcgcgaccatatttgaagttggtgattaatctgggattttgtcgtgacgtcagtagaaaacagcaagggccacggaggctgatatgttaagtatttttaaacccgccgcgcataaagcgcgtttgccagcagcggagattgacccgctatatcgccgattacgctggcagatttttattggcatcttttttggttatgccgcctactatttggttcgtaagaactttgccctggcgatgccttatcttatcgagcaggggttctctcgtggcgacctcggcttcgccctttccggtatctccatcgcctatggattttcgaaattcatcatgggatcggtctctgaccgctcgaatccgcgcattttcctgccggctggcttgatcctcgccgcgctggtgatgctggtgatgggcttcgtgccgtgggcgacgtccagcatcatgataatgttcgtgctgctgttcctctgcggctggttccaggggatgggctggccgccgtgcggccggaccatggtgcactggtggtcgcagaaagagcgcggcgggattgtctcggtgtggaactgcgcgcataacgtcggcggcggcagtccgccgctgctgttcctgttagggatggcgtggtttaacgactggcacgcggcgctgtatatgccggcattcggcgccattctgctggcgattttcgccttcgcaatgatgcgcgacaccccgcagtcctgcggtctgccgccgattgaagaatataaaaacgactacccggacgattacagcgaaaagcacgaagaagagctgacggcgaagcagatctttatgcagtacattctgccgaacaagctgctgtggtacatcgctatcgctaacgtcttcgtttatctgctgcgctacggcattctcgactggtcgccgacctacctgaaagaagttaaacacttcgcgctggataaatcctcctgggcctatttcctgtacgagtacgcggggatcccgggcacgctgctgtgcggttggatgtcggacaaagtgtttaaaggcaaccgcggcgccaccggcgtgttctttatgaccctggtgaccatcgccactgtcgtttactggctgaacccgccgggtaatccgggcgtcgatatggcctgtatgatcatcattggcttcctgatctacggcccggtgatgctgattggtctgcatgccctcgagctggcgccgaaaaaagccgccgggaccgccgcgggcttcaccggcctgttcggctatcttggcggttccgtggccgcgagcgctatcgtcggctacaccgtcgatttcttcggctgggacggcggctttatggtgatgatcggcggcagcgtgctggcggttatcctgctggttatcgtgatgctcggtgaacgtcgccatcaccaacagctgaaacaagcctaaggagcggcgatgaaaatgaaacttaccgcgctgatgagcggaatgattctgtccagttcggcgctgtgcttcagcgcgacagcggctgataaaatggtcatcgcccaccgcggcgccagcgggtatctgccggaacataccctgccggcgaaagcgatggcttacgctcagggggcggattaccttgagcaagacctggtgatgaccaaagacgaccggctggtggtgttacacgaccactatctcgatcgggtgactgacgttgcgcagcgtttcccgcagcgggcgcgtaaagatggccgttactacgccatcgactttaccctggacgagattaagtcgctgaagttcaccgaaggttttgagccgaaaaatggtaagaacgtgcaaacctatcccgggcgattcccgatgggcaaatccgatttccgtattcatacctttgaagaggagattgagtttgtccaggggctgaaccattcaaccggcaaaaacatcggtatctacccggaaatcaaagcaccgtggttccaccaccaggaaggcaaagatattgccgccagcacattgaaggtgctgaaggaatatggctataccagcaagcacgataaggtttatctgcagtgctttgacgccaacgagctcaaacgcattaaaaatgagctggagccgaagatggggatggatctcaatctggtgcagctcatcgcctataccgactggaatgaaacccagcagaaacaggccgatggtaagtgggtgaactacagctatgactggatgttcaagccaggggcgatggcgcagattgcgcagtacgcggacggcatcggcccggattaccatatgctggtagcggaaggctcgaagccgggggcggtgaagctgacggcgatggtgaaagaggcgcatgccagccatctgcaggtgcatccgtacaccgtgcgcgcggatcagttgccggagtacgcgactaacgttaatcagctctatgacgtgctgtataaccaggcgggcgtcgacggcttatttaccgatttcccggataaagcggtgcagttcctggacgcgaaacagtaaaaagccggatggcggctacgccttacccggcgtacgaactgcggttttgttgacactgttctcggcgtgcaacgatttcgacccgggaataacgtttgttctatgttatttcctggaagattgcgctcccgatatttcttctgcgttatgcctttcatagcgcagggagcgcacagggggaggccagtcgccgcctccccctgtacccccgggctccggccagcaaaatcgccgctgcgcggtcccttcgacttatccctgcaggcttcgggtcgggccgaggtagcgtccatgcaaaacacggccctcagcccgcatccatgcgggctgccccggccttccgggaacgtctcagcgattttgaggccgtcaacaccggcagtttcagcagcccagggcggcagtgcgtaaacggccggtcctggaacagtaggtcaggtaagcgtagcgccacctgacaagactacatctcgatctcaatatcgcctttcgcccggcagcagcagggcaaaatttctcccggctggataaaggccagcggctcggtcagccagtcaacctggccggagaccaggcgagtgcggcaggagccgcagtagccttcgcggcactgatattcgacgtcgatattatgcgactccagcgccgccagcagggaagggtgttcatcctgacactcaaggcgagtgtcagagattttcaggaagatccgcttcattacagctggaagttactcagatcgtcggcatcgacttcagaatcgatctggccgacgagataagaactgacttccacttcctgcggcgccacctgaacgttgtcggagaccagccaggtgttgatccatgggatcgggttggagcgggtctggaacggcagatcgaggcccaccgcctgcatgcggatattggtgatgtactcgacgtactggcagagaatatctttattcaggccgatcatcgagccgtcgcggaacaggtagtccgcccactctttctcctgctgcgccgccagcacgaacaggtcatagcactcctgtttgcactcttcggcgatttccgccatttccggatcgtcgctgccggagcgcagcaggttcagcatatgctgggtgccggtcaggtgcagcgcttcatcgcgggcgatcaggcggataattttggcgttgccttccatcagtttgcgttcggcaaaggcgaaggagcaggcgaagctgacgtagaagcggatcgcttccagggcattaacgctcatcaggcacagatagagtttctttttcagctcgcgcagattcacggtcacggttttgccgttgacggtgtgggtgccttcgcccagcagatgccagtagctggtcatctcgatcagcgaatcgtaatagtgagagatgccttccgcacgtttctggatctgctcgttggtgacgatgtcgtcgaacacggtcgccgggtcgttgacgatgttgcggatgatgtgagtgtacgaacgcgagtgaatggtctcggagaaggcccaggtttctacccaagtctccagctccgggatggagatcagcggcagcaacgccacattcgggctacggccctggatggagtcgagcagcgtctggtacttcaggttgctgatgaaaatatgtttttcatgttccggcagcgcctggtagtcgatgcgatcgcgggaaacgtcaacctcttccgggcgccagaagaaggagagctgcttttcaatcagcttttcaaagatgtcgtatttttgctgatcgtagcgggccacgttaaccggctggccaaaaaacataggttccagcagctgatcgtttttcgtctgtgaaaaagtggtgtatgccattgaagtgagtcctgttgaactgtattgcccggcgggaatgggttggccgggcctacacaaacgtaggccgggtaagcgtagcgttacccggcaaaagtaccttagatcttacaagcgccgctttcgcagccgtcgtcctggatggacggggccaggtcatcctgagcgtcttcagcgccatcacgggtgttgtgatagtacagcgttttgacgccgaatttataggcgttgagcaggtctttgagcaactgctgcatcggcacttttccggacgggaagcgcgtcggatcgtagttagtgttggcagagatcgactggtcgataaacttctgcatgatacccaccagctgcagataaccgtcgttgttcggcatctcccacagcagctcgtaggcgttctgcaggttttcgtaatccggcaccacctggcgcaggataccgtccttggacgctttgatactcacgtggccgcgcggcggctcaatgccgttggtggcgttggagatctgcgacgaggtctcggacggcatcagcgcggagagcgtggagttgcgcaggccgtgagttttaatggactcgcgcaatgcttcccagtcgtagtgcaggggttcgctgacgatgccgtccagatctttcttataggtatcgatcggcaggatgccctgcgcataggtggtttcgttgaaccacgggcaggcgccttgctcgatagccagctcgttagaggccttcagcagatagtactgaatcgcttcgaacgttttgtgcgtcaggttgttggcgctgccgtcggagtagcgtttgccatgcttcgccagatagtaagcgaagttgatcacgccgatacccagcgtacgacgccccatcgcaccgcgtttagccgccgggatggggtaatcctgatagtcgagcagcgcatccagagcacgcaccgccagcactgccagctcttccagctcgtcgaggctgtcgatagccccgaggttgaaggccgacagggtgcacagcgcgatttcgccgttttcgtcgttgacatcttccagcggtttggtcggcagagcaatctccaggcacaggttagactgacgcaccggggcgactaccggatcgaacgggctgtgggtgttgcagtggtcgacgttctggatatagatgcggccggtagaggcgcgctcctgcatcatcagcgagaacagctcaacggctttaatacgctgcttacgaatggtgtcgtcctgctcgtactgggtgtacaggcgctcaaactcgtcctgatcggcgaagaaggcgtcatacaggcccgggacgtcggaagggctgaacagggtaatatcgccgcctttcagcagacgggtgtacatcagcttgttgatctgtaccccgtagtccatgtgacgaacgcggttggcgtcggtaccacggttgtttttcagcaccagcaggctttccacttccagatgccacattgggtagaagagggttgccgcgccgccgcgcacgccgccctgcgagcaggatttcaccgcggtctggaaatgcttgtagaatggaatgcagccggtgtggaaggcttcgccgccgcggatcgggctgcccagcgcgcgaatgcgcccggcgttgatgccgatgccggcgcgctgggaaacgtatttcacaatcgcgctggaggtggcgttgatggaatccaggctgtcgccgcactcgatcagcacgcaggagctgaactgacgggttggggtacgcacgccggacatgatcggcgtcggcagcgagattttaaaggtggacaccgcgtcgtagaaacgcttgatatagtccagacgcgtttcgcgcggatagttcgagaacaggcaagcggcgaccagaatatagaggaactgcgcgctctcataaatttcgccggtgacgcggttttgtaccagatacttgccttccagctgcttaacggctgcgtaggagaagttcatgtcgcgccagtggtcgaggaaaccgtccatctgctggaactcttcttccgtgtagtcttccagcagatgatgatcgtatttacctttctcgaccatcttcaccacgtgatcgtagagcgccggcggctcaaactgaccgaaggcttttttacgcaaatggaaaatcgccagacgcgcggcgaggtactggtaatccggtgcgtcgcgggagatcagatccgcagcggctttaataatggtttcgtggatgtccgcggttttgatgccgtcatagaactggatatgggagcgcagctctacctgggaaatcgaaacgttattcagtccttctgccgcccaatccagtacgcgatggattttgtcgagattgatgcgctcggtggtcccgtcgcgctttgtcaccagcagactctgattcatgtggattttacctgtccgtgaaagaaaatatcccccgtttatccacagaaggccgttgtgactaactctgtggataaatactatatgtagggggttgtcgataaaagaaacgctatatggtgagtattttagtaaggaatcttttgagtacaagggttgattttgacgttaaattgaggttgcggaagggtaataatccgcaagtccacgtcgcataaggcctggagaagaagtcaataaaacagaaaaaaaaatgaaaatttgatcgagtgctgatttcttcatcggaagaaataatcacgcggcttgatgccgcgcaatcatcataagcggaggtgctgacctcagtcctgtttggcggttgtatgcaacatatagttaacatcaacccccggcgctaacttgaaggtattggtcagcggattgtaatgcagaccgatgatatgctgctctttcagagttgtctgatctacccagcccagcagctcggccggcttgataaacttcttcacatcatgagtgcctttgggcaccatcttcatgacatattccgccccgactaccgccatcagccaggccttgccgttgcggttgatggtggagaagaagacctggccgccgggcttcactaaccgcgcgcaggcgtgcaccaccgactgcgggtcggggacgtgctccagcatctccatgcaggtcacaacgtcatactgctgcgggtgcttcgcggcatgttcctcaactgtttcctgaacatagtctacctgaataccgctctccagggcgtgcagcctggcgacctgcagcggttcggcccccatgtccagcccggtgaccgtcgcgccttcgcgcgccatgctctcggcgaggatgccgccgccgcagccgacatcgaggacttttttaccgaacaggccgccggagcgttcggcaatatagcccagccgcagcgggttgatgcggtggagcggtttgaactcgccctccagatcccaccagcgcgaggcgacggcttcgaatttggcgatttcagcatgatcgacattaggggctaccgacgttttttcggcattcatgggcgcttttactccttttctgttcagacctgcgagtatatcagcagcgcgccatgaataaaccgtattgctttacctctattagcgcggctgtgttataatttgcgacctttgaatccgggatacagtagagggatagcggttagatgagcgaccttgcgagagaaattacaccggtcaacattgaggaagagcttaagaactcttatctggattatgcgatgtcggtcattgttggccgtgcgctgccggatgtccgagatggcctgaagccggtacaccgtcgcgtactttacgccatgaacgtattgggcaatgactggaacaaagcctataaaaaatcagcccgtgtcgttggtgacgtaatcggtaaataccacccgcacggcgactccgcggtatacgacaccatcgtgcgtatggcgcagccgttctcgctgcgttacatgctggtggacggccagggtaactttggttccatcgacggcgactccgccgcggcgatgcgttataccgaaattcgtctggcgaaaatcgctcatgagctgatggccgatcttgaaaaagagacggtcgatttcgtcgacaactatgacggtacggagcgtattccggacgtcatgccgaccaaaattcctaacctgctggtgaacggcgcctccgggatcgccgtagggatggccaccaacataccgccgcataacctgacggaagtgattaacggctgtctggcgtatgttgacgatgaagacatcagcattgaagggctgatggcgcatattcctggccctgatttcccgaccgccgccattatcaatggccgtcgcggcatcgaagaggcctatcgcaccggtcgcggtaaagtgtacattcgcgcgcgcgcggaagtggaagtggacgcgaaatccggccgcgaaaccatcatcgtgcacgaaattccgtatcaggtgaacaaagcgcgcctgatcgagaaaatcgccgagctggtcaaagaaaaacgcgtggaaggcatcagcgcgctgcgtgacgagtctgataaagacgggatgcgcatcgtgattgaagtgaagcgcgatgcggtaggggaagtggtgcttaacaacctctattcccagacccagctgcaggtctccttcggcatcaacatggtagctctgcaccatggtcagccgaagatcatgaacctgaaggacatcatcgccgcgtttgtacgccaccgccgtgaagtggtgacccgtcgtacgattttcgaattgcgcaaagcgcgcgaccgggcgcatatcctcgaagcgctggccgttgcgctggccaacatcgacccgattatcgaactgatccgtcgcgcgccgaccccggcagaagcgaaaacggcgctggttgcccaggcgtgggatcttggtaacgtcgcggcgatgctggagcgcgccggggatgacgccgcgcgtccggaatggctggagccagagttcggcgtacgcgacggtaaatactatctgaccgagcagcaggctcaggcgattctggatctgcgtctgcagaaactgaccggccttgagcatgaaaaactgctcgacgaatataaagagctgctggagcagatcgcagagctgctgcacattctcggcagcgccgaccgtctgatggaagtgattcgcgaagagctggagctgatccgcgaccagttcggcgacgaacgtcgtaccgaaatcaccgccaacagcgctgatattaacatcgaagatctgatcaaccaggaagatgtggtggtcaccctgtcgcatcaggggtatgtgaaatatcagccgctgaccgactacgaagcacagcgtcgtggcggtaaaggcaaatcggcagcgcgcattaaagaagaagactttatcgaccgcctgctggtggctaacacccatgacaccatcctctgcttctcaagccgcggccgtctgtactggatgaaggtctaccagctgccggaagccagccgcggcgcgcgcggtcggccgatcgtcaacctgctgccgctggaagccgatgagcgcatcaccgccatcctgccggtccgcgagtacgaagagggcgtcaacgtctttatggcgaccgccagcggtaccgtgaagaaaaccgcgctgaccgagttcagccgtccgcgttccgccggtatcatcgcggtcaacctgaacgaaggcgatgagctgatcggcgtcgatctgacctctggtcaggatgaagtgatgctgttctccgcggccggtaaggttgtacgcttcaaggaagacgccgttcgcgccatgggccgtaccgccaccggcgtacgcggtattaagcttgcggaaaacgacagcgtcgtctcgctgattattccacgcggcgaaggcgcgatcctgacggtgacgcaaaacggttacggtaaacgtaccgcggcggcggagtatccgaccaagtcgcgtgccacccagggcgttatttcgatcaaagtcaccgagcgtaacggttccgtggtcggcgccgtgcaggtggatgactgcgatcagatcatgatgatcaccgacgccgggacgctggtgcgtacccgcgtttccgaagtgagcatcgtgggccgtaacacccagggcgtgatcctcattcgcaccgcggaagatgaaaacgtggtaggtctgcagcgcgtggctgagccggtggatgatgaagagctggatgccatcgacggtagcgcggcagaaggcgatgacgatatcgccccggaagcggataccgatgacgacatcgccgaagacgaagaataatcgtccgaggtaaatgttctggaagggccgggtattttcccggccctttttgcattaacattgcggcaaagccggtttaccgctaccttaaccgcattctgttgagtccctgacggccgagcatcgccacattgaaatatcttgcctcttttcatacaaccctgaaggtttcacgttatctgttcagagcgctggcggtattgctgtggctgcttattgcgtttgtctctgtgttttatatcgtcaacgcgctgcacgagcgggaagccgaaatccatcaggagcttaatctcaacgccgatcaggcccagcgctatatccagcgtaccgcggatgtaatgaaagagctgaagtatgtcgccggtaatcgcttgtcggcaggggacgcggtagcgcaagggcaaaacggcgatatggcggtgcccaactttgaacccctgtaccccgattccgactgcagcgcgatgagcgccacctggcgtaattcgctgcagtcgctggcatggtttatgcgctactggcgggataattttactgccgcctacgaccttaaccgcatctttctcatcggcagcgataacctctgcatggccaactttggcctgcgggacgtgccgattgagcgcgatcaggcgctgaaagtcctgcatcagcgcatagagcaatatcgcaacgcgccgcaaaatgagcgcggcaacaacctgttctggataagccagggcgttcgccccggggtgggctatttttacgccctgacgccggtctatatggccaatcgcctgcaggcgatgctgggcgtggagcagaccatccgcatggaaagcttctttacgccgggcagcctgccgatgagtgtgacgatctttgacgataacgggcagccgctgatttcgctggccggtgcggaaggtaaaatccagagcgaagcgaagtggatgcaggagccgatgtggtttggctacagttcgggtttccgcgagctggtgctgaaaaaaagcctctcgccgtcctccctgagcatcgtctattccgtctcggtagatcaggtgctggagcggatccgtatgctgatcatcaatgctatcgttcttaatatcctcagcggcgcgatgctgttcgcgctggcgcggatgtatgagcggcgcatttttatccccgcggagaatgacgcccagcgcctggaagagcacgagcagttcaaccgcaaaattgtggcttctgccccggtagggatctgtattctgcgcactgccgacgggaccaatattctcagtaatgaactggcgcacaactacctgaacatgctgacccacgaggaccgccagcggctgacgcagatcatctgcggccagcaggtcaattttgtcgacgtgctgaccagcaaccataccaacctgcagattagctttgttcattcacgctatcgcaatgaaaacgtcgccatttgcgtgctggtggacgtttccgcccgcgtgaaaatggaggagtcgctgcaggagatggcccaggcggcggagcaggccagccagtcgaaatcgatgttcctggcgaccgttagccatgagctgcgtaccccgctgtatggcatcatcggtaacctcgatctgctgcagaccaaagcgttgccgaaaggcgtcgatcgccttgtgacggcgatgaacaactcctccagcctgctgctgaaaatcatcagcgatattcttgatttctcgaaaatcgagtccgagcagttgaagatcgagccgcgggagttctctccgcgcgaagtcatgaaccatatctccgctaactatctgccgttggtggtgcgcaagcagctgggcctgtactgctttatcgagccggacgttccggaacaaatgtccggcgacccgatgcgcctgcagcaggtgatctcaaatctgctcagcaatgcgataaagttcaccgataccggctgtattgtcctgcacgtccagtgcgcgggggattatctgcagattagcgttcgcgacaccggagaggggatcccggcgaaagaggtattgcgcctcttcgatcctttcttccaggtggggaccggcgtgcagcgcaattttcagggcaccggccttggcctggcgatctgtgaaaaactgatcagcatgatggatggcgatattgctgtcgaaaccgagccggggatgggtagccgctttaccatccgtattcctctgtatggcgtgcagaatacctcaccggtgagcagagacggtttcgctggcaagacctgctggctggcgattcataacacttcgctggcgatgttcgtcacctcgctgctcagctaccacggcctgacggtccgccgccatgccggcgaaacgccggacgccgaggatgtcttactcactgacgatgaggcgctgagcggatggcagggaagggccatggtcatcttctgtcgccgtcatatcggtattccgcaggagcggtccgccggcgaatggctgcacagcgtgacgactccccacgaactgctgccgctgctggggcgtattttccatgttgcgctcgccagtgcggaaaatagcccggcgctgatggccccggaggcgcaggccggcaataacgacgacatgatgatcctcgtggtcgacgatcacccgatcaaccgccgcctgctggcggatcagctgggttcgctcggctaccagtgcgtgaccgcgaacgacgggatcgacgcgctcaacgtcctcagcaagcagcacatcgatatcgtgctcagcgacgtcaacatgcctaatatggatggctatcgcctgacgcagcgcattcgtcagcttggcctgacgctgccggtgattggcgtaacggccaatgccctggcggaagagaagcagcgctgtctggaatcggggatggacagttgtctgtccaagccggtcaccctcgacgtactgaagcaaacgctgacggtatatgcggcgcgggtgcgtaaagggcgggaataatggggagctccgtctcgccggggcgagacggagagggcgaagagattactctttgtccgtcgcgctcagcgagacggaagagaggtagttcagcaaggcgatgtcgttttcgacgcccagcttcatcatcgccgatttcttctggctgctgatggttttaatgctgcgattaagctttttggcgatctcggttaccaggaaaccttcggcgaacaggcgcagtacttcgctctctttcggcgacaggcgtttatcgccatagccgctggcgctgattttttccagcaggcgagagacgctttccggggtgaattttttccctttctgcagcgcggccagcgcttttggcaggtcggtcggcgccccctgcttgaggacgatcccttcgatatccagatccagcaccgcgctgaggatcgccggattgttgttcatggtcagaacaatgatcgacagatccgggaagtggcgcttgatgtatttaatcagcgtgatcccgtcgccgtatttgtcaccgggcatggacagatcggtgatcagcacatgggcgtccagcttcggaagattgttgataagggccgtggagtcttcaaactcgccaacgacgttcacccactcaatttgctcaagtgacttacgaataccgaacagtacgatcggatggtcatcggcaataattacgttcatagtgttcatgtataaggctaccttctacagcaagctcttgacgtaagcgtcaatgtcgctgatatatttttctatgccttgcgcatccttttcgcgaatcagatgctcaagcgtttcacataactgcttgccgggtatcagattaagcatagcaaatgcccctttgaggcggtgggcggtttgcgccagagcagcaaaatcgcccgcttcgatttcagtatacaatctctgaacatcatccggtaccgtatcggcaaacagtgcgtaatagccgctggcatggagttcggcgttactctcgtttcctgaggtgacgggctgaaccgcctcctccgccagctgctgctcaataagctgcaggatagcctcctgcatcgccgtgctaatattaaagttgacccgcagttggcccgggccgatcttgcgtatcccgacctcatcatcgcttaaaagcaagcctgaagcagtaagattagacggattatccgttaaataaagatcaaaggcttgactggtcgcccgatcgtccggtgtgatgcaggacgctccccagctctccagctggcgagtgacaatccgccgcacttcgctggaagtcacatccagcaggacgataacgtcatccagcaaatgctctcccgcctctggcgcctcttcgctggccggcattttcagatgcagggtatagcgcgtccccagcgactcccgggctttaatggtcaattgcccgcccagcttgcgcgtcatgcggtcgcatagccagaaggtaagggcgtttgctttgccgtacaggtcgctctgggtctcgttgagatacgggaagtgcatattgtcgatctcgtttgccgagacgccgttgccggtatccagaatgcggaaggtcaggcgatcgctggccgactcatcctgacagacgtcgagggtgatcttgccgataggcgtggtggtcactgaatactggattaacagcaccagcgtgcgccgcagagcttcacggtcgccatagcgctgctcgccggccgggagcgcattgttgatgagcagctgcagacccttgcgtttcatcgccggcagcacttccggcacgacgtcgtcaataagctcctgcaccgagaacaacgtctggttggttttccaggcatcgctttccagcagattggcgagctgaatgtcatcgatgagtttgaccagctcatcggcatgctgggccagcgtccggttctctgtactactgagcgccgctgcctctgccgccagcgtcagcgcgggctgcttcagggcgctgccgatgtgctgcataaaggcggcccgtccctgctggtttttctcatacaagcgctgggcctgcttgagctttttattgaccagcacttcgcggtcctgatcacggatgatcaggatctgggtgcgcggcgctacctggctgcgatactggcggatttcatactgctcattattgacggtggcctgaattaccccctgatgctggtccgccatattggtgatgttctgcagattcaggtgcggaagcagatggtcggcaattggattgctgataaccgttcggttggcttcctgatcgtgaacgagcagccccagcggcagcagagaaacaatctcttcgttaatggcgcgcagcagacgcagttcgctgttggcggcggaggggagcccggcgccagacgaatggctgcgtcctttatagtggcgaaaggtggtaaaaccaaacagcgccagcgccagcagaccaatgttgagcagcagcggcagaagaatgttctgcatggactccagcagcatggtgctcattggtaccgtccacagcaactgcataccggtggtgctgatatcggtggcgatgtcaatctgcatgccgttaaaggtgatcccgatatgatcggcgctctctttatccggcgtggtggcgagattttgcgacgggtcaggctcgatacggaagctgtcgatggtcatgcccggcgggatcagatcgttaatcggcaggtcgaaggcgaccaccgtggcaaggtgtccgggctggttgaaggtggtgcgtaacgtaaaatagtgcgcgttctgccaggcgagatggcgcaacggcgagaacgtctcgcgctcatcaagggtattagcctgcagcagcatttccgcgcgccgcgactccacgacgctgctgatcgttgactctttgaagctcgaagagaggtccttcaacggcagggtggagaccaggatcagactattgtccaggccgttgagatagtacatcgaccacggaatggtctccgcgccccacaaaatatcgagataatcggacattttctgcgtcatttcgagggtggagctgtcatgggagccaaagatcagggcttcggttttacgccggggtttctccaggtagtaaacgtcctgttttaaacgcgtctcctgcagaccgccgcttgcggtgttgactgaggtggcggcgatattgtcgtagatctgccaggtggcatagcgccaggcgtcaatgcgctggtgcagagcgtgggagacatcaaccacctgatagcttttctccttcagccaggcattgacggcgctttggatcatcacccccattgtcgccagcaggacaataaccatcaaaatgaagaagcggctgatgttgccggggatcagggagaattttttcggggtcatcttgtggctgaacgactcatcattgtttgtaaacaggatgtagcgccagagtaactggcaacaaagcagatgctgctggcagtataaaggctaatggcgtaaatccatactacagattggcgcctgcggtgcgatgccgcccaggaattatcttagaaacgaagcgtaaatgaaaccgcgccgggaaggttaaccggcgacgatattgacggaaacaaaagggaagaatcgcacgaaataacaagacattggcagaatatgccccactgatggcctaattgattgattaatagtcgttagggaatcattagccgtagcacagataaattaaagttgtgtaaagaagggtaaaaaaaaccggatgcgaggcatccggttgaaataggggtaaacagacattcagaactgaatgacggtaataaataaagttaatgatgatagcgactcttattttagccaccaatgatcattttgttttaccattcagtgctatagatatgttgttgtctatcgctttgattataaaaggttaaatattttttttgatgattagtgcgtatttccctgaccattttgcggtgaaaaaagttccgctgaatttacaaattgaaacatcttgtgggaactttgaaacatcttagaagttttagtatcatattcttgttggattattctgcattttgcagcacaatgaaatagccgactgattagaagggtaatcagtaagcagtggcataataaaaggcatataacaaacagagggttaataacatgaaagttaaagtactgtccctcctggtaccggctctgctggtagcaggcgcagcaaatgcggctgaaatttataacaaagacggcaacaaattagacctgtacggtaaaattgacggtctgcactacttctctgacgacaagagcgtcgacggcgaccagacctacatgcgtgtaggcgtgaaaggcgaaacccagatcaacgaccagctgaccggttacggccagtgggaatacaacgttcaggcgaacaacactgaaagctccagcgatcaggcatggactcgtctggcattcgcaggcctgaaatttggcgacgcgggctctttcgactacggtcgtaactacggcgtagtatacgacgtaacgtcctggaccgacgttctgccggaattcggcggcgacacctacggttctgacaacttcctgcagtcccgtgctaacggcgttgcaacctaccgtaactctgatttcttcggtctggttgacggcctgaactttgctctgcagtatcagggtaaaaacggcagcgtcagcggcgaaggtacttctccgaccaacaacggtcgtggcgctctgaaacagaacggtgacggcttcggtacctctctgacctatgacatctatgatggcatcagcgctggtttcgcgtactcgcactccaaacgtaacggcgatcagaatcgtttggataaaggccgtggcgacaacgctgaaacctacaccggtggtctgaaatacgacgccaacaacatttacctggcgactcagtacacccagacctacaacgcaactcgtttcagcggcaacggagaatctgattctattagcggttttgctaacaaagcacagaacttcgaagtggttgctcagtaccagttcgacttcggtctgcgtccgtccgtggcttacctgcagtctaaaggtaaggacatcgaaggttacggcgaccaggacctgctgaaatatgttgacgttggcgcgacctactacttcaacaaaaacatgtccacctatgttgactacaaaatcaacctgctggacgaaaacgatttcactcgtcgcgctggtatctctaccgacgacgtggttgcactgggcctggtttaccagttctaagttgcaagctgcataacaaaaaggcgcctctggcgcctttttttatgtccggtttaacctcgctggtatactcttgtcgccctggtaagaggagcctcgattaatggatatgactttctttcgcgccgcgctgctgggcgcctgcgttctgctctctggctgcgattcagctaccactcctgcgacccccaccgcgacggccaccgtgctggatggcaaaacgatgggcaccttctggcgggtcagcgtcattggcgtggatgaggcaaaggcccaggcgttgcgcgccaaggttcaggcccagctggacgccgacgatcgcctgctgtcgacctggaaaaacgactccgcgctgatgcgcttcaatcatgccgccactaccgaaccatggccggtgagcgaagcgatggcggatatcgtcaccctgtcgctgcggattggcgccaaaacgcacggcgcgatggatattaccgtggggccgctggtcaacctgtggggctttggcccggataaacagccggtcaccaccccggatgccgaggcgatagccgcggcgaaggcgcgcaccggcctgcagcatctgcaggttattaatcagagcggcaggcagttcctgcaaaaagatattcccgatctgtttgtcgacctctccaccgtgggggaaggctatgccgccgaccacctcgcgcggttgatggagcaggaggggatctcccgctatctggtgtcggtgggcggagcgctggtcagccgcgggatgaacggcgaaggcaagccctggcgggtagcgatccagaaaccgaccgaccgcgaaaacgccgttcaggcgattgtcgacatcaatggtcacggcatcagcacctccggcagctatcgcaactactatgaactcgatggcaaacgcatctcgcacgttatcgatccgcagaccgggcagccgataacccataagctggtctccgtgaccgtcattgcgccaacggcgctggaggcggacggctgggataccggactgatggtgctggggccggaaaaagcgcagcaggtggtgcgcgaggaggggctggcggtctacatgatcgttaaagaaggagagggttttaaaacctggatgtcgccgcagttccgcactttccttgtcggcgagaaaaattaaaaagcaagattgcgggttttttactgcgggctttaccacagactgagggtacacttacagctggagacccgtcatgaaaccgatagttgccgataccgatgatcgccgctggcaggcggtctgcgaacgtgatacccgggccgatggtcagttcgtctttgcggtactgaccaccggcatctgctgtcgtccctcctgccgctcgcggcgcgcgcggcgagaaaacgtacgcttttttgccgacgtcgccgccgccgtggcggcgggattccgcccctgcaaacgctgccaaccggataaagactacccgcagcagcaaagggtcgacaaagtggcgcaggcctgtcggctgctggagcaggacgcgcccctgaccctcgaggcgctggcaggccagctggcgatgagcccgtttcatttccaccgtttatttaaatccgtcaccggcatgacccctaaagcctggcaacaagcgtggcgggcgcagcgcctgcgggaagcgctggagcaggggataccggtgacccgcgccgcgctggcggcaggttttcccgacagcagcagctattatcgccaggccgacgcagcgttagggatgaccgccagccagtttcgccgcggcggcgccgccaccgtggtaacctggaccacgggcgactgcgcgctgggtcgttgcctggtggcgcagagcgagcgcggcgtctgcgcggtgctgccgggtgataacgatgcggcattgctcgacgacctgcgccggcgctttcccaatgccgagctgcgtgaaggcgaccctgatttttgtcagcagatggccgagattttcgcccacctcgacgacagccggcggccggtatcgctgccgctggatctgcagggcaccgcgtttcagctgcaggtctggcaggcgctgcggcagatcccggcgggtgagacccgcagctaccgccaggtggcagagcatattggccagccgcgggcggtaagagccgtggccggcgcctgcgcggcgaattcgctggcggtgattgttccctgccaccgggtggtgcgtgaagatggcgccctgtccggttatcgctggggaacggcgcgaaaagcgcagctgctggcgcgcgaggcccaacatgaggaggagtaatgctcgatctgtttagcgataccccaccgtggcaggagccgctggcccccggcgcggtggtgctgcggcgatttgcccgcgaacgcgccccggcgctgctgcaggcgatagccgacgtcgccagtcagtcgccgtttcgccagatggtcacgccgggcgggtacaccatgtcggtcgccatgaccaactgcggcgcgctgggctggactaccgatcgccacggctatttgtacgccccggtcgacccggtaaccgatcaaacctggccgccgatgcctgccgtatttcatgaactggcgctggcggcggccgccgccggcggctatccggagttttctcccgacgcctgtttgattaaccgctattgtcctggcgcaaaactgtcgttgcatcaggataaagatgaacaggatctgcgggcgccgattgtctcggtctcgctgggcttgccggccatctttcagtttggcggcttgcaacgcagcgacccgctgcagcggctgctgctggagcatggcgatgtggtggtctggggcggcgagtcgcgcctgttttatcatggcattcagccgctgaaagcggggcatcatccggaaacgggcgattgtcgttacaatctcaccttccgacaggcgggcggtcgccagtattaaaataagaattattcttgatgtcatcggcgagccgtttaaactgctggctgttttgcttttgcggatagcctgttatggaacttctctctctcgtctggcgccagtaccgctggccgtttctgggcgttattgctctcagcctgctcagcgccgcgctgggtatcggcttaatcgctttcattaacctgcgtctgattaccgctgtcgatacctcgctgcgggtcctgccggagtttcttggtctgctggggctgctgatggcggtgaccctgggttcgcagctggcgctaaccaccctcggccaccattttgtctatcgtctgcgcggtgagtttgttaaacgcatcctcgatacccagattgaacaagtagagaagatcggcagcgcgtcgctgcttgccgggctgaccagcgatatccgcaatatcaccatcgcctttgtgcgcctgccggagctggtgcaggggatcattctcacgttcggctccgcggcctacctcgcctggctgtcaggaaaaatgatgctggtgacggcgctgtggatggcgctcaccatctggggcggctttgtgctggtctcgcgggtgtacaaacatatggccagcctgcgcgaaacggaagataaactgtatcacgactatcagacggtgctggaggggcgtaaagagctgaccctcaaccgcgagcgcgcggagtatgtgtttaaccagctctacctcccggacgcccgggagtaccggcaccatatcgttcgcgccgataccttccacctcagcgcggtcaactggtcgaatattatgatgcttggcgccatcgggctggtgttctggatggccaacagcctcggctgggccgataccgccgtggcggcgacctattccctgacgctgctgtttctgcgcacgccgctgctctccgccgtcggcgcgctgcccacgctgctcagcgcccaggtggcgtttaacaagctgcgtcagttctccctcgccccgtaccgggccgactttccccggccgcaggcgcatcctgactggcagacgctggagctgcgcgatgtcaccttctattatccggaccagcgctttgcggtagggccgcttaatctgacgctgaagcgcggcgagctggtgtttctgataggcggcaacggcagcggcaagtcaacgctggcgatgctcctgaccggcctgtaccagccaatatccggtcagatcctcgtcgacggccagccgctggcggcggagaggccagaggagtaccgcaaactgttttccgcagtgtttaccgacgtctggctgtttgaccgcctgctcgggccgcagggcgaggaggccgatccggcgctggtggcgacatggctggagcgtctgcaaatggcccacaagctgcagctggagaacggaaaaatcgccgacctgcggctgtcgaaagggcagaagaagcgcgtggcgctcctgctggcgctggccgagtcccgggacatcattctgctggatgaatgggcggcggatcaggatccgcatttccgccgcgagttctaccaggttctgctgccgctgatgcagcagatgggcaaaaccgtgttcgccatcagccatgacgatcactacttccagcacgccgatcgtctgctggagatgcgcgccggccagctcgccgaacttaccggcgaagagcgggaacaggcttcccgcgatgcggtggcccgtacggcctgattcacaacgcgcgcccggaaaagcccgggcgccgctgaaattttcagcgtctacatcgctgacggttattatttccccctcctcgcgctatgcttaaggcttccggcccgcaggccggctcaccattctcaaaaggattgcccgatcgatgtccgttttgcataaaaaaagcgcccgcttgcgtgacgaagagcgcgcccgtctgatttggctcttgagcaccgataaagcggtgacttccgcgctgctgggcaaactgacgctggctgaacgatatgatgaagggacgctggccgatgacctggccgaagtggaaatgctggtctcgcatctgccgccgccggatctcgccgatgcgctggaagcgcttccctatgacgcccgcaccgcgctatggtgcctggtgcccgacgataaacgcggcgaagtgctgctggaggcctcagagaacgtctggggcgacctgatcgacaagatgagcgaccccgagctgctgcaggccatgcagccgctggatatcgatgaacaggtttacctgctgcagcatctgccgcgcaacctgaccggacggctgctggcgaccctgccggccgagaagcgcgcccgtattcgccagattatgcgctacgccgacaacagcgtcgggtcgatcatggagtttgaggtcattacggtgcgaccggaggccaccctggcggcggtgcagcgctatctgcggcgtctcggtaaaatgccggaaaacaccgataagctgttcgttaccacccgtaacaagctgctgctcggcgagctggagctgcagaccattctgctcaatgatgcgcagaagcgggtgggggaggtgatggagggcgatccggtcacctttcagccgcacgaagaagcggagaaggtggcgcgcaccttcgaacgtgatgacttgctcagcgccgccgtcattgatgccgacggcaagctgatcgggcgcctgaccatcgatgagatcgtcgatgtggtttatgaagaaaccgataacgatctgcggcggatgggcggcctgagcgatgaagaggatgtcttcgccccggtcagcaaagcggtgaaaacccgctgggcgtggctggcggtcaatctgtgtacggcgtttattgcttcccgggtcatcgacggcttcgaacacaccatttcacagctggtggcgctggcctcgctgatgccgatcgtcgccgggattggcggcaacaccggcaaccagacgatcaccatgatcgtccgggcgatggcgctgcagcagatccagcccggcagctttaccttcctgatcctgcgtgaaatgggggtcgccctgattaacggtctggtgtggggcgggattatgggagccatcacctggtggctgtatgacgatccgcagctcggcggggtgatgacgctggccatgatgctcaacctgctgatggcggcgatgatgggcgtgataatcccgatggtcatggtgaagctggggcgcgacccggcggtcggctccagcgtaatgatcaccgccatcaccgacaccggcggcttctttatttttctgggtctggcgacgctgtttctaatgtagcctgcgcttttgcccgcaggcggcgggggatgatcgccatcgcgacaatccccgccagcacaccgatcgccagattgctggttcccaccgtcgcggcgacggtcaccagcatcaccagcgtttccggccacggattacgcgccagctcgcccgggcgaatgctgtgccagctaaaggttttcaccgccacgatcaccatcaccccggccagaaccgccatcgggatcttcgccatcacctggctgagcgctgtcaccagcaggagcagcaccaggccggcgattaccgttgagaggcggctgcgggcccggcccatttccacgttcacgatagtctggccgatcatcgcgcagccggcgataccgccatagcagccggcaaggatattggcgatacccagcccggcgctttcccgcgatttgttcgacggggtatgagtgagatcatccaccagcttagccgtcagcaaggactccatcaggccgacaaaggcgatgctgagggcgcacggccagattatctgcagggtggtcaggttcaggggaacggtcagggcggtgaaccccggcaggccgccgctcattgacccttcatcgccgacggtcggcagctgctggccggtggtcgcggtatagagggtgagcgcgacgatggcgatcagcggcgccgggatagccttaataacgcgcggcgcccacaggacgataagcagcgtcaggacgaacaggccaacgattaacggttgtcgactccagaaatgcggcacctgagcaaagaaaatcaggatcccgagggcgttgacgaacccggtcatcaccgccgggggaataaagcgcatcaggcgcgccatgccgcacagaccaaacaaaatttgaataatacccgccagaatgacagccggtaaaatgtaccccacgccgtgctgatgcaccatcgggccaatcaccagcgccaccgagcccgcggcggcggtgaccatcgccgggcgtccgccgaagactgacatcgccaggcagagcaccaccgaagcaatcaggcttacctgcgggtcaacgccggcaatgactgaaaacgaaatcacttcagggatgagcgccagggcggtgagcacgccggccagcacttcgcgcgtcagtaaagacggggagcggaggatgagacgcaggttgccggaagcggcggggtcagaaactgggggcataaaaaaagttcgcagcttataaaaaaagagggagcggtgtcaggccctgcttccgtgcggtctgtcacaaaaccagggatgatagcgcggaatctgtcagcgcaccagtacaaaaagtgatttggtgtatacatttattaaacatttttataacggatctcaaaacagaacttaaaatttaaacaatatttaaatttttgagcttcggtggtaacgtgaggggtgagaatcgtatcacctgcgctaaataaaaacagcgagtaaagtaaggctcaaatccgatgaataaaaagatggccgtaccacgctcacaggcggttggtcccaacagcactcggaccaacacccgccatgagcaagagacggatgtattgttgattggcggcggcattatgagcgccacactgggaacctggctgcaggagcttgagccagactggtctattaccatggttgagcagatgtccagcgtggcggaagagagctcaaacgggtggaataatgcgggtaccggccacgcggcgctgatggagctgaactacacgccgcagaccgccaacggcatcaatatcgacaaagcggtcgacatcaacgaagccttccatatctcgcgtcagttctgggcgcatcaggtgacgcgcggcgtcctgaacaaaccaaaatctttcattaacagcgtgccgcacatgagctttgtgtggggcgaagataacgtcaacttcctccgtgcgcgctacgcggcgctgcagcaaagtgaactgttccgcggtattcgctattctgaagaccatcagcagatcaaagcctgggcgccgctggtgatggaaggccgcgacccgctgcaaaaggtcgccgccactcgctcagaagtgggaaccgacgtcaactatggtgaaattacccgccagctgatcgccggtctgcaaaagcatgataatttctccctacagctgggcaccgtggtgcgtcgcttcaagcgcaacgccgacaagagctggacggtcaccctggcggatgccgacaatcgtcgtcagaagcgggtcattaaagccaaatttatctttatcggcgccggcggcgcagcgctgaccctgctgcaggagaccggcattccgcaggccaaagagtatgcgggcttcccggtcggcggccagttcctggtctgcgaaaatccggaggtggtgaaccaccatctggcgaaggtctacggtcaggccgaagtgggcgcgccgccgatgtcggtgccgcacatcgatacccgtattatcgacggtaaacgcgtggtgctgttcggaccattcgccaccttctcgacccgtttcctgaagaacggttcgctgtgggatctgctggcctcgacgaatacctcaaatattttgccaatgctcaacgtcggcctggacaacttcgatctggtaaaatatctgattagccaggtgatgcagaaagataaagatcgtctggccgcgctgtgcgaatattatccggaagcgcggaaagaggactggcggttgtggcaggccggtcagcgcgtgcagatcattaagcgcgacgcgaagaagggcggggtactgcgcctgggcaccgaagtggtcagcgatgatgaaggcaccgtcgcggcgcttctcggcgcgtcgccaggggcctccaccgcggcgcctatcatgctgcagctaatggaaaaagtgtttaaagataaagtcaattcgccggaatggcagaccaagctgaaggcgatcatcccaacctacggtattcgtcttgacggcaacccggcggagatcgagaaagcgctggcgtggaccagtgaagtgctggaactgaaatatgagccagccggggcggtggatgaggtaccgcaggcggagctgaagccgctgagcggcggcaagccgatggcggatatcgcgctctgataaacgctctgacaaaaacggcagcctgcgggctgccgttttttattgccgtttgcgctgttcgccttagcggacgacagcgttgccgatagtctcgtcggcgcgccagatgcgatatttcacatcgacattgctcggcgtgtataccacgatcggcagtttgctgttgtagcgcagcatggcgtcatccccgaggccggcagtgacaaatttcttctcttttttgccgtccgggcaggccatcatggtggataccgggccgctcagcttctcaaagacatagtaatcatagccccagccttccagggttttactttccagttccccgccgagacgatgatggttgcagtcgacttccagcgtctggccgatcatcagctcaaccttgagcgccgactcatcctgctgctgcggcagctgaataacctgacgcttcatgcctttttccgctttcgggaacggcgcgactttttccagcggctggtctgcggccaatgcgccagcggacatgcaggcggcggtcagcagagaaacggctagcgtagtgatttttttcacggttgatcatcctttattttcgttcctgacagagatagcctatcatcactcagctgaatgttaagatttatttaccaatttttgcaaaatgaatagtgttatctactggtaagacatcggccgcgcagagcgcaacagaggcgctggcgggccgccagccccctgccgggaaagctattcattacggctatttttcgcttcctcaataaactcttcatcgatttcatcggtattgccggcatgttctcgtcccgacagcaggttccagcaggcgataaacagggcggcgatcagcggcccgatcacgaagccgttgataccgtagatctccatgccgcccagagtggcgataaggatcagatagtccggcatcctggtatccttgcccaccagcagtggacgcagaatgttatccaccaggccaatcacaatcacaaagaagccgacgataaaggcgccctgccacagttggccggtggcgaagaggtagatggccgctggcacccagataatggccgagcccaccgccgggataagcgacagaaacgccatcagcgctccccagagaatgctgccgtccagaccggcgatccagaaggcaaagccacccagcgccccctgcgccagcgccacggcgacggtaccttttaccgtggcgcgggccacagcggcgaatttagcgaacaaatgctgcttcacatagcttgataacggtagagactcgaggatcaacagcaccagataaggtccatccttcagcaggaaaaacagcagatacagcatgatgccgaagctgacggtgaagccaaaagtccctttgccaatcagaaacgcgctgccggccagatactgaccgcctttcagagcggcatcagagagctgctgctggatctgctgcgcgctatcaaggttatgatcggcgaggaagcttctggcccagccgggaagatgggcgaacaggctggcgaccaccgtcggaaactgggtgtcgttatgctgcagtttgctgtacaccaggttgagctcgtaggccagcgaggagagaatgatagccagcggcgtaaaaacgataagacagataatgacgatggtcatcagcgccgcgaggccattgcgctcgccgaggcgggtacggatcttgtttttgaccggattaaaaatcaccgcgaggatcgcagcccaaaggatggcggaataatagggtgagagaacatcaaaaaaggccagggttacaatgaagacgataaggatgaaaaatcccttggtaagtccattaactctcatgttatccgctcctgcttatgagtcatacggtcgaataatagatgctacgacgtaatttaccatcaggatagtcgtacatcttcacgatacattgaagaaagggcacaaattaagcgagcgggcggcaacaggggaaacaggcataaaaaaaccagccttaaaaggctggtttctgtggagtttttggtcggcacgagaggatttgaacctccgacccccgacaccccatgacggtgcgctaccaggctgcgctacgtgccgacgcgtggggaacaatattacccgttccccaggcgaatgcaagcgggtcacgcgcgattgattcataattaatcaatcagttagcgataaagcgtttttcgtcagtcaggacctgcagcaacaggctgagctgcggtttctgatctttaattttctcgccgtcgcggctccaggtggtataggtgccgttatggttgaggaccacggtgatggtcggggtggtgatggccagcgtatcgccgttggccgcggtgacccagttacgacgccgcgcggcgctgaacagatcttctccctgcgagtactcattggccggcgtcgaaacgtgaagcaggcgctgcatcagcgtagtcatcacatctttgttatcggtcagggtggcaatctcctgcgccggcgtgcccggccagtgaataaccagcggcacctgcagctgctcgcgcgaccagtcgaacgcgtcgtgtttcgcattcagcggcttgccgtggccgccggtaataattaccaccgtattatcgagtttgccggcttcgcgcagcgcagtcagcacccgatcgatctgggcatcaacgtcgccagccgccttgctgtagcggcggacaaagccctgctgctgcgtgtcgtcgagggtggtgccattgagcgagatccacgagaaccagcgattctcatcctgcgcgtaacggtccagccagccgatccactgattggccgtctgctcgtcgctctgggtcttcgcgctcggcagcgagaaatcggagagcagcgcctggcgatacagcgggctgctaaacccatcggaggagaagaggcccagctggtagccttgctggttgagggcagtaatcagcgcggcgggaatacgcgccgagaggacaccgtccatatagccaggcgaaataccgtagaacaagccaaacaggccgctgtcggcggtattgcccgagctcatatgctgggtaaagttaacgttttctttggcaaatgccgccagcgccggcatggtcttttcaaaccgcgagtagttcaggttgtcgacggtgatcagcagcacgttgtagcccgcgccgaggtcacggtagcgcaggttgctaagcggatactggaccgataccgcctccggcgccccttgctccaccagacgacgctgataatcctgggcgtcgagcaggccatgtttctcaaggaaacgacgggcggtcatcggataggagagcggcagattcgcccgctgcatagtgatcgggcgatagaaattggcgtccgcccagatatagaccaggtggctgctgacgaacgacaaaaagaagaaccaggcgaccgggcgggcgtaatggcggcggcgcgtcaggctgcgcagcttttgccagctccaggtggcgaagagcatttcaatcaagaagatgaccgggacgctgataaacatcagctgccagtcgcgcgccatctcattctggtcagggttgatgaccagctcccagacgaccgggtttaagtgcagatggaagcgggtaaaaacctcgctgtctatcagcagcagcgtcatcccggcggtggcaaggatcaccgacaggaagcgcatcaggcgctgcgagaccacgataaaggtcaacggaaagaggatcagcacatagctggtaaacaccagaaagctgaaatgcccgacgagactgacgtacgaaaatagtcgtccggcaagcgtcgtcggccagtcggcgacaaaaaggtagcggctgccgagcaccatggccaacaacatgttgaacagggcgaaccagtgcccccagctaaccatctgggagactttttctcggtagggctgacgtagagtcaccatatactgttgctgttatccttaatgcgctggatcgtcgttaatcgaagattgcaaagcctgcgcgaaagaacgggcgatggcctgacgctgcgccggcgcgacgctactgttgatcaggttggtcaccatattgcctaacaccatcagtgaaaggtccaccggggctttgtgtgattccaggacgttcgtcagctcgctgagcaactgttcgacctgttgatcgctatagcgggaaatttgcggcataaactcaaaatctgtttgttcgtgaaagggcaacatattaccgtagcagcagctttttttccgcattttttcgccgcggcgcaaaagcgcatcaatcgacgttaacgacgtcgaaatgtgtggcgccagttgcgtcggccacccggcggtggttgaataccgcccggtctaaaaggagagtttaacatgagtctggatatcgaccagattgccctgcatcagttaatcaaacgtgatgaacaaaatctggagctggtgctgcgcgagtcactgctggagccgaacgcgacggtcgtcgagatgatggctgaactgcaccgggtctatagcgccaaaagcaaagcctatggcttgttcaatgaagagagcgaactggcccaggcgctgcgcctgcagcgtcagggggaagaagagtttctggcgtttagccgcgcggcgaccggtcgcctgcgcgatgagctggcgaaatacccgttcgccgaaggaggcattgtcctcttctgccagtatcgttaccttgcggtcgagtatctgctggtggcggtactcaataacctgagcagtatgcgcgtcaacgaagagctggatatccgctcgacccattatctggatattaaccatgccgatatcgtcgcgcgcatcgatctcaccgaatgggaaaccaacccggagtcgacccgctatctgaccttcctgaaagggcgggtagggcgcaaagtggccgatttctttatggatttcctcggcgccagcgaagggcttaacgccaaagcgcagaaccgcggcctgctgcaggcggtggatgacttcgccgccgatgcccagcttgataaatccgagcgacagaacgtgcgccagcaggtctacgcctactgcaacgaacagctgcaggctggggaagagattgagctggagtcgctgtccaaagagctcgccggcgtcagcgaaaagagcttccaggaattcaccgctgagcagggctatgagctggaagagagcttcccggcggatcgcagcaccttacgtcagctgaccaagtttgccggcagcggcggcggattgaccattaacttcgacgccatgctgctgggcgaacgcgtattctgggatcccgccactgataccctgaccattaagggtaccccgccgaacctgcgcgaccagctgcagcgccggacgtcaggcggcaattaagccctgcgccccgtcggcgctaccgctgaacggggacgatctccacgccgctctgcaccaactgttggcgcagcgcggcgtcgggttctccatcgacaatcagcgtactggcgaggctcagctcgccgatggcaaaggccgacgcggcgttgagcttttcccgggaggccattaccacggtttctgccgccctggccgtcagcgcgcgcttgatgcctgcctcttcgtaatcaccggtggtgaaacccgcccgcgggtggacgccggtcacccccataaagaacagatcggcgttgatccgcgccattcccgccagcgtctcggcgccgacggcgacaaccgaatgtttaaatactctgccgccgagcaggatcacctcgattcgcgggtggtccaccagcgccacggcgatgcccgggctgtgggtgaccaccgtgcagctgaggtcggcgggtaaaaagccgatcatcgccgcggtggtggtgccgccatcgacaatcaccacctgtcccggctggatcagggcggcggcggcgcgggcgaccgcctgcttggaggcgatctgcacgcttttgcgcgtttcaattggcgcaatggcggcggataccggcaatgccccgccatggacccgctgcagttttccctccgccgccagctcgcgcagatcgcggcgaatggagtcctcggagacgttaaaccgctggcttagctccccggacatcacctgtttttcctcggtgaggatctggaggatctgctgttttctctgactggcgagcatcggttttccttcatcgaatgatcttgtttgtgcacgattatgcatgttatggtgcctgctgtcacctcaaaggggaaataacatgcaaacacacgcaccgcacgtccgccacgttcgcgagacgctgctctcggataactggtacacgttgaaaaaatataccttcgaactgctgcgtcgggacggtcgctggcaggagctgagccgcgaggcctatgaccggggcaacggcgcagtcattttactctacaaccgggaaaagcggacggtggtcctgacccgtcagttccgttttccggtatttactcatggccacgacggatatctcattgaggcggccgccgggctgttggataacgcctcgccggaggcgcggatcgttgccgaagcggaagaggagaccggctttcgcgtgacccgtgtcgaacccgtcttcaccgtctttatgagccccggctccgtcaccgaaaaactctacttttttatcgccgaatatcaggccgatgaccgtcggggcgacggcggcggactggcggcggaaggtgaggacattgaagtactggagtggccgctgacgcgggcgctgcaggccattcgcgatggcgagatcatggatgctaaaaccattatcctgctgcaacacctggcgctgaatgccgacacgctcctcgccggctgagcggcaaggagcggggagttaacgcagctcgcgggcaatggcgctgtacatcagcgccgcttccaacggctgagcgttgaaggaaggttccgcctgcggccaggtcgaccactggacgatcaccagatgttccgcgcggttcaccatgatcacctggccgtagatccccagcgcccacagcgaccctttaagcccttcctgcggcgtcggctggacgttttgcgcattcgccggaatcgcgttattccaccactgatagccgtaaataccctccggatgcgctgccgagaccgagtttagcgccttggtccagctggcggcttgatcgaaccagccagtcggcaccagctgtttgccattgcttaaccgaccgtcacgggcgacgaattcaccaaagcggccccagtcttcaagggtggcgttaaagccgtgggcgccgacgtcgtgcttcccttgctgataagcatgccacacgccgtcgtgggccatcccggccggctgccatagagcctgttcaagccaggcggccagcgacatgccggtggcgcgctccaggatatccccaagcagccaggcgccgccggaagagtaggaccactgctcgcccgccgggtgttgacgcgccaggccggtgacgattttacgcacgcaggcataggcgcccgggtgcgcttcacactgggtcaggcgggcgaaatgcgactgcgggtcggtgtagtcttcattccattccaccccgctggtgtgttgaatcaactgcttcagcgttacgccgtcccaggcggtgcctttcagttcgggttcataaacggtaatcaggtcatcaagggagtggattttaccctgttgaatggcgataccgaccagcgtcgagaccaccgatttgcctaccgagcgcgaggtccacagggtggtgtcggtattaccttcggcgagatatttccaggcgactttaccatctttcagcaccagcataccgctgacgttctcgcgcttcaggtaatcctgcaaattccaggtgtggccgttgagcgtatagcgggcatcggtcagttgtttttcagcgcgctccagcggcgtcgaggcgccgtggcggaagacatcgccggcatagttgcgatagtcattgcgaaagccaatcacgcgtgaagtctgatcccagctgagcatgtctttggccgcgggtagcgtttgatcgtaaggcgttgggcagacatccagcgtcaggctgccgcagtgttgcgccattgccgccgccggcagagccgccaatattaacgccagggccagtggttttcttatcattgtcatttcctcgtttgccatagattcgctgcgcagtatataaatcggcgcgcgccggctaaaatcagcacatgggggattttcccccttaagggagaaaaaggatgaaaaccctacagtactcattcgcacagattgaagccttcgcgacgattgctgagaccggcagcctgtcgcaggcggccattcgtttagctaaagaccggaccacgctgcgcgatctgctggactatctggaagatgcgctgggctaccggctgttcagccgtgaaggacgtagcctgacgctaaccgccgagggcgagcagctgtttcgccaggcgcatctgctgttgcgtcaggcgcaggctttcgagtcttttgcgcaaacgctgccgcaaaccgccgggcaggcgctgcgtctggtgtacgatcccttcgtgccgcgtgaatttctctgtgcgctggccgataacctggcccgacggcagatccgcctgagctgctggagcgcctcgcgtcgcgaagccgagcaggcgctgagcgatggcgtggcggagatggcgatttgtcaggctaacaaccgcacgctggggagcgaaatggagtggcgggcgctcggcaccgtggatctgcgtttctacgcggcggacagcctgttccacgacgctccgcggccgctgacgctattgaatctttcgttgacgccgcagttagtgatgcaccggcgcagtgacgatcaaatcgcccgccggctgcagatttccggccatacgctgtatatgaatgaaattaccctgttgcgccatgcgctggagcaggggaggggctgggggtttttaccggaccatttgcggccaggcgagtggcagggagtcagtgaaatcgcgacggaggtcggcagtcaggggctgaacgtcactatggtgatgctctggctgcccggaatgaataagcatcggatgcttagcgacatcgtgcacgaggcgccggagctttggctgcgcagataacaaaacgccccggagcctgagaccccggggcgcttgccatacaacttgctatcggcgattacgcgcgaacgaagtcgatgtgagtcagtttcggcttgaacgcgtggcgctgaacagcctgaactttgactttttcttctttgccatcaacaacgacggtcagaacttcgctgtaaaactcagctttgtcctgcatgttccatactttgtcgtggtccagttcgatagcaaccggagcagctgcgccaccgtagatgattgccgggaacttgttagctgcgcgcaggcggcggctcgcacccttaccctgctctttacgtacttctgcgttgatagtaaacattgatgtctctctatatataaagcctgctacaggcgacccagcaacaggcggattatctgctttgcgaatgcaaaagcgggcggcattatagccgccaaacgacacccgggcaatcaaaacctcagctttccggtaattaacgcagctcgttggcgcgacgaaaacgcccctgataatcgaacactttttcccgcacctgccagtactgccccttcatgcgggcgacgacaaagtccggatggcgcagcagcgcctgctgggtcacgatatccgccggcgttatccagcgcagcggcaccccgggggtgcgggtatgcgggcgaataaacagttgttcgaaggcggtgcgctgggcgggggtctgcagacggaagcgctcactgacatccgccccgtcttcatcgtagtaggtgattttcagccacgggcccttctcgtcgccgccgtgctgcaggaccatgccgctgcagcgcagcaccagcgcgtccttcagcttcagcgccgccttcagcatatcgtccgggtcaaccagtatagtgtcgcactcccggcagcggcgggcggcgatgtcgttttccgcattacactgcgggcagtttttaaagcgaaagcggaagtcgcactgttcgcggtggccgtcgtcatcttcgaaccacccctggcagcggcggccaaagtgttcaatcaaggtgccgtcggcggtggttttgccccagaaggtattggcgaagccgcaggccgggcagaagacctgcaccggcacgttgtcgcttttgcccttcggcgtccccacttccggggcatacaggtcatgcggattgccggcgtagtcgaggatcagacagtcggttttccccggcgccaggcgcagaccgcggccaacgatctgttggtaaagactcaccgactcggtggggcggaggatggcgatcaggtcgacgtgcggggcgtcgaagccggtggtcagcaccgcgacgttcaccagatagcgatacgcctgcgctttaaaggcctcgatgatgcgatcccgctccggcccaggcgtttcgccggtgatcagcgccgcctggcctaccggcagcaggccggtcacttcccgggcgtgttccacggtggcggcaaagatcatcacccctttgcggttttcggcgaactccacgatctggctgacaatatgcggcgtgatacgctgttgttttttcagctcatggttaagatcggcttcgctgaacaggccgttgctttgcgcctgcaggcgactgaaatcgtactgcaccaccggcatatcgaggcgctccggcggcgtcagatagccgtgtttaatcatatagcgcagcggtagctcatagatgcagtcgcggaacagggccttttcatcgccgcgcaccatcccatgataatggaactgatagatccagcccttgccaaggcggaacggcgtggccgtcaggccgagcagccggatctgcggattgacctgccgcaggtgaccgatgatctgctgatactggctgtcgtcatcatcgctgatgcggtggcattcatcgacgatgagtagcgaaaattcgctgcgaaactggtcgagattgcgtgccaccgactgcacgctgccgaacaccactttgccgtggctctcttttcgctgcagaccggcggcgaagatatccgcctcgaggccaagggcgcagtatttggcatggttctgcgccaccagctctttgacatgggccagcaccagcacgcggccgcgcgccagcctggcaagctcggcgatcaccagacttttgcccgcgccggtgggcaggacaatcgccgccggctcggtatggcgacggaaccaggcgagggtggcatcgacggcttcttgttggtaaggacgtaatgtaaaagtcatgaattcacggggctaattaactggcgaatagtatgccatgaatcttttcccttgagtggtgttaagagcccgttatactagccggtgaaattcttctttttcgggcgatttgcccgctccagcactatgacaggctaaaaaaatctcatgcgacttgataagtttatcgctcagcagctgggcgtcagccgggctattgccgggcgtgaaattcgcggcagccgcgttaccgtggacggcgacattgtgaaagatgcctcttttaagctccagccggagcacgaggtggagtatgacggaaatacgctgacccagcagaatggcccgcgttattttatgctcaacaagccgcaagggtacgtctgttccaccgacgatcccgatcatccgactatcctttatttcctcgacgagccggtggcgcataagctgcacgccgccggacggctggatatcgacaccaccgggctggtgctgatgaccgatgacggccagtggtcgcatcgcattacctcgccgcgccaccattgtgaaaaaacctatctggtggcgctggaaagcccgctggcggaagggaccgctgagctgttcgccaaaggcgtccagctgcataacgaaaaagatctcaccaaaccggcgttgctggaagttatcactccgaccgaagtgcgcctcaccatcagcgaaggccgctaccatcaggtgaaacgcatgttcgccgccgtgggcaaccacgtggttggcctgcatcgggaacgcatcggcgacatcctgctggatgaatcgctggcgccgggtgaatatcgtccgctgacggaagcggaaatcgccagcgtgggcgccccgcagccacggagtaaaacgtgacgctgaagcagaattcttcactggggattgtgtttatccttggcctgctggccatgctgatgccgctgtctattgatatgtatcttccggccctgccggtgatcgccgcccagtataacgtcccggacggcagcgcgcagatgacgctcagcacctatatcctcggctttgcgctgggtcagctgctgtacggcccgatggcggacagccttggccgcaagccggtgatcctcggcgggacgctggtcttcgcggcggcggcggtagcctgcgccctgtcgcaaaccgtcgatatgctgattgtcatgcgtttcttccacggtctggcagccgcggcggccagcgtggtgattaacgccctgatgcgcgacatctatccgaaagatgagttttcgcgcatgatgtcgtttgtcatgctggtcacgaccattgcgccgctggtggcgccgatggtcggcggggcggtgttggtctggttcagctggcatgccatcttttggatcctcgccctggtggccctgctggcctcgctgatgatcggcctgtttatccgcgaaacgctgccggctgaaaggcgtcagccgttccatctgcgcaccacgctgggtaactttgccacgctgttccgccacaagcgggtactgagctatatgctggcgagcggctttagcttcgcgggcatgttctctttccttagcgccggtccctttgtctacatcaatataaaccacgttgcgcctcagcactttggctactattttgcgctgaacatcgtttttctgtttctgatgaccatgttcaacagccggtttgtgcggcgggtaggggcgttgcgtatgttccgcgccgggctgtggatccagtttgccatggcggtgtggatggtggtctgcgcgctgctggatgtcggcttctggtcactggtgatcggcgtagcggcctttgtcggctgcgtatccatggtgtcgtctaacgccatggcggtgatcctcgatgagtttccgcatatggcgggcactgcttcgtcgctggcggggactttccgtttcggtatcggggcgattatcggcgcgctgctgtcgatggcgacgtttaccaccgcctggccgatgctgatctctattgccttctgcgcaacctgctctattttcttctcgctttacgcatcccggcggcgaaaaatcgcacgctaggtcacattttcaggggcgaaatcgcccctttcttgatgcatgtcaaccgcaatgggcttcagggttctgcgatttgtttcctttatgtaaaatcaattagtgtaaaaagtcgcattgttgcgataaaaaagttgttttggatcacagaaacgggtacatatagcgccaatcggctcgccgggtataaaaaataaagcgctggattataagcgcttaaccctggtccgccgccgctgtaaacgttttctgcctcaaggcaggactatttgtcaacagtgtgttaatattgatgtaaatttattgtgaagccttttgcttccggggaaaccaagtgaatacacaacaactctctatcgtacaccgtctgccgcagagctatcgctggctggccggttttgcgggttccagagttgaaccgattccgcaaaacggcgcgcagaacgagaacagtctcgttgccctgaaattgctgagcccggacggtgagaaagcctggccggtgatgcataagctcagccaggcgttaagcgacatcgaagtcgactgttccgtgctggagtgcgaaggcgaaccctgcctgttcgttaacctgcaggatgagtttgccgccacctgtcgtctgaaaaactttggcgtggccatcgccgagcccttctccggcaataaccctttctgaccgtcagcttagcgccagcagctggcgggtatactcatgccggggtgcgctgaagacggacttgcactcgccctgttcgaccacctctccctgacgcagcaccattacctggtgacacagcgcccgcaccacgcctaaatcatggctgataaaaatataggccagctgatgctttcgctgtaaggctttcagcaggttcaggatctgcgcctgaacggttttgtccagcgatgaggtcggttcatcgaggacgatcagctgcggtttgacgatcaacgctctggcgatggcgatacgctgtcgctggccaccggagaacgccgccggatagcgctggcggctggccgggtcgaggccgacctcctgcatggcaaggatcaccgcctgttcgcgttcggccgccgtcagcgtcggctggtggacgcgcaagccttcctcaatgatctgctgcgccgtgaggcgcggattgagcgacgagttcggatcctgaaaaaccacctgcatctgtcggcgcagcggtagcagctgtcggcggttacgcccctgaatcggctggccggcgaaggttatcttgcccccggacgggatcaggcgcagcagggccaggccggtggtgcttttaccggaacccgattcccccaccaggcccagcgtctcgccggcgcgcagctgaaagctaaggctgttgaccacccgatgatgatcgaccacccgacgcaggatccctttgcgaacgggaaacgccacctttaaatcgtccgcctgcagcagcaccggggcatcggcggccagcggcaccggctccccgtccggctcgctatccagcaggcgttgggtgtagggatgcgctggcgcgctgaacagcgcccgacagtcattgtgttccacgcagcggccgttctgcataaccgccacccggtcagccagctggcggacgatgctcaggttatgagtgataaacagcagccccatgttcagctcctgcttcagctcgcgcagcagttgcagaatttgcgcctgcaccgatacgtccagggcggtagtcggctcgtcggcgatcagcagctccgggcgagtcagcagcgccatggcgatcatcacccgctggcgctcgccaccggagagctgatgcggatagtccgccagccgccgcggcgcctgacggatcccgacgcgctccaggcagtcgaggatctccccgcgcgccgcctgtttgcgcattccccggtgtaacgacagcacctcgtagagctgtttttccagggtgtgcagaggattgagcgataccatcggttcctgaaagatcatcgcgatccggttgccgcgcacgccgcgcagggtcgcctcatccgcatgcagcagcgactggccatgaaaacggatgtcaccgctggggtagctggccggcggggtagggagcagccgcagcaccgacagggcggagatgctcttacctgagccggattcgcccaccagggccagcgtttcgccgaccgccacctcgagcgacagattatgcaccacggtctgcgtctcgccctgctggcgaaaggcaatagagagattgtcgatagctaatagcgggtgggtcatattacaccgccttactcgggtcaaaggcgtcgcgaaccgcttcaccgataaaaatcagtagcgtcagcagcacggcgacggagagaaatgcggcaatgcccagccagggcgcctgcaggttgtttttgccctgcagcagcagctcgccgagggagggcgagccgagcggcaggccgaagccgagaaaatccagcgacgtcagggtggtaatggagctgcacaggataaagggcaggaaggtgagggtcgccaccatcgcgttgggcaacatatgccgcaggatgatctgccggtcgctaacccctaacgcctgcgccgcccgaacatagtcgtagttgcgagtgcggagaaattccgcgcgcaccacgcccaccagcgtcatccagccaaagagaacggtgattgccagcagccaccagaagcccggctgcacgacgctggagagcaggatgatcaggaacagcgttggcatgccggaccagacttcgataaagcgctgtccccacaggtcgattttaccgccgtagtaaccctgtatcgccccggccagcaccccgagcacgctggagaacagcgtcagcagcagaccgaagagcaccgagatgcgtgtcccatagaggatccgcgccagcacatcgccgccgttggcgtcggtgccgagccagttgctggctgagggcggcgatggaacttgaaaaaaaaaaaaaaaaacgctgccgacgagcgagctagtgtagctctcggtggtggccgtatcattcaaaaaacaaaaacggcatcacacatgaccagcaccatcctggaaaaacactaagcgactagacacacacaccctcgcaagacaccccagacgac

SEQ ID NO: 159 - DNA, 52042 bp, Unknown
  source: /note="Description of Unknown: MKP2_2161_1 Mutant Bacteria sequence"
tttttttttttcctgcagaagacggcatactatctcctctctggtctcgtgggctcggagatttgtatacgagacaggatgatattcgcccacggttatgggcgcgaatcgatgcttttactaagccgctcatcgcctcggtcaacggctacgcgctcggcgccggctgcgagctggccctgctgtgcgacctgattgtcgccggggacaatgcccgctttggcctgccggaaattaccctcggcataatgccgggcgcgggcggcacccagcggctgatccgcagcgttggcaaggcgctggccagccggatggtgctgagcggcgagagtattgacgcccgccaggcgcagcaggccgggctggtcagtgatatccatccggcggcgttaaccgatgagtatgccctgaaactggcaaccaccattgcccgccattcgccgctggcgctacgggcggcaaaacagtcgctacgcctggcgcaggaagtcagcctgcaggccggtctacaacaggagcgccagctgtttagcctgctgagcgccaccgaggaccgccgcgaaggcatcgacgccttcttacaaaaacgtaccccggaatttaaaggacgctaatcgtggaagctttcattctcagcgcagtggaacagggcgtcatgaccattaccctcaatcgcccggaccgcctcaacagttttaacgatctgatgcatcaccagctggcggaatgtctgaagcaggccgagcgcgatgatggcgtgcgctgcctgctgatcaccggcgccggccgcggtttttgcgccggccaggatttgaacgaccgcaatgtcgaccccagcggcccgccgccggatctcggcatgtcggtagaacgcttttacaacccgttagtgcgccgtctggcggcgctgccgaaaccggtcatctgcgcggttaacggcgtggccgccggcgcgggcgctaccctggcgctgggctgcgatatcgtgctggccgcgcgtccggccaaatttgtgatggcgttcagcaagctcggcctggtgccggactgcggcggcagctggttcctgccgcgggtggccggccgtgcgcgcgcgatggggctggcgctgctgggcgacagccttagcgcggaacaggccgcgcagtggggaatgatctggcaactggtggacgattcagaactggcggataccagtctgcaactggcgcgccatctggcggcgcaaccgacgtttggtcttgggctgattaaaaaggcgctgctggcctctgaaaccaacagtctcgatgcgcagctggacctggagcgcgattatcagcgtctggccgggcgcagcgatgattaccgcgaaggggtcagcgcgtttctggccaaacggccaccacagttcagcgggaaatagatgatgacgacatccttagccaccgtggcggtgatcggcagcggcaccatgggggccggcatcgccgaagtggctgccgccgccgggcatccggtgcgtatttttgatattaaccctaaggctgtagacctggcgatagagggtatcgccgggcgtctggcgtcacgcgttgcgcggggcaaactggcgtcagagcaggccgacgcgctgctggcgcgcctgcatccggcccacgatttagccgcacttgccgatgcagatttagtgatcgaagcggcctctgaacggctggaggtcaaaacggcgctgttcgcgcagctggcggcgatctgcgcgccgtcaacgctgttgaccagtaatacctcgtctatttcgattaccgctatcgccgccggggtcaaaaacccggagcgggtggccggactgcacttttttaatccggcgccggtgatgaagctggtcgaggtggtgagtggtcttgcgacctccacagaagtggtggagcagctgtgccagtgcgtaagcggctgggggaaacagccggtgcgctgccgctcaacgcccggttttatcgttaaccgcgtagcgcgtccgttctacgctgaggcctggcgcgcgctggaagagcaggtcgccgccccggaggttatcgatgccgctttgcgtgacggcggcggcttcccgatgggaccgctggcgctgactgacctgattggccaggacgtcaacttcgccgtgacctgttcggtgtttaacgccttctggcaggaccgccgctacctgccatcgctcctccagcaagagctggcgctggccgggcggctaggtaaaaagagcggccacggcgtctatcgctggcccgctgagacactgccggacgcggcgctgccgccggtaatgataggtgctgaatccgttaccgtcagaagtgacaacgtcactgaattagacgatatcttgctgctggagactgaaggcgagaccgccctggcgctgagtattaagcatcaccgcccggtggtggtgtatgacctgtgcgccagcgatacggtggtgctggccgcagcggcaaccaacgcgcctgcggccactgataaggccgtgcattacttccagcagcagggcaagaaagtgctgcgtattgccgattatcccggcctgctggtgtggcgcacggtggcgatgctgattaacgaagcgctggatgcggtacaaaaaggcgtcgccagcccgcaggatgtcgataccgcgatgcgccttggcgtgaactatccgcatggcccgctggcatggggagaacgccttggctggcggcgggtgctgcaactgctggagaacctgcaacaccattatggcgaggagcgctatcgccccagttccctgctgcgccagaaggcgctgatggagaagcaccatgagcaatgatccgtggcgcaacgcgcgcgtgatgtacgaaaaagatacctgcgccagaaagatggggatcgaacttatcgaaatggacgacggttttgcgcagatgagtatgaccgtctcggcggacatgcttaacggccatcaaacctgtcacggtggtcagctatttacacttgccgataccgctttcgcctacgcctgtaacagccaggggctggcggcggtggcctcggcggcaagcattgattttcttcgtccggcgtttgccggcgaccggctggtcgccaccgccagagtcaaacagcagggcaagctgaccggcgtctacgacatcgaaattgttaatcaacagcaaaagattgtggccctgttccgcggcaaatcgcaccgcatcggcggcacaatcacgggagacgtgtaatgcgcgacgcctttatttgtgacgggatccgtacgccgattggccgctacggcggcgcgctggccagtgtgcgcgccgacgacctggcggcaatcccgctgcgtgagctcctgagtcgtaatcccgggctcgacccggcagcaattgatgatgtgattttcggctgtgcgaatcaggccggggaagataaccgcaacgtggcgcacatggcgacgttgttggccggttacccgcataccgtgccgggcaccacgattaaccgcctgtgcggatcgggtctggatgccatcggctttgccgccagggcgatcaaagccggcgatgtcgagctgctgattgccggcggcgtggaatcgatgtcgcgtgcgcctttcgtgatgggaaaagccagcacgccgtaccagcgtcaggcggaactctttgataccacgattggctggcgttttgtgaacccgctcatggcgcaacacttcggaactgacagcatgccggaaacggccgagaatgtagctgaattgttaaatatcagccgggccgatcaggacgctttcgcctggcgcagccagcagcgcacggcgcaggcccagcgcgacggcattctggcgcaggagattgtgccggtgcagattgtcggccggaaaggggcggttagcgacgtgcgcgaggacgagcatccgcgcccggaaaccacgcttgagcagctggcgaaactgaaagcgccgttccgccagggcggcgtcattactgcgggcaatgcttcaggcgtcaacgatggcgccgcggcgctgatcatcgccagcgaacagcaggccgctatccaggggctcacgccgcgggcgcgtatcgtggcgatggcgacggcgggtgtcgaaccgcgcctgatgggactggggccggtaccggcggtgcgtaaagtgctggagcgggcgggactcaatattaacgatatggatctgattgagctgaatgaggccttcgccgcccaggcgctgggggtgctcagacagctcggcgtgccggacgatgcggcgcacgtgaatcccaacggcggcgccatcgcgttaggccatccgctgggcatgagcggcgcgcggttagcgctgagcgccagccttgagctgcaacgccggggcgggcgctatgcgctgtgtacgatgtgtattggcgtgggtcagggcattgccatgatcctcgagcgagtgtgagctaatttacctgcgagtaccctacaatgataactactacaaaattagatccgattgaaaccgcatcgcgtgacgaactgcaggccctgcaaacccagcgcctgaaatggacgctgaagcatgcgtacgaaaatgtgccgatgtatcgccgcaagttcgacgccgccggcgtgcaccctgacgactttcgggaattaaacgatctgcaaaaattcccctgtaccaccaaacaggatctgcgcgacaactatcccttcgataccttcgcggtgccgatggagcaggtggtgcgcattcacgcctcttccggcaccaccggcaaaccgacggtggtgggatatacgcaaaacgatattgataactgggccaatattgtcgcccgttcgctgcgcgcggccggtggttcagcaaaagataaaattcacgtcgcctacggctacggcctgtttaccggcggccttggcgcgcactacggcgcggaacgtttgggcgcgacggtgatcccgatgtccggcggacagaccgaaaaacaggcgcagctgatccgcgatttccagccggatatgatcatggtgacgccgtcctactgtctgaatctgattgaagagctggagcgccagatgggcggcgatgcccgcagctgttcattgcgagtcggcgtctttggcgctgagccgtggacgctggcgatgcgcgcggaaatcgagcgccggctggggatcaccgccctggatatttacggtttgtcggaagtcatgggaccgggcgtagcgatggagtgtctggaaaccgttgacggcccgactatctgggaagaccacttcttcccggaaatcgtcaacccggacgacggtacgccgctggaagatggcgagcatggtgagctgctgtttaccaccctgaccaaagaagcgctgccggtgatccgctatcgtacccgcgatctgacgcgcctgctgccgggaaccgcgcggaccatgcgccgcatggatcgcatcagcggacgcagcgacgatatgctgattatccgcggggttaacgtcttcccctcgcagctggaagaggagatcctcaagtttgaacacctggcgccgcactatcagttagaggtcaatcgccgcggtcatctggattcgctggcggtgcgcgttgagctgaaagagagcgggctggcgctgagtcatgaacaacgctgccagatttgccatcagttgcgtcaccgcattaagtcgatggtcgggatctccaccgatattactatcgtcaactgcggcagcattccgcgctcggaagggaaagcctgtcgggtattcgacctgcgaaaagcggtggtcagcggttaatcctctctccggctgcgcggcaggcacccggctgaagcgtttgcgccgtcagccggggagtttcctgtgctatgattcataaaggaaaaatataacaacagaatgaatcagatgagtaaactcgacgcctttattcaacaagcggtgacggcgatgcccatcagcggcacgtcattaattgcctcgctgtatggcgacgctttattacaacgcggtggggaagtgtggctgggcagcgtcgcggcgctgctggaaggattaggcttcggcgagcgcttcgtacgcaccgcgctgtttcgcctcaataaagaagagtggcttgatgttgtccgcatcggccggcgcagcttctatcgcctgagtgataaagggttgcgcctgacccggcgcgcggagcataaaatttatcgcgccagtgccccggaatgggacggtacctggctgctgctgctttcggaaggcctggagaaaaatgtgctcgccgacgttaaaaagcagctgctgtggcaggggtttggcgcgctggcgccgagcctgctggcctcgccgtcgcaaaagctggccgatgtccagtctctgctccacgaagcgggcgtcgccgaaaacgtcatctgttttgaagcccattcgccgctggcgctctccagagcggccctgcgcagccgggtggaggagtgctggcatctcaccgaacaaaatgagatgtacgaggcgtttatcgccttgttccgacctctactgccgctgctgcgcgattgcgacccgtcagagttgacgccggatcgctgtttccagatccaactgctccttatccatttctatcgccgggtggtgctcaaagacccgctgctgccggaagagctcctgccggcgcattgggcagggcaaaccgcccgccagctgtgtatcaatatttatcaacgcgtgagtcccggcgcgctggcgttcgtcagcgagaaaggtgagagctcggtgggcgagctcccggcgccgggtccgctctattatcagcgctttggcggtttgccgggcgcataaggaggttgcatgccgatatatcagattgatggactgacgccggtggtgccggaggagagttacgttcacccgaccgcggtgttgattggcgacgtgatcctcggcaaaggggtctatgttgggcccaacgccagcctgcgcggcgacttcgggcgcatcgtggtcaaagacggcgccaatattcaggataactgcgtgatgcatggcttccccggccaggatacggtggtggaagaggagggccatatcggccacggcgctattctgcacggctgcgtgattggccgcaacgcgctggtgggcatgagcgcggtgattatcgacggggcggtcattggcgaaaacagcattgtcggcgcttcggcctttgtcaaagccaacgccgagatgcccgccaaccatctgattatcggcagcccggcaaaagcgattcgcaccctgagcgaacaggagctggcgtggaaaaaacaaggtacccgtgaataccaggcgctggtggaacgctgtaagcagacgctgcaccaggtggagccattacgggaagtcgaagcagggcgtaagcggctggcgttggatgaaaacctgcggccaaaagccgccacctgaggggtaaaattatggcagagaaattatccgctcactgtcactgcggtgcggtggcgtttaccgtggaactcagcgacggcttcaacaccgttcggcgctgtaactgctcatattgtcgcatgcgtggggcggtcgcggtctcttcgccgcgttcaggaatagaggtggtacgcggaggggataagctcacagagtatcgctttaatacaggggaagccgtgcactttttctgctcggtatgcgggatctacacctttcatcaacggcgatcaaacccacagcagtatggggtgaatgtggcctgcattgacggcatttcgcctttcgatttcccttgcgtggaggtcaacgacggcgtgaatcatccaaaggatggcggcggaggcgtggtggggtatttacgctacgagaaaaagtaaaactctcctcccgcaggaagcgagaggagtgaaatattaggctgcaaccacgctgtcgatggccgctttcgcgtcagactgcgctttggccgcgacttccgggccgtaagcgataccttcggcgaacacaaagttcacgtcggtgatgccgatgaagccgaggaaggtggacaggtacggggtgaccaggtcggtcggagtatctttatggataccgccgcggctggtaacgacgaccgcgcgtttaccggttaccagaccttccggccctttctcggtgtagcggaaggtgacgccggcgcgagccaccaggtcgaaatagtttttcaactgcgtcgggatgttgaagttgtacatcggcgcagcgataacaatcacatcgttgcctttcagttcggcgatcagctcgtcggaaagggccagcgcttcctgctgacgcggagtcagcggcgcgtcgctcggacgcagggcgccaaccagttcgccatccagaaccgggatcggattggcggccaggtcacgcacggtgatctcatcgccagggtgtttttcctgccattgttcaacaaaatagtcggaaagctgaccagattgtgagtaccctgccagaatactggatttcagaactaatactttgctcatgggtgtttcctttttttaatgtgattgacgggtcaatgccctggtgcttgttgacactgtattcacaatcgcgccacagagatagcgcaatatatcgaatcctatgttcagattttttgaacaaggcacgaatgacacagatgtggtactctaaggcaatacttcaaaagagattttcccggcagagctctgcccgataacgctatgacagaacaacaaaaaatcaccttcccccagctttatcaacagctcgacggcctgatgctgcgcgacaaaacgcgctttgcccgccgtctgcacggcgtgaagaaggttaaaaatcctgaatcgcaacaggccattctgcaggagatggcgctggagataagccaggcagccggtaaagtcctgctgcgcgaagcggcgcgtccggccatcacctatccggaaaacctgccggttagccagaaaaaacaagagattctcgaggcggtgcgcgaccaccaggtggtgatcgtcgccggggagaccggttcgggtaaaaccacccagttgcccaaaatctgcatggagctggggcgcgggctgaaaggactcatcggccatacccagccgcgtcgcctggcggcgcggaccgtcgccaatcgtattgccgaagagctgcagagcgagccgggcggctgcatcggctataaagtccgcttcagcgaccatgtcagcgaaaacaccatggttaagctaatgaccgacggtatcctgctggcggagatccagcaggatcgtctgttgatgcagtacgacaccatcattatcgatgaggcgcacgagcgcagtctgaatattgactttctgctcggctatctgaaagagctcctgccgcgccgcccggacctgaaaatcatcattacctcggcgaccatcgacccggaacgtttctcaaagcatttcaataatgcgccgattatcgaagtctccgggcggacttacccggtggaagtgcgctatcggccgatagtggaagaggcggacgataccgagcgcgatcagttacaggcgatctttgatgcggttgacgaactggggcgcgaagggcccggcgatattctgatctttatgagcggtgagcgggaaattcgcgataccgccgatgcgctgaataagctggatctgcgccataccgaagtgctgccgctgtacgcccgcctgtccaacagcgagcagaaccgcgtcttccagccgcacagcggacggcgcatcgtgctggcgaccaacgtggcggaaacctcgctgaccgtgccgggcattaagtacgttatcgatcccggtactgcgcgtatcagccgttacagctaccgcaccaaggtgcagcgcctgccgatcgagccggtttcccaggcgtccgccaaccagcgtaagggccgctgcggccgcgtttcggaagggatctgtattcgtctttattcagaagacgatttcctgtcgcgcccggaatttaccgacccggagattctgcgcaccaacctggcgtcggtcatcctgcagatgaccgccctgggcttaggcgatatcgccgccttcccgtttgtcgaagcgccggataagcgcaatatccaggacggcgtacgcctgctggaagagctgggcgccatcaccaccgatgcgcaggcaacggcttataagctaaccccgctgggccgccagctcagccagctaccggtggatccgcgtctggcgcgcatggtgctggaggcgcagaagcacggctgcgtgcgggaagcgatgatcatcacctccgcgctgtcgatccaggacccgcgcgagcggccgatggacaaacagcaggcctctgacgaaaaacatcgccgcttccacgataaagagtccgattttctcgccttcgtcaatctgtggaactacctcggcgagcagcagaaggcgctgtcgtcgaatcagttccgccgccagtgccgggtcgattttcttaactatctgcgtgtgcgcgagtggcaggacatctacacccagctgcgccaggtggtgaaagagctcggcctgccgatcaacagtgagccggcggaatatcgcgagatccatactgcgttgctgaccggtctgctgtcgcacatcggcatgaaggatgccgataaacaggagtataccggcgcccgtaatgcgcggttctctatcttccccggctccggtctattcaagaagccgccgaagtggacgatggtggccgagctggtcgagaccagccgcctgtgggggcgtattgccgcccgcattgagccggagtgggtggagccggtagcgcagcacctgatcaagcgctcatacagtgagccgcactgggagcggtcgcagggcgcggtaatggcgacggaaaaggttaccgtttacggcctgccgatcgtcgccgcgcgtaaggtcaactacagccagattgatccggcgctgtgtcgtgagctatttatccgccacgcgctggtagagggcgactggcagacgcggcacgccttcttccgcgataacctgaagctgcgcgcggaaatcgaagagctggagcataagtcgcgccgccgcgacatcctggtggatgacgagacgctgttcgagttctacgaccagcgcatcagccacgacgtcatctccgcccgccacttcgatagctggtggaagcgggccagccgtgaaacgccagacttgctcaattttgaaaagagcatgctgattaaagagggggcggagcaggtcagtaaactggactacccgaatttctggcatcagggcaacctcaagctgcggcttagctatcagtttgaacctggcgccgatgccgatggcgtaacggttcatattccgctgccgctgctcaaccaggtagaggaagccgggtttgaatggcagatccctggtctgcgtcgcgagctcattatcgcgctgataaaatcgctgccgaagccggtacggcgcaatttcgtcccggctcccaactatgcggaagcgtttcttggccgggcgacgccgcttgagctgccgctgctcgattcgctggagcgcgagctgcgtaagatgaccggcgtgaccatcgaccgcgaagcctggcagtgggatcaggtgcccgatcacctgaaaatcaccttccgggtggtggatgataaaaacaagaagctgcaggaagggcgctcgctgcaggcgttgaaagacgccctgaagggcaaagtgcaggagacgctgtcggcggtcgctgatgacggtattgagcagagcgggctgcatatctggagctttggcaccctggcggaaagttacgaacagaagcgcggtaactataaggtgaaagcctggccggcgctggtggacgagcgcgacagcgtggccatcaagctgtttgataatccacaggaacagcagcaggccatgtggcgcggtctgcgtcgcctgctgctgctcaacatcccgtcgccgattaagtatctgcacgagaaactaccgaataaagccaagcttgggctctactttaacccgtacggcaaagtgctggatctgattgacgattgcatctcctgcggcgttgataagcttatcgacgaggcgggcggtccggtgtggacggaagagggctttagtcagctgcacgataaagtgcgagccgagctcaacgacacggtggtggagatcgctaaacaggtcgagcagatcctcaccgcggtgttcaatatcaacaaacggctgaaaggccgggtggatatgaccatggcgctggggctgtcggatatcaaagcgcagatggcgggcctggtgtatcgcggctttgtcaccggcaacggtttccgccgtcttggcgatacgctgcgctatctgcaggcgattgaaaagcgtctggagaagatggctatcgatccgcaccgcgatcgggcgcagatgcttaaggtggagagcgtgcagcaggcgtggcagcagtggctgaataagctaccgccgaaccgccgtgaggacgacgatgtccgggagatccgctggatgatcgaggagctgcgggtcagcttcttcgcccagcagctgggcaccccgtatcctatctcggacaagcgagtgttgcaggcgatggagcaaattaccccatcgcctggctggttgtccccggtggcgctgcgcttaccggggctactggtcaggcgtccacgcttaagcgtttacccacgccagagtaaagccgtcccagcctttagtgcccacggtttgcagcgccgttgccgtcaaccgcggctcggcgcccatcatctcaatgaactgacgcacgccctgaacgcgctcgtcggcgctctgtgggttgaccacttcgccgtcgcgtaccacgttatcgccaataattagggttcctgggcgggaataacgtagcgcccagcgcagataatggggattattcggcttatcggcatcgatgaagatcaggtcgaaagcgggacatgcgccaagcgcctccagggactgtagcgcgggtccctcccgtagcgtgacccgctggtcaacgcccgccagctgcagattctcccgcgccacctgggcatgatgcgcgtcggcctccagggtgaggagttggccgtctgcaggaagctcgcgcgccatccagatggtgctatagccgccgagggtgccgatctccagtatccgcttagcctgggttagccgtaccagcagggcgagaaactgaccctgattggcggcgacatcgtgtgccgggagcccggcacgatggttgttttccagtacccgatcgagtacaggatcgccgggaattaaggccttaattaaataattgtctactgccgaccactgttgttgcatatgacgcttccccatttagctccctgatgagtcagaccagccgcctcccagcgcccggtacagatcgatctgcgccagcagcaggttgttcttcacctgcaccacgctaagctgggtggagaacagcgttcgctgggcatcaagcacatccagataagaagagtagccgttacggtagcggttttgtgcaatacgtaaggtttcctgggcaacggtctcttgttcctgaagctcggataactgttcgccatagcgactgatggcgtccaggctgtcattgacctctttgaacgcgctgcgcaccgttttctcatagctatagagcgcctggttgcgctgggccatggagaggtccacctgggcatttaacgcctggcggtttagcagcggcgccagaatactgccgccaagactccacagccgcagcgggttgtccagcagatccggcagcgtccggtcctgcaggctgccggtagcggtcaggttaatagagggcagcagctgcgcctgcgacgaggccagcgtggcgtcggcggccaccagctggcgctcggcctgagcgatgtccggacggcggttgagcaaggtggacggcagctgcgacggcagacgcagcggggtaagctgggcgaactcgccgcgttttaccgcgccagggttatcgccgagcagcacgctgagcgcattttcctgctgcgcaatctggtgctgtagcggcgggatctgcgcccgcgttgaccgcagctccgaatccgcctgcattagctcaaggcgtgaagtatacccggtttcaaactgacgtttggccaggcgccacgcgtcttcccttgatgttagcgtctgctgggtcacccgcagctgctcatccagcgacagcagcgtgacgtagccaacggccaccgagctggcgacgctcaaattggcggcggcggcggcggctttctgcgcctcaaggctggcgccggcggcgttggccgcgctgcggttcgctccccagatatcgacatcatagctggcggtcaggccacccttatacagtgtgctgtggatcggcaggccggtggcggcggactgcgtccgggcgcgggtgccggtgaggctggcgtccagtgacggaaacaggctgctgtcggcggcgtaagcgcgcgcctgatactcattcacccgctcgcgggcgatcagcacatcgctgttatagcgcagcgcctggtcgacatactgattgagggtactgtcatgaaaattgcgccaccatacaccctccaccgggctggccgggccaacgtcggcccgccaggcggcaggaatggtcagggtcggctgcgcgcgttgcacatcggcggattgacagccgaccagcgccagaacgatagcaagggcgaccgggcggatcatggttgtttctccgcacgggtatcaatagtcacctgcaccgacatccccggccgcaggcgttcgctgttgttttgcccgtcgttgaccgtaatacgcaccgggatgcgctgggcgatcttgacgaaattgccggtggcgttgtccggagagatggcgctgaactccaccccggtcgccggggagatactctgcaccttgccgtggaaggtctcgccgttgagcgcgtctacggtgaaggtgaccggctggccaacgcgtacttcggccaactgggtctctttgaggttggcaatcacccagtgctgcggcggaaccagcgaggtcagatgggttccggcgctgacataggcgccaagacgcaccgagatctgccccagctggccgccggtgggggcgataatctgggtattctgcaggtcgatctgcgccagctcaagcgccgctttggcgctggccacgtcggcctccagcgaatcgcgattgacgatggtcgattcacggtcctggcgcgacatctccagcgccgctttcgcctgctcaatatccgccgccccttgcgccgcgctggcccgcgccgaatcacgttcgcggatcgacagcgaaccgtcggcggttaactgctggatgcgttttaaatcggcctggattttcagattctgcgcgcgggcgttttgcagcgcggcttcattcttggcgatcgtcgcctcggcgcttttgcgctgttgcaggttattgcgcagcgcggcctctttcatcgccagggtagcctgggcctgatgcacccgctgtttatagatgcgatcgtctatctggaacagcacctcgcccggctggacaatcgcgaaatctttgacgttgacggcggtgatatagccgttgacctgcgggctaataaaggtggtctgcccgcgcacataggcgttgtcggtaaactggctatggcgagtgaacggcggcagttgccaggcgtagaggatcaccagcacgccgacgaggcctatcgccgcggcggtaaaaatggaaaccacgcgaatattattccgggtgttggcctgttgtttggccgcatcctgctgactcataacgactccagagatgaaatgatgataattatttgctgccggtagcgcgttgcaacgcgatacgggcagtcagtcgtaagcgaattaagcgccagaaaacccacactagtgtcccggcggagatcgccgccgtcagcagataggtatcattccaggcgagaatattggcctgcagcgtcgcggcgttttgcagcagggtggtggcctgaacgttgagtagcgtactgtcgccaatctggctctgatacatctggctgtactgctgcagccgctcgacgatcagcgggttcagggtggttatctggtccgccagctggctggagtggaatttctcacgccaggtctggaaggtgccgaggatcgccgagccgagcagcccgccaatgttctggctcatgccgaacagcaccgagaagctgaccaggttgcgcgggtcggcaaacacgccgccaatcccggcgagcatcgccggggccagaaagaaggcgctgccgaagccgagtaaaaactggctgaacattaattgttccggacgggtgagggcgttggactggctgtcgagcagcgaggctatcatgatcagcgccagcgcggtggcggtcggccagtagagcttctgcgggttgagcgtcagacagctggcaatgatcccgcacagaataccggcgaaaatcgaccacgcgaggttagtcatctgttcgttttgcaggccaacgtactgcagccagccgatgaccccggtgttctgctccgccaacacgatgcggatcaacagcataatcaggcccagacgcacgatgctgccgctggagagccatttggtattgagcagggggttgctgcggttatgctcgaaggtaatcgcagcgacgatcagtattaccgccgccgccagcgcccagccgatccacggcgcttcaaaccaccactcgagccgccccagcgacagcacggcgcacaccagcgccatgccgggcgccagcagaaagaaggtaatgaaatcttttttttcgaacacttttttacgatcgcttggcggcagttttagcgcgatgacgcaggccagcgacaccagcgccaggcccagctcaaagaagtagagaccgcgccattcatcggtctgcagcagttcggtggaaaagaggcgcgccaggggaatggccagcgacgagccggtgatgccgatagtcagccctttcaggcgatggcgcgcaggccaggcctgtacctggtagtagatccccagcgagctgagcgccgcggccaccatgccatgggcggcgcgaaccatcatcgctgagctgagatcgttgacgaagaggtggaaaaaggtgaccagcacatagagcaccagaaagccttcggtgaaagcgcgcaggccaaactgctggcggaatttcaccagcagcaggttgatggagacgttggtcatcacgtataccgccggcagccaggcgatttctgtcgaccaggcggcgaaggtaccctgcagcagctgcaggttggcggtgaccactgcgttgcccagcgcgccggtgagacataccagcagaccgaccacgccgtaggcgaggcgtttcgccggactgtgcagcggcgtcgacggcgaaccgagcagagccggtttttcatgcggcgcccagtcatgcggggcgtaggggttatcctggcgacggggcattatttcttctccacttcgcgcaatagcttttccagcacccgctgggtttgctcctgctcctgtggggtaatcgccgtcaggatctcttcgcgcagatcgtcagccaccgttttgacctgttcatagagggccttccctttgtcggtgaccaccagcagtcgcttacgtttgtcgctggcggtggtgacgcgctcaaccagtccgagggcgaccagacgatggatcaacggcacaatggtcgggctctccacccccagctcctgcgccagttcgctttgcgacagcggctgctggtggcgggcgatggacgctaccgccacccagctggcctggctgagaccgagatttttcagccgacgattgaccgccagccgccagtggtgcgcggtgaggtataaaagatgagagaaggtaagctgtcgattgtccataggtcgtctgtcaatatcgttagagctctaacgattttatgccggataaccgccggagttcaagatgaaagatagaaattggttaacggtatgtacgttaattgtagttaatcttccggccgcgatccgtgtcgtgcggtctgctgaccaaggatatttttattctgcgccatcacccaggcgataaaggcccgcaggggggcgggaatatgtttccggcttgggtagtagacgcagaaatggtcggcaggatagcggtagtcgggtaacaaatggaccaggctgcccgcgctcagctgctgcgtcaccagcgactgatagacaaaggcgatgcctaatccgctctccgcggcctggatcattgcgctatcggcatcgacgaccagatcgcctttaaccgcgacctcgctaagctcgccgctggggccaataaactcccagcggtacttctccccaccaggaaaacagcggttaatgcagcggaaattaactaaagactgcggggtgtcgggctctccggcttcgcgtatatagtccgggctggccaccgggatcagcgatagtttctcgccaaaggggatggcaatcatctctttgggcacatcctgcgaatagcgaatgccggcgtcaaaaccggactcgataatattgactttccgatcggtggcatacagttcgagcgtcacattgggacaggcgtttttaaaggcgataaaatagtcttgaaaaaacaggtcaataacaatgcgcggtaaattaactttcaccacgccttccggagtcagacggtgataattcagactgtccaccacccggcgataatcattgaccaccggcgttatattattaagaaattcctcacccactgcggttaatgacaaactgcgcgttgagcgatttagcaggcgcacgcctaacttttcttccagatgattaatagcgacagtaagggccggtggggaaaggtttaacgctttagcggcctgacgaaaactgccatgtttcactatgagtattaatatttctatttgttgcagatcgggcaaggttttcattgttaatttccagctaacaccgcgttcggaatagattaattgttatcaatatgaaagggaagtatatatttaatgccattcagcaattaaggaaaataagatgaaaacacgttatcttggaaaagagaagtttcaggtttccgcattaggtctcggatgtatggggatgagttttgcctatggcggcgctgaaacgtcgcaggcgataaatacgatccataccgccatggacattggcgtgaccttcctggataccgccgaagtatatggtcctttcgataatgaagttctggtcggaaaagcgattaaaggttttcgcgataaggtgcagattgccaccaaatttggatttcgtattttgccgaccggccagggtctggagcggatggccggcgttgacagccgtccggcacatattcgcgaatcagtggaagggtcgctgaagcgactgaatgtcgagaccatcgatctgctctatcagcaccgcgtcgatcccgcggtaccggtggaagaggtggtgggcactatggccgatctggttaaagagggtaaaattcgccatatcggtctgtcggaagtatctgctcagacgctgcgccgggcctgcaaggtacatccgatcgctgccgtgcagacggaatattcgctatggagccgcgagccggaggccggtattctccacacctgccgcgagctgggggtcggctttgtgccatacagcccgcttggccgcggcttcctgacggggacaattaccgatcccggcgttttgtcagcggatgatttccgccgccatctgccgcgcttccaggccgaaaccatgcgcaaaaaccagctgctgcttgagcgcctgcagcaggtggccacccgctatgacgcgacccttgcgcagattgcccttgcctgggtgatgagcaaaggcgaggatatcgtgcctatcccgggggcgaggaaaattgctcacctgcgcgacaatgccggcgccgcgaatattactctcgcgccggaggacatcctcaccatcgaacatattttcactgccgacaacgtcactggcttacgctatacccagggcgattttgatttaatcgaaaaataatcccctacgggcagcggatggttattacttgcgtgacgttgtcacctttgccgaacaactccttgtcagatagcgcacatcctcggcggttaacggcgcggcaaagaaaaaaggggcggcgcaaggccacccctgatgcggttgctgatggggatcagcccgggtagatgccgcggtctttacgcgccatcaggatgcgctcgcaggccacgatataggcggcggtgcgcagcgtacactctttctcggcggctttatcccagacgtgcacgatagcgtcggtcataatgcggtccatcttggcgttgatctcctcttcgctccagaagaagctggccatgtcctgtacccactcaaagtagctgacggtcaccccgccggcgttgcagataacgtccggcaccacgatcacgccgcgctcggccagcacgtcgtccgcttccggataggttgggccgttggccccttccagcaccagtttgcaggtcagcttctcagcgcgctcgcgggtgatttgcccttccagcgccgccgggatcaggatgtccatcggagtggtccagaaggcgtctttatcgatctcctgggcgccggggaaaccggcaatctgctttttctccgcctgccaggcggtgagggcggccatatcgattccgccttcgttatacagggtcgcggtatgatcctgaataaccacgatacgagcgccgacgccggcgaacaggcgggccgcttcgctaccgacgttaccaaagccctgcagcgccactttggcgccttcaatttcgataccggcgcgacgggcaacttcccggccggtgacaaacacgccgcgtccggtggctttttcacgaccgagggagccgccgaggtggatcggtttgccggtgaccacgccggtgatggtggtgccatggttcatggagtaggtgtccatcatccatgccatcactttgccattggtgccgacgtccggcgccgggatatctttctgcggcccgataataatgccgatttcgctggtgtagcggcgggtcagacgctccagttcaccttccgacaaggagaaggggtcgacgcggatgccgcctttggccccgccgtaaggaatattgaccgcggcgcacttaatggtcatccaggcagaaagtgccatgacttcgttaagatcgacatccggatggtagcgaacaccacctttacccggtccgcgcgacagattgtgctgaacgcgatagccctcgaagtggcggatggtgccgtcgtccatttgcacaggaatgtcgacgatcagcgcgcgcttcggatggcgcagggtttccacccagtaggcaagatcgccgagataaggcgcgacgcggtcgatctggcgcaggtaggtggtccatggagatgtactactttcagatgcgtaagataacttttccataagagtcctgtttctcagtgttatttatgtcgtgtaaaaccgtggaatagctacagcagtaaactctgtgcaatgaatggtatcaccaattttataaagcggtatttgacggcaattccgatttttaaatttttgttagattttttattttttaagtgaataactacgcacgtcaaccacccgcaagctgtgcattttaattcactttttattcacttaagtgcataagaaaatattttttctatgtttttcattatcttgatgatcttcaaaaagtgaataaattgcttttgtccgtattgacaatcttgttgttcacaggccagcattagcccacacaacaacatggcattaaccatgaattaacaattacccgtaaaaagaatagggctttatttttctgtggtgaatatttttaccatcgcagcgggtgtgctcgtgcccaaaataagccgaggggcagggttaatgtcgattgtccaacgcgacgggagcgttttccgtcgtcttacgttccggagataaattatgtcaggcagtatgactcgcgaagattttgacgcttacctggttccctgttttgcccccgcgccgtttattccggtcagagcggcgggctcccgcgtctgggaccagcaggggaaagagtatatcgatatggcgggcggcatcgcagtgaacgccctgggccatgctcacccggcgctggctcaggccctgcaggatcaactggcgaaactgtggcatatcggcaatggctataccaacgagccggtgctgcagctggcaaaaaccctcgtgcagtcgacctttgccgacaaggtgtttttctgcaactccggcgccgaagccaacgaggcggcccttaagctggcgcggaaatatgcccacgataaatttggcggtgaaaaaagcgaaatcatcgccttcaaccacgccttccatggccgcacgctgttcaccgtctccgttggcggccagccgaaatattccagcgattatgctccgctgccgcagggcattacccatctgccctataacgatatcgaggcggtcaccgcggcgatctcctcgcgcacctgcgcggtgatcgtcgagccgattatcggcgaaggcggggtgatcccggcggacccggcgttcctgcaggcgctgcgtaccctctgcgatcgccatcatgccactctgatattcgatgaggtgcagaccggcgccgggcgtaccggccatctctacgcctaccagcattacaacgtcgtcccggacattctcaccagcgccaaagggctggggggcggcttcccgatcggcgcgatgctggcgaaagaggcctgggcgcaggtcttccagccaggcactcatggcaccaccttcggcggcaacccgctggcggcaaccgtcgctaacgccgtgctggcccatctcgatgcgccgctgctggcgggcgttggcgagcgccatgcgctgatcgttgaccagttgaatgcgatctctgcccgttacgatgcgttcagcgccgtgcgcggcaccggtctgctgatcggcgctgagctggcggggccgctgcgcggcaaggccaaaacgttgaccaacctggcggcggaagaggggctgatcgccctgattgccggccccgacgtgctgcgcttcgcgccggcgctcaatatcccgctggcggatattgcggaagccttcgtgcgccttgatcgcgccgttgcccgcttaacccgctaaccgggaggacggcctgtgatgctatttcgtcccgtacgggaaaacgatctcgacgacatcgtccgcctcgccgcgcgggcgggggttggcatgacctctttaccgcatgacgtcgggcgcctggcggccaggattcggcgcagtatcgagaccttcgccggcgaactgccgcgcagtcagcagggtttcctgtttgtgctggaggacaccgcgctggcgcgggtggtgggggtgagcgccattgaggtcgcagtgggcctggatgagccgttttacaattttcgcattcagaaaacggtgcgcgcctcgaaagcgctgggagtctataagccccaggagctgcttaatctcagctatgaccacaccgggcatagtgagctgtgtacgctgtttctcgacccggcgtatcagcgcaaccgcaatggtctgctgctctccaaggcgcgctttttatttatcgccgcctttcgcgagtggttctccccgcacctgtttgccgaactgcgcggctgcagcgatgagcagggacagtcgccgttctgggatgcgctgggccatcatttcttcgacatcccgttcgccgatgccgaccggctgaccggcaccggcatgaaaacctttattgccgaactgatgccggcgtacccgatctatatctcactgctgccggaagcggcccgcggggtcatcggtcaggtgcatcccaataccgccccggcgcgggcgatcctcgagaaagagggtttcagctggcgcggctcggtggatattttcgatgccggtccggtgctggaggcggacaccgatcagatccgcgccgtgcgcgacagccagcgcctgcctgtccggcagctgatgggcgacctgccggcgccgaccctcgtcgccaacggtcaattcgacaactttcgggcgctgctggtggcccacgaagagcaggtctcgcttgacagcgccgcgctggacgcgctgcaggtcagtgaaaccgaccgcgtttatacggtaaccctgaatccagaggacaacagatcatggcggtaaaagcacagtttatagccgggcagtggctgccaggcagcggcgcaacgatgagcaaactggccccggaggatcagtcgctgctgtggcaggcggccagcgcgggggctgacgacgtccaggcggcctgcgccgcggcgcgcgcggcgttttatccctggtcgcaccggccgctggccgagcgtattgacgtcgtacagcgttttgccgcgctgctggagacgcataaagaggcgctggcgaccctgatttcccgcgagaccagcaagccgctgtgggagacccgcaccgaagtgcaggcgatgatcggcaaggccgcgatctccatcgaagcctatcaccagcggacgggctttcatgagtcgacgctgccggacggtaaagcgctgctgcgccacaaaccgcacggcgtgatggcggtctttggcccctacaacttcccgggccacctgcccaacggacatatcattccggcgctgatcgccgggaacaccattgtgtttaaacccagcgagctgacgccggctaccgctgaaatgaccgtccagctgtggcagcaggcgggcatccccgacggggcgatcaacctgctgcagggcggaaaagccaccggccaggcgctgctggaaaatcgtgatatcgacggcgtgctgttcaccggcagcgcggcggccggtttccacttccatcgctacttcggcggccagccggagaagatgctggccctcgagatgggcggcaacaacgcactgatcgtcgccgacgtggccgatatcgatgcggcgctgcatgtgattatccagtcggcgtttatctctgccgggcagcgctgcacctgcgcgcgccggctgatcgtgccgcgcggcgagcagggggatgcgctgctgcagcggctggtagaggccagcgcgcagatccgcgccggcaagtgggatgatcagccggcgccgtttatgggcggggtgatctctctcgacgctgcgcagaacatgctggcggcgcagcaaaaactggaggggctcggcggcaaggtgctgctgcgcatgcgccagcctgacccgcgctccacggtgctgaccccggggatcgtcgacgtcaccggtattgaggtgccggatgaagagtactttggcccgctgctgacgattatccgttacgacggcttcccggaggcgattcgcctcgccaatcagacccgctatggcctggccgtcgggctgatctccagcgatgcggcgcagtttgatcagctggcggacgaggcgcgagccgggatcgtcaactggaacaagccgctgaccggcgcatcgagtaaagcgccgtttggcggggtgggcgcctccggcaaccatcgcgcggcagcgtggtacgccgccgattactgtgcctggccgatggcctctctggtcagcgatacgctgacgcttccggcgacggtatcgccgggcctgccattctgataacggatcctgtgaggacatatgtctggttttgaagcaaactttgatggcctggtcggcccgacgcaccactacgccggactctccgtcggcaatgaagcctcgcaaaataaccgcgatggtctctctaaccctaaaaaggcggcgctgcaggggctgtataaaatgaaagccctggccgaccgcggcttcgtgcagggcattctgccgccgcagccgcggccgaatctgcgtctgctgcgcgaagtgggtttccagggcagcgatgagcaggttatccggcaggcggcccacgcggcgccgcagctgctctccgccttcagctccgcctcgtcgatgtggaccgccaacgcggcgaccgtctcaccgtcggcggacagcgccgatggcaaagtccatttcaccgtcgccaacctgaacaataagctgcaccgtatgcaggaggcacccaccacctcggcgatccttggcgccacgttcgccgatccgcgctactttgcccaccatgcggcgctgccgcagcatggcgacctcggcgatgaaggggcggccaaccataaccgcttctgccgggaatatgaccggcagggggtgcagtttttcgtctatggtcgacgcgccagcggcggtatcgccccggtgaagtatccggcgcggcagaccctcgaggccagcgaagcggtggcccgcctgcatcagctggatccgcgctacacggtgtttgcccagcaggcgccgcaggctatcgatcgcggcgtgtttcataacgacgtcatcgcggtcagcaatcgccatgtgctgttccaccatcagcaggcgtttgtcgatcaggcggcggtgctgaccacgctgcgggctaaaagcgacagtctggatatcccgttcaccagcgtggaagtgccggacgagcgggtttcgctcgacgacgccgtggcctcttacctgttcaacagccagctgctgagcaaaccagacggcaagatgctgatcgtggtgccggaggagtgccgccagcgggaaaacgtctggcgctatctcagcgatctcgccgccgatagcgcatcgccgatcgatgaagtggcggtctttgacctgcgggaaagcatgcgcaacggcggcggcccggcctgtctgcggctgcgggtggtgctcaacgaggcggagcgccaggcggtcaacgcccatagcctgatgaacgacgaacgttatcagcagctgacggcatgggtggaaaaacactatcgcgaccggctgcatgcccgcgatctggcggacccgcagctgctgcgcgaggtttatcaggcgctggatgagctgacgcagatcctgcgcctgggcgcggtctatgattttcagcgttaaggagcggcagatggagcacctggttaacgatttactgcactgccgcctgcaggcgtggacctttccggcgggcatcgaggcccgctggctgggcgagggcattttacagctgctgccgacggcgccgtggcgccaggcgacgatcctctccgccggcgtgcatggcaatgagaccgcgccgatagaactgctgctgcagctaacccacgatctgagccaggggcggcagccgctcacgcaggcgctgctgatcgtctttggtaatctgccggcgatccgcgccgcgcgccgctatctgcataacgacctgaatcgcctgttcggcggccgccatctggcggtcaccccgggaaatgagtcgcggcgggcttttgcgctggagcaggcggtgcaggctttttatcgcgccgccgatgcggcggggccggtcaaccgtggtcatctcgatatgcacaccgccattcgcggatcgctgtatcgccagtttgcgctgctcccggcccacgccggggatttttcgcccgatttctatcagctgctgcaggccagcgggatggacgccgtcgtgcgccataccgaagcgggcggcaccttcacccatttcacctgcgaaaagttcgccgcgcaaagcgccaccctggagctggggaaagtgatgccgttcggcgccaacgatctcagcctgttcgccgccgccgacgcggcgatccgggcctggatcgctgatgcgccgctgccgccgcgcgacaaagcgccggtggactacttcctggtcgaggagagcatcatcaagcgcgagggggaatttacgcttaatctcgcggcagacgttgaaaacttcaccgcgctcccggcagggtatgagatcgcccgccaggcagagaaacgttgggtggtgcaggcccgggccccttatatcctctttcccaacgccggggtcgccaccggccagcgcgccgggctgttgctccgcgccgctgcccttcgtctcccgcaaccagcctgaggaaacaccatgactgaacatcaacatcaggcgtcacctgccgccggaggtgaaggcgcgtcacagcttaagcgcgggctcagcgcccgccatatccagatgattgccctcggcggcgccatcggcaccgggctgtttatgggggcggggcgcaacatcgccgtcgccggcacctcgatcctggttatctatgtgctggtcgggttctttacctatatggtgatgcgggcgatgggcgagctgctgctcacccgccatgactaccgctcgtttgccgactttgtcggcgagtatctcgggccgcaggccagcttttacctcggctggacctactggctaagctgggtggtgacctgtatcgccgacgtggtggtctgcgggagctatatgcagtactggttcccggaactgtcggcgtggatgccggccctcagcatgctggcgattctgttcctgcttaacctgctgtcggtgaaaatgttcggcgaggcggagttctggttcgccctgatcaaggtgatcaccattatcgccctgatcggcaccggcggctggatgattgccaccggctggacctccccggacggcgtgacggcctccctcagccatctcaccgacccgacggcctttatgccccacggcatcaccggctttttcgccggtttccagatagcgatcttctcctttaccggcattgagctgctgggcaccatgacggcggagacccgcgatccgcagcgcattttgcccaaggcgatcaatgctctgccgctgcggattatcatcttctatctgctgtcgatggtggtgatcatcgctgtcgcctcgtggccgggggtgtcggcggagaccagccccttcgtgacgctgttcgccaaggccgggctgcctgccgccgcggcggtgcttaactttgtggcgctgacctcggcgatgtcctcggccaacagcggggtcttctccagcacccgcatgctgtacggcctgtcggtggagaagcatgcgcactggcagtttcgtatcctgtcgcgcagtacccgcattccggtgcgcagcctgctgttctcctgcttctgcatgctgatcggcacgctgttgctgtttctggtgccgaacgtgatgaccctgttcaccatcgtctcgaccctggcggcgattatggtggtgttcagctgggggatgatcctcgtggcctatctggtttaccgccgtcagcgtccggacctgcacgccgggtcgatctttaagatgcccgccggggtggtgatgagctgggtgagcctgctgttcttcgcgttcgctatcttcatcatgatctttgacccggacacgctgctggcgctgttggcttctccgctgtggtttatcgcgctgtggggcttctggaagctgaagcagcggcgcgaggggcagcttcagctggacaaccagagcgcctgacacccgccggccctggcggctggctaagcaggggggaagacttgacgcctgtttgtgcccggtggcggctggcgccttaccgggcctactgtcttaccgggccagggataagcggtatcccccgcggcgcgatctccccccaggcccgcgcaagcgcagcgccaccgggcgggatagtcggcgccgtagtagccctggcgggcggcggtcaggcgctttccgcccgggagggggccgtgcccagcgcggacttcatccggctggcgcagaatatcgccaggagcgaaatcgccaccgtaacgcccagataaatggccaccggccgccagtcaccgtcatattttgccagcagaccggtggcgataagcggcgcggtgcccccggccagcgcggcgcccagctggtagccgagggtgatcccggtatagcgcacattggcgctgaaaatctcagagcacagggtgccgagcaccgcggttaccggcgcccacaggatgccgaaggcaacgatcgtcgccagcatgatgccccagccggtgccggtgtcgagcagcaggaaccacgggacgataaacagccccagcagcaccacgctcagggtgtacatcttttgccgacccaccttgtctgacagcagccccatcagcgggatcatcacggtggccaccagcgcgcccagggtcacggattccagcgcctgcgacttctgatagctcagggtggtggtggcgtagctgactacaaaggtggagaagatatagaagggggcggtctccaccactttcaggccggcggcgatcagcacttcccgccagtggtgcttgagcgtatcgcgcagcggggccttcgccacctggccggattttttcacctgcttaaaggcgggcgtttcgtcgatatctttgcggatccacaggccgagaaaaacgaggacggagctgagcaggaacggtatgcgccagccccaggcgagaaactgcgcctcatcgaacagcgtcatcagcgagacgataaatgttgccatcaacatgccgatggtcaccccggcctggggaatgctgccgaaaaagcctttccgcttttccggcgcgtattcataggccagcagcagcgcgccgccccattcgccgccgatacccatgccctgaataatgcgcagagtaatcagcagggccggcgcccagaggcccaccatctcgtaggtgggcagcaggccgatcgccaccgtggcgctccccatcagcgacagggtcagcaccagcgtcttcttgcggccgatgcgatcgccgatatgggcgaaaatcacgccgccgatggggcggataaaaaacgtcagcgagaaggagagccaggagaggatcaggccgataaccgggtcgaccatcggaaagaagattttgttgaacaccagcgcggcggcggtgccatagagaaaataatcgaaccattcgatggcgctgcctgtcaggctcgcgatcagtaccttcttgtttttctgcagaatggatgcagtgttgtcttgtggattgctcattacgaaacgttctcccgccacggtagataggtcaggtgtcactctgtacgagcagggtgcaacctgatgtgaaaaggttgtgtaattgttaagcaacttagggttgaaggttacaattggcaagtttatggctggcaaactgggcattatggcgcgcttagaactggtataaccgcgacgctattttttattttccacctgattttgctgttttttgttattttcatagtgagttgttcaggtgcaacccgcctgtttttagatgtttcttgttatttcaaaatggttacaaatcgacgccgctatgcctcccggcaggcggcgtttatgatagcgaaagcatcctctccgctcgtctgagagaggattaaggagacagaatggcagaacaatttcctccgctgtcggcagcgacgctggcggcggctaaccaggtcggcgcctggctggcgcaggacgatctggcgacgctgcccgcgttgccgcaggtggacgtggtagtgctggccggcaacgccgtgatcccaaccatcgacgccgcctgccgtctggcggcggcgcaggcggtcccgctgctgatcagcggcggcgtgggacattctacgggctatctttacgaggcggtgcgccaggatccccgttaccgtacgttgccggtggatggccgcccggaagcgcatgttctggccgacattgctcatgactactggcacatcccccattcgcggctggtggtggaggaccagtcaaccaactgcggtgagaacgcccgttttacccggaccacgctggagagccgggggctcgcccatcgtcgcgggatcgtcattcaggacccgactatgcagcggcgaaccatggctaccttcgcccgcgtctggcagggggcgacgccgccgccgcagtggttgagctttcccggctgctcgccggtgctggagcagaccgatggccaactggggttcgcgggcggcggagcggggctctggccggtcacccgctacctggggctgctgctgggcgagctgccgcgcctgcaggatacccctgaaggatacggtccgcggggaaaagacttcatcagccatgtcaccttcccgccggagatcctcgacgcctggcgacagctgcgggaggacgcccagcttgccggggcgctgcaggcccgcaccctcggctgaaaaatgcccgtttacggcagattcgtcgcaaacgggcaatttgtgttattaaaatgtaacctcaagcgggaatttttggcccgtttttatgaatcagctcacagaactgcgtcaatgtgctgccgaacagcggcttatccgcccgatatttaacaaaaaaatcacctgttaaatacaaatgcaccacaggagcagccatgacagcacccgttcaacacccgatgtatattgatggccagttcgtttccggtcgcggcgacggctggatcgacgtgcttaacccggcgaccgaagcgctgctgtcgcggatcccggacgggactgccgaagaggcgcggctggcgattgacgccgccgagcgcgcccagcccggctgggaagcgctgccggccattgagcgtgcgggctggctgtgcaaaattgccgccggtatccgccagcgtgccgacgagatcgccgggctgattgtcgctgaaggcggcaagatccagcagctggcggcggtggaggttgcgttcaccgcggactatctcgactatatggcagaatgggcgcgccgttacgaaggtgagatcgtgcagagcgatcgcccgggggagaatatccttgtctttaaacgcgcgctgggggtgaccaccgggatcctgccgttgaacttcccgttctttcttatcgcccgcaagctggcgccggccctgatcactggaaataccattgtcattaagcccagcgaatttacgcccaataatgccatcgcctttgccgagattgtccatcaggttgggttgccgaaaggggtctttaaccttgtgcttggccgcggagaaaccgttggccaggagctggccggcaatccgaaggtggcgatggtcagcatgaccggcagcgtggcggcgggagaaaaaattatggccgctgcggcgaaaaatatcaccaaagtgtgcctcgagctcggcggcaaagcgcctgccattgtaatggacgatgcggatctggagctggcggtgaaagcggtagtggactcgcgggtgattaacaccgggcaggtgtgtaactgcgtcgagcgggtctatgttcagcagggaatatacgaccgcttcgtcaaccgactcggtgaggcgatgaaggccgtccagtttggcgacccggcgacgcgagatgacatcgcgatggggccgctgatcaacgcggcggcgcgggaccaggtggcgggcaaagtggcgaaggcggtggcgcagggggcgcgggtggcgctgggcggtcagccgctggagggcaaaggctatttttatccgccgaccctgctgctggatgtacgtcaggagatggacattatccatgaggaaaccttcggtccggtgctgccggtggtggccttttcgaccctcgatgaggcgctggcgatggccaatgacagcgattatggcctgacctcctcaatctatacccgcgatctgaacgtggcgatgaaagcgattaagggactgaagtttggcgaaacctatatcaaccgtgagaactttgaggcgatgcaggggttccacgccggctggcgtaagtcggggatcggcggcgcagatggccgccacggcctgaatgagtacctgcagacccaggtggtctatctgcaggcctgaggcacgccacacagaaccggcggacagcgcaggctgtccgccgttcacttagcgggcaaatttctccagcacgcggatcagttgggtgacaaagccgtattcgttatcgtaccaggcgacggttttcaccagctgtacgccgccggcctccacaatctccagctgggtagcatcgtagatcgaaccgaaatggctgccgatgatatcggaagagccgatctcctcttcggtgtaaccaaaggattcattgccctcagccgcctgcctcatcgcctgattgacctcatccgcagtcacctttttctccagcaccgataccagctccgtcactgagccggttttggtcggtacgcgctgggcatggcctttcagcttaccgctcagggcagggatcaccaggccaatggcttttgccgcgccggtagtgtgcgggataacgttttccgccgccgccctggaggcgcgcagatcttttccgcgcggcccgtccaccagcgactgggtgccggtataggcgtggatggtggtcatggtgcctacggtgatgccgaaggcatcctgcagaactttggccatcggcgccaggcagttggtggtgcaggaggccacggagatgatggtgtcatccggggtcagggtgtcatcgttgacgttgtagacgatggttttcatctcgccggcgggggcggaaatcagcactttgcgcgcgccggcctggagatgggcttgcgatttctcagccgaggtgtagaacccggtacactccacaatcacctcggcgcctgccgcctgccatggaatatgctgcgcctctttttcggcatacaccgtaatggttttgccgttgacgatcagcgcatcttcggtaaagtcgacgctccacgggaaggggccgtagtttgaatcatgcttcaacaggtaggccagcacctttggcgaagtgaggtcgttgatagccaccacttccaggctgctgtcgacttctaataaacgacgtaacaccagacgtccgatacgaccaaatccattaatcccaagtttactcatggatattctccggttggtaaaacgactcgatgtgatgaaactcctccaggcttagccctgtccccctgattggtcaactgacaatctgtgcgctttgccagggcctgcgggccggagaggggaaaagtgaatgttttcccggtcttttttgcccgtgacggcagggaatgatttttgttaccagagatgagggggctgcctgctggcgaaacgacgaaaagcgtctatgcttaactattgaatagcttagtaaaaaattgacgttagacgaagggagaggttatgggattctggagaatcgttttcactatcattctgccgccgctgggtgtgctgctgggaaaaggcttcggctgggcgtttattctcaatatcattttgaccctgctgggctatattcctggcctgatccacgccttttgggtgcagacccgcgattaaaggctgaccctcgccgcctccccctgagaccggctcaggggggcatcaggcactctttatataacagcgtattatccttcgaccagtagtgccgggtctcctcttccagatcgacgatccacttaaacaccccggcgctggcgagatcccggcagtactgttcaaagttaatggcccgggcaaagtggcggataacggcggccctggtcagacaatggctggcctcagcgcgaacgcgcagcagcccgcgggcgctttttaccgagaccacctcgtcgtttgccattacgaaattcatattgccggtggagacaaaatagatgtagtaggagacctgatgccgacgcagttcattggcgaaggtggcatagtcggcgtcagaacgcgcttgctcaaaaaaatgacccagcctgaccagcagttccatttcgatccttatcgtgtcgctgtgtgcggctttggccgatagcggcagaaaccattcactaaataacttattcgcattttaataatataggcgcgttatattaatggttattgcgtaactggaacacggtttcaagtgttacaatctattgcaatcgtttggctacctggtcagcgatgcgtaagcgaacggcgaggcgggaacgaggagacaagcgccggcggggaaggccgccggcgggaaaacggcgctacttctgaatcaaatagcgaatggttgggccatcctgttgaatatccagcaccgtgtagccgtggttccttgcatcaagcggaatgttattgatcgactgcggacagtcgctgaccacttcgaggatctcgcctttttgcagggaaggcattgcctccagggtagcgaccgccggatacgggcagggttcgccgaccatatccaggcgataatcagggatgatgtttttcatgcgctctccttcacggtccggaccgccgcctggcggcggaaaaaatgtctctcccaggcgatcaccagcagcagggcgatcagcagcagtagataggtggccagtagtccgccaaagggaccgaaggcgttcagcaggttgactttctgccagtgggtggcgagcggggcggcgatatcgtcccagcaccaggcgagcagcgttgagccgatgacgttgcccagcccaacccaccagtagtgaacctggccctccaccgcccggtacatccagccggtctcacagccgccggccagcacgatgccaaagccaaatagtagcccgccaatcgccgcattaggaccggcccacataattttcggcgccatccccaattgcacatagctgaagataccgatggcgctcgccgccatgccgaagataatcgccttcgccatcaccgtccggccggtgatccacatatcgcgaaaggcggaggtaaagcagatctgcgcgcgctcaataagcaggccaaaggcaatgccaaacagcatcgccaggccgagcgccgggtggtctgcggcggtgagcaggccccagccgatcatggcgaaaaagaccaccatcccctggcggaaacggcggcgcgcctgctgcggtttttgggttaagggcgaggcggcggacactttttgcatttttaccgggatgcgaaaaaggggcagcagcgtgaagcgggcgccaaaccaggagccgatggcggtggcgatggcaaacagccaggcgtgcagggagaactgcggaatgccggtgaagaaggccgccaggttgcagcccatcgccagccgtgcgccgaacccggcgatgatgccgcccgccacggcctgcgcaatgcggatccggctgcgtggcaggcgcagtttgacgttattcgcccacagcgcggcggccaggcagccgccgaacatgccgatgatcatcctgccatcgatgcgggtcagcggcgacccttcgagatgtatcagctggtaatagccccactgttcgctgtggacgcccagcagctgcagcagctgaccaccccagcgggtgaattcgccggtcaccgcccagaaggtgccggtgatgccaaaatagtaggtagagagaatgcccgcggcaatgaccgccgggacaggagaccagaaccggataagccaggcctgtttgaaggattgccatgtcataaaaatgcctctgaactcagaaggtattaacggtcgatgaccgaccaaagggggcaaatagtacccgccttagcgcctgctttctctgttttggatcaaggccctacgcttgcgtcagcacggcaaccagcgccagcagcgcgggcagcgcctgaatatagagaattttgcggctggcggtcagcgcgccgaaaatcccggcggccagcacgcaggccaggaaaaagataaccacctgtacccccggcgcccccagccacagcccccatgccaggccggcggccagaaagccgttatacaagccctggttggccgccagcacccgggtctgccgggcgaaatcggcgctgaggttaaaggcccggcgcccggcgggggcttcccagagaaacatctccagcaccaggatggcgagatgaataatagcgaccagcgcaacgaggagagtggctaacacagcggtccttaacgattagagaaatgtttctccagtataaccgcaggcgctcaccaggcgagagggcgactgctatagtgcagatagcgtcatattttcccgccgcgaagagcgtcggtttatctgattgccctttggtttagctaagcggtgctagcatgccgggttctttttacgggtatggcataggttactgaatggtaaataaattatggattttgttatcagcgctactaatggttgccatgccgtcggcgcaggccggggaattaaacctctattcgatgaataccggttcctatgtctatcatatgacgggtaaccacggacaatataacgaacatttcaataacaactttttctcggtggagcgcaagttttctcaggattcaaaatacagcgtgctggtcggaacgatgaaaaacagctttgacgatcgctgcctgactctcggcgtgcgccgcgactggctgaaaaacgataccggctgggtactgaaaggggtgtatgcctataccggggaatttttctttgatgccttcagccactgtggggattccggcacctaccgcaccgccaaaaaaatcaccggcatcggtttttcgccctacctctatcatggcctgcaatataatttcaccgattatttcggtgtggaaggcggcattattgtgccggcgatctttgtgatgagtgttcagtggagctttcgctagacgctttatttcccgggaaaagagcaggccaccacaggtggcctgatactaacgacctggcggcaggaattaatgaaagccgagacggatcagatccaacgggcagaagcggccctcgcagccgtcgatttcaacgcagtccgcccggcgcaactgctcagcggttttcccctcgccatggatagctttaatcacgcccgtcgtcccgttaccggcgatcattaccatgctgccggtagcaatagcgttacgattacggtcataggttttcatggtctcctcctcaataaacctgggtgaaagcaatgattaagcgcgcaaattaataccgctttctgcctaaaaaagttttgaggataatcaaatttattttaataaccacctgagcataaaggcaagaagaccttctgttcgcctccatcgcatcgcctgcgcggcgaggggatgaagcgtgatactggccgtcatatgtcagccaggttactgttttatgaccagattattaaccttgccagcccgcggaaaatagcgaaagatggcaatattcgggcatcaacggtgccagtgcctgtcctgagggagccatgagtcaagacgtcaccgcgaagatgttaaagcccgattttgatagtgaagtttccggcctggtgcatggctatttgtttcatgaacagcgccccccgcagccgatcgcctctggcgaggtatgcgcccgctatcaggcgctcgccgatgacaaggcgtttatctggttacacctgaatcttaatcacgccaccgccgagaaatggttaaccagccactttccggtggccgattttttcttcgaggagatccgcagcggctcgcacaccacccgcattgagcgacagggggaaaatctgttcgctgtgcttaacgatgtgctgtttcgtccgcaggataccagcgcggaaaccgccacgctgtggctctactgtagccccaggctggtggtgacggcgcgcttcaaaccgttgcggtttatcgaatggatgctgccgcgcttgcagacgctcagggtgaacacgtctactgagctgctggcctttctgctggaggagcaggaggaggtgctggagcaggtcgtccgccaggccagccgccatgttgaccttattgaagagcgtcttctgagcaatcacgtgcagcgcaaccgggccgatctggcgcggctacggcggatgcttttacgcttccagcggctgctggcgccggagccggcggcgatgttccggctgcttaaccggccgccggcgtggatggatcgcgcggtggtgcaggcgtttcgtcagttcaccgaagagtttagcgtggtgcttaacgatctgtcgggcctgatcgagcgcatcagtctgctgcaggaggagattggcgcccgccagctggagcagagcaatcgcaccctctataccctgacggtgatcaccgtcctcgcgctgccgattaacatcgtcgccggtttcttcggcatgaacgtcggtgggatcccgctggcaagcaaccaccacgggtttatcctgctggtggtgattgtcgctgtctttaccctcggcgccggttacctggcgtttcgccggcgcgatgacctgtagattgcgcgtcgaatcagctgaggctgcgcagggcggcaatcagtccttcgacaccgcgttccagcttctcgcgcgggcagccgacgttgagtcgcagaaagccgttgccctcaggaccataggtataacccggcataatcgccaccttctgttcggcgatcagcgcctgctgtagcgcgcgatcgtcaacgttgagcgggcgcaggtcgatccatgccaggtaggtggcctccggcggctgccagccgagcgcggggaaggcgttgttgagcgtgtcggcgacatagcgcatattcgcctgcaggtagtcgcgcagggcatcgagccagggagccccgtcgcggtaggcggcgatatgggcgaccagcgccggcacggaaggggaagagagcccgtcgcgaccctttagcgcctgcaggtagctgtcgcgctcgttctcttcggggataaagccgtaggccccggtaaaggccggaatattgaagctcttcgaaccggaggtgaacaacgcccatggtccctgagcgacctcgctccacgggatatggcggtgttcgctccaggtcatgtccatatgaatttcgtcgctaatcaccctgacgccatgtttttgacacagggccgccatggtctccagctcctcgcgacgccagactttccccgttgggttgtgcgggctgcacagcagcagcagggtattctttggctccgccagcgccgcctccaggcggtccatatcgcagcgccaccgattatccttcaggatcaatggcaccggggcaatccgccgccggttagcggtgatggtgttatagaacgcatcgtaggcaggggtgtggaccacgacgccgtcgccttctttcgaccactggcggatggtttccgccaccatatagataaccgacggtccgtagaccacagattgcggatcgatgtcgctgttaaagcggctggcgtaccagtgggcaatcgccccgagaaacgcctcgttgcgccagcggctgtagccgaacaccccgtgggccagccgctggctgacggcgtcgagaatacagggcgcggtggcgaaatccatatcggaaatagtgaacggcagcagatcggcggcgccaaaccggtcggcgacatagtcccattgcgtgcaccaggtgccgtggcgatcgataggggtggcaaaatcaaacattggagcttccttagcgagcgccccctccgtagcggagggggactagtgggatcaggcctgcacggtattcatcagcgtggccatctcatcttttaccgactgtacctgcgggccaataaccacctgcagattatgctggttgagctgtaccaccccgatggcgcgatgggctttcagcgcggcggcgtccactttgctcatatcgtgcaccgacaggcgcagacgggtaatgcagttatccagcgaaacaatgttctctgcgccgccgagcgccgccagaatcgccggtacgttatacccggatttgccgatggtaccggcgacggctttctccacgctggcggcagtgtcgatgtcgcggcccggcgttttcagattgaagcgggtgatggcgaagcggaagatggcatagtagaccgcgaaccagatagccgccactaccggcaccagataccacttggtcgccaggccatgcagaatgccaaacaccacgaagtcgatgatattgccgtcggtgttgccgatggttaccccgagcaccgccatgatggtaaagccgagaccggtcagcagcgcgtggatgacatacaggaccggcgcgacaaacaagaacaagaactccagcggctcggtggtgccgccgaccacgcaggcgatgaccccggagatcagcaggcctttaattttatgtcggttttccggacgggcgcagtggtacatcgccagcgcggctcccggcaggccgccgaggaatgccggcattttaccctgcgacaggaaacgggtggcgctttcggcgaagccgtgggtcgtcggacagctcagctgcgcctggaagatggtcagcgcgccgctgacgctgtggccgcagacgtcgagagtgccgccggcttcggtaaagcggatcagcgccaccagaatatggtgcaggccaaacggcagcagcagtcgctcgccggtgccgaagatcatcggccccaaatccccggcgctgttgatcatcttcccgagggcgttgatccccatagcgaagactggccacaccagcgggatcgccagcccgaccagccccagcaccacggtggtgacgatcggcacgaagcgggtgccgccgaagaaggccagggcgtccggcaggcgaatgttatggaagcgttcatgcagcagccagacgataatcccggcgatcaccgccccgaggatcccggtatcgattgacggaatgccgataatgttctggatattgttggccttcaggatcgcggcgtcggtggtgggcagaatacccttcgcggtcagccagaagttgaccgccaggttcatgaccgcgtagccaacgaagccggcgaaggcggcgacgcctttgttctctcgcgccagacccagcgggatggcgatacaaaacatgaccggcaggaagctgaaggcaaaggagccgaccttgctcatccagataaagatggcctgcagcagcggcatatccagccacggcagcagagtcaaaacatcgtgactgcttagcgagctgccgatccccagcatgatcccgcaaaacgagagcaacgctacgggcagcatgaaggtttttcccagctgctggaaaaattcccataaggtgatttttggtgctgttttcgccgtcatagcacggttcctgattcataagtggtcgggagaactaatgccacggcaagataaaacgttttatcactttttagtgcgataaaaatcacatattcaagcgataataaggtttataaagatcgcacaatgataaaacgatttatcgacaggcaagggagtcagccagcaggttatggctatcgcaaaaaagatcaccatcaatgatgtggcgctggctgccggcgtctccgtgagtaccgtttcactggtactgagcggcaaagggcgcatctccagcgccaccggcgagcgggttaatcaggctatcgaacagctgggatttgtgcgcaatcgtcaggcggcctcgctgcgcggtgggcagagcggggtgattggccttatcgtcagcgacctgtcaaaaccgttttatgctgaattaaccgccggcctcaccgatgccctggagaggcaggggaaaatggtatttctcacccagggaggccgcagcggcgagaagatggcccagcggtttgatacgctggcggcgcagggggtggacggggtgattatcgccggggcgatcgaccgcgggagcgagctgcgcgagcgtgcggcggaggcgggggtgccgctggtgtttgcttcccgcgccagctatcttgacgatgtcgacctgatccgcccggacaacatgcaggcggcgcagctggtgacggagcatcttatccgccgcggccatcagcggatcgcctggctcggcgggcagagtgcttcgctgacgcgcgccgagcgggtcggcggctattgcgccaccttgctgaaatacggcctgccgtttcacagcgaatgggtgctggagtgcgagtccagccagaagcaggcggcggaggcgatgaccggcctgctgcgccagaatccgaccatcaccgcggtgctgtgctacaacaacgtggtagccaccggcgcgtggttcggtctgttacgggctggaagacagagcggggaagatggcgtcgagagctactttgagcagcgggtggcgctggcggcgtttgccgacgtgccggaggccgccctcgacgacctgcctctcacctgggtgaccaccccggcgcgggagatggggaaaagcctggcggattcgatgctgcggcggctggaagaggggactggcgagacgcgaaaccagattatgcccccgcggctggtgacgcgaaaatgagggagacggcgcgcgctggccgtctcctgtaccgataagttacggctgcggggcggcgtcgtcctgctgaggagcggcgtcatcctgctgcggctggccttcctgcggcgcgctgtccggcagcgaaggcgcttccagaccaaacatcgcggcaaagtcttgcagcggcattttctgtccgttcagcgtcacctggccgttcgcgtactgcagactgctgctgatggcgttatcttccatggtggtaatgcggaacatctggcccatcgccgccaggcctttgacctgctgatcggcgagtttggcggcatcggccggctgatagccttccagaccggcgatcttagtcataaactccgtcgccatatccactgggatcaccactttgccgtccagggactgcaccacgcgatccaggctgtccgccagggtctgcggcggagcggtcacctgggccggatctttcagcagaaccgagaggttgagggtgctttcgcctttggcattgcgccagctcagcggagagatggtcaccgacgggttgcctttgagcaggatcggcagcgcattgaacagcgtttcggtgagggcctgctgatacagctccggattctgcgccagctccggtttcgccagcagcgcctgagactgcgcgctgtactgctgactgaactggtgccacgcctgaccgtcgacgttatccactttcagcgtgagtttgccgctgcccatatcctgcccctgcagcttgaggctgttgacggtgtagttcacctggctgttcacgcctttgccgtcctgggtcagcgtcgagccgccgtccagcgccatgccgtcgatcagcgccagctctttgccttcgacgctgatggccagtttatcgagggtcattttttgctggccgatacgttcgttgaagctggccagctcggtggcgccgtcggtggtcaggttgacgaagcgcagctgtaccttctgattatattcgttgagcgcatcgatctgcccgctgccggcctggcccttcaggctgatgtttttgccgtcgcggtcggcgtcgagctggaactgaccgccgctgaaggtgactttctcatcgcctttagcgtagtcgagggcgttaaggacgatagccgactggctgtcgccgctgtaggcaatgcgcgtatcgacggtaaagggggtgtcgcctttggctatctcgaacagcgcctggctggcgtcgtttttcaccagcgtggtgtggacggaagccattgccggcgccagattaaaggcttttaacgaggccagcgggaaggggccatgatcgaccacttcgtcaagcaccacgctctgcccggcggccagccagccgttagcctgaccggcgatcggcttcaccaccagctgcagatggctgctgaacagcccgcgctggtagtcctgatagctcagctccagacctgactccggcgcgctgctgcgcagctgggcgtttgcctgctgcaccatatcggcgatccggccttccagctgtttaccagtgaaccaggcgccgcctgtccataccacgcccagcgccacgatgactcctgctgcgaccagcgattttttcatagcatttatccataaatgaagccaggcggagagaccgcctggctgagttatcaccaacagtaagcgcgacctgaaggggcagtcgcttactggagcttattgaaaacgcgcgccacgcggccgcggccgctgacctgcaccggcgattcactggcggccacgaaggccgactcgcccggcttgagggtcaggctctggtcgcctttgcgcagtacggcttcgccgtcgacgcagaacacgatcgccgcgcttgcctgggccagatcgctggcctcggcggagaggtcatgcagggagaaggcaaaatcttccaccgggatcgggaagtcgagttccgcgccgtgacgctgcggctgggtcaacagctcacccgccggtttagcctcgaacttgacgttagcaaccagctcaggaatatcaatgtatttcggcgtcaggccggcgcgcagtacgttatccgagttggccatcacctccagcgccaccccctgcagataggcgtgcggcgtttcagcaaacaggaacatcgcttcgcctgggttcagcttcactacgttcagcagcagcggggagaagaggccgctgtcgtccggatagaattccgcgatcaggcggattgtctgccacggttcgccttgttcacgggccagtacgtcgcgcagcacctgcagcgccttggccttttcctcaccctgcatatttagcaggctggcaaacagctggctcaggtgagtcgcgtccggctgctgcaggaaggcgccgattgccggatgcgcgctagccaccggctgcagcagggtgacaatctcgctgaactcgcgaaatgcattcatcgccaggaacggcgtcagggcaaaaaccagctccggtttgtggttcggatctttgtagttacgctcggcggcggagagcgggataccggcggcgttctcgcgggcgaaaccttcttccgaggcctgcttgttgggatgcacctgaattgagagcggctgagcggcgcacagtaccttaaacaggaacggcagttcaccaaagcgggcggcaaccttgtcgccgagcagagcggctttatccgcgtcaatcacctcgcgcagcgaacgcggctggccgtcggccgccaggatctgcgaactgctcttcggatgcgcccccatccacagctctgccatcggcagattgtccgggttggcgatgccatagagttcggttaaggcggtgtggcttccccatgcatagttctgcacggcgttaatcagcttttgcattctcaatccctgtttcaaacaaagtaaattttatcgccctattaaaccagcaaacggtggagaagcaactgctgaaagaaaaagtcgtccttgtctcagtttttgttaaaaaattgtgtaagattgttcgactcgcttttctacaggcacatggagtccctgcctgaaacataatcagccaaagcagtaagtgagagtacaatgtcgaataaaccgtttgtttaccaggatccttttccgctcaaaaaggatgacaccgagtattatctcctcagcagtgattacgtctccgtcgccgaattcgccggccaggaagtgctaaaagttgaccctcaggcgctgacccttctggcgcagcatgctttccacgacgcctcctttatgcttcgccctgcgcatcagcagcaggtggcggatatccttaacgatccggaagccagcgaaaacgataaatacgtcgcgctgcagttcctgcgcaactcggatatcgccgccaaaggtattctgcccacctgccaggacaccggcaccgcgatcatcatgggtaaaaaaggccagcgcgtgtggaccggcggcggcgatgaagccgccctggcgcagggggtgtacaacacctatatccaggacaacctgcgctactcgcagaacgcgccgctggatatgtataaagaggttaacactggcaccaacctgccggcgcagatcgatctctatgctaccgatggcgatgagtacaaattcctctgcatcgccaagggcggcggctcggcgaacaaaacctatctgtaccaggaaaccaaagcgctgatcaccccggcgaagctgaaaaattacctcgtcgagaagatgcgcaccctcggtactgccgcctgtccaccgtaccatatcgccttcgtgatcggcggtacctcggcggaagcgacgctgaagaccgtgaagctggcgtccaccaaatactacgatggcctgccgaccgaaggtaacgagcacggccaggcgttccgcgacgtgcagctggagcaggagctgctgctggaggcgcagaaccttggtctcggcgcgcagttcggcggcaaatactttgcccacgatatccgcgtgatccgtctgccgcgtcacggcgcttcctgcccggtagggatgggggtttcctgttccgccgaccgcaacatcaaagccaaaattaaccgcgacggcatctggatcgagaagctggagagcaacccggggaaatatatccctgagcatctgcgccaggccggggaaggcgaagcggtgaaggtaaatcttaaccagccgatgagcgagatcctggcgcagctgtcgcagtatccggtgtccacccgcctgtcgctgagcgggactatcatcgtcgcccgcgatatcgcccacgctaagctgaaggagcttatcgacaacggcgaggcgctgccgcagtacgtcaaagatcacccgatctactacgcaggtccggccaagacgccggacggttacgcctccggctctttggggccgactaccgcaggccgcatggactcttacgttgatctgctgcagtcccatggggcgagcaagatcatgctggcgaaaggcaaccgcagccagcaggtcaccgacgcctgccacaaacacggcggcttctacctcggcagcatcggcggcccggcggcagtgctggcccagcagagcatcaagagcctcgagtgcgtggcctatccggagctgggtatggaggctatctggaaaattgaagtggaggatttcccggcctttatcctcgttgatgataaaggcaatgacttcttccagcagatccagacctcgcagtgcgcccgctgcgtgaagtaacccaggccgcccttcggggcggcgctggtcgatgacaaacctgatttcgttagggtgagcgcctttctgccgggtagcggctttcgccttacccggcctacgaaaaacagcaatatcaataagttatgcagttctctgtaggctcgcgcaagcgtagcgccgccgggcaatcccgacgattgcattttgtcagcggtctgggccgcccctcggggcggctttttttatgtcgcttcgcggcacgaaccaccaaaacaacttatcaatctggccaatacttagtcttttaagcaggtgagctttgtcgctatgacgcacttttcatccaaggagaaagtaatgacaacgcatcgcagtgaaaaagactcgatgggcgccatcgaggtcccggccgataaactctggggcgcccagacccagcgctcgctggagcatttccgcatctcgaccgaaaaaatgcccggggagctgatatacgccctggcgctgaccaagcgggcggcggcgaaggttaaccaggatctcggactgttgacggcggagaaagccggggcgatcgtcgccgccgctgacgaagtgctggccggaaagcacgcgcaggagttccccctggctatctggcagaccggctccggcacccaaagcaatatgaatatgaacgaggtgctggccaaccgcgccagtgaactgctcggcggagaacgggggatggcgcgaaaaattcatcccaatgacgatgtgaataagagccaaagctcaaatgatgtattccccaccgccatgcacgtcgcggcgctgattgccctgcgggaaaaagtgatcccgtcgctgcaggcgctgcgggcgacgctcaatgaaaaagcggtggccttcagggatatcgtcaagatcggccgcacccatctgcaggacgccacgccgctccccttaggccaggagatctccggctgggtggcgatgctggaccatagcctgaagcacattgaagccagtcagccgcatcttgccgagctggcgctgggcgggacggcggtaggaaccgggctgaatacccatccggaatatgccgtacgggtggcggccgagctggcgtcgctcagcggacagccatttgtcaccgcgccgaacaaattcgaagcgctggccactgtggatgccctggtccatgcccacggcgcgctgaaaggcctggcggcctcgctgatgaaaatcgctaacgatgtccgctggctggcctccggcccccgctgcggcattggtgaaatcgccatcccggaaaacgagccagggtcatcgattatgccgggcaaggttaacccaacccagtgcgaagctctgaccatggtctgctgccaggtgatgggcaacgacgtggcagtgaatatcggcggtgcttccggcaactttgagcttaacgtctatcgcccgatggtcatccacaacttcctgcagtcggtgcgtctgctggcggacggtatggcgagctttaacgagcactgtgcggtgggtattgaaccgaatcgcgagcggatcagtcagttgctcaatgagtcgctgatgctggttactgcgctgaataccaatatcggctacgacaaggcggcggaaatcgctaaaaaagcgcaccatgaggggctgactctcaaagcctcggcgctggcgctgggctacctgacggaagccgaattcgacagctgggtgcgcccggaagagatggtcggcagcctggctattcgctagccagccagaggtgcaggcgcgggataagcaatctcagcgactgcgcctccggtttgtagcgatactgcacattgtcggcatcatagttcagcagctcgccaatatccggtacgctgaccccccggctgccggacatcagggcgatcagcgggctggggcaggcgtactgtacctgtttctgctcgccggcgtaccagacgcgggcgatcggctggactttcaccggtcgttttattttcagccgcgcccgctgcggcagggcggcgatatcctgatactccctttccagtttgctctgccactgctccctggtccacggcggcaccgcccgcggcgcttgcaggcttttctccagcatcatcaacacctggtcgcgggtcagattcttgatgacgtgcttattggcccagccgaagcggatggtgctcgggtcgacgaggggcgtcagcgtgcggtaggcgcttagggtgatcaaccccggcaaatgacggtgtacccactcaaaacgggcggtggggggcaggccggagtcgacggtgacgatcttctcgaaggtggccttcagggcattgatatgctgaatacgcgccagcagatcctgctgctccgcggcggtaacctgcaggcagatagcccccggcaggcgtacggcggccttgctgctgcggttttccgattgctgctggataaacagatggctgtagtggcgcagggcgtgcgccagggccgtcttgccgatgtgctgcaccaccggaatagtggccagcggatcgtgctcggcatccttaccgatcgccggcagttcaaatacccggcccgccagcagacggcagtcacttaatgcctgctggagcgcctgcagctccagctcgatctggcgaaaggtattattcagacgttcaacgaggtcgtagctggccattattaccaccttagttacaacatactattagatttttgcagcatacccagcccgcggcttctgcgcaagttttattcaggcagaggtgaaatcaggcagctgatgatagaccggccagctaaagcagaagcgggcgccgccgagagggctggcctcgcagcgcacctcgccgcccatcgcctgggcgatactgtggacaatcgccaggccgaggccgcagcctcctgtcgcccggtcccggctctgtcccctaaacacctctgacgcggccgacgagcgaccgaatgtagatctcggttgtggcgggagcagggagaaaaaaaaatgagaacaggcgcgcgagcttgcatggtagcgcaat

SEQ ID NO: 160 - DNA, 50647 bp, Unknown
  source: /note="Description of Unknown: MKP2_2161_1 Mutant Bacteria sequence"
tactctgttttgttgtgtttcactgataacggtcctccctgcttcttcccttggtcgctcttcggcagcgtcagaggtggctaagggacagacacccgcccataccgcccggctcagttcgcgagaaagtcccccctcggccaccagccacagggcgcccgccaccgcgccgccggtgcgagcgcagcggaaagcctggcccggagcatccatcatgcgccgcagatcgagcggggaagttcggtaatgcgccccggacaatagctggtacatcgcctccggtagcgctggctgcgtttgccagcaggactgattgaccgcctccagggctatctcccccatcggcgcgtcgcgaaatgcctcatcgttaaagataagcaactgactgatggctgactccagcggacagcccgccgcccagcggatcggggcgctcagggtgaaggattgcagatggggcagactggcgcaaaatttcagcaggaacccgcgaccggtgccctcgtacccttgcaccgtcgtggtgagtagcgtgcggggaaaacggctcaccagctgccggagaagcggagccgggatagccgcggcctcatcgactatcagccacgccgccttttctttcgacgccagcagcgcatcgggcgccataaagcgcaacgtctccccggcaaagctggccagcacctcgacagcgctacgcgttggggcggtgacgatggcctcgcccccaagctggcgcaggagcatgcccgccagcgcagacttcccccgtccacgctccgccgtcaccgccgcgataccgggcggcaggcgtatcagttgctcaaggattgccgcctgctcggcctgcgggcggccatcggcgggatgccagtctggacgcggggcggccagcgggaaacgtggccggtccgactgccgccagagcaacacctccggatcggcgataaactgccgacagcagcggtgaacaaagttaggggtaacgatagggtcaggcgtatcgctccagcgcagagagtcctcatccgcccgggtcggccagtcggcgaaggggggcgtcagcagcaccagccagcttcccgcccgcagcgtgccgctcagggccgccatggcggccacatcaaacccgcgccgggcatcgaaaaaggcgtgcatcacttcccgccccagcagcgttttcagcgcgccgggcgccacgcagggcgcagaaaccggctcggggccaacccacaggccatcgccgccgagcctctcccgtagcgcctgcgcctgctgcagcgtccagctctcatcgccgctgagcaccagcaggcgacggatcccctcccgcgccatttgcgcggtgaggttaagcagcgcgtccatcatgggggacgattacagcgcgctgccgaaggtattgcactgcgccggatcgccgctatcgaaaccgcgtttgaaccaggtgtagcgctgtttcgaggtgccgtgggtaaaactgtccggcaccacgcgtccctggctctgctgctgtagacgatcgtcgccgatggcctcggcggcgttcagcgcctcctgcagatcgccagtttccagaatatcctgctgctgcatattatgaccccagacgccggcgaagcagtctgcctgcagctccatcttaaccgacaggcggttggcttcggcctgcgtggcatgctgctgttgctggcggaccttcggctcaatgcccagcagtttttgtacgtgatgacccacttcatgagcaatgacgtacccctgggcaaagttgccgtcggcgcccagtttatttttcatctcatcgtagaatgacaggtcgatatagaccgtactgtcggcaggacaatagaaggggcccatcaccgactgaccggtgccgcagccggtacgggtcgcgccgcggtagagcaccagctttggctgcgggtactggcggcccatcttttcaaagatcggcccccaggtatcttcggtggtagccagaatgacggaagtaaacttcgccgcttcatcgtctttcggactgatggagcgctgcgtggaggtctgctgctgcggcatcggttcgccggtcaacatgccggtcaaatccacgccgtagtagcccgccaccagcacaataatcagcagtacaatgccgcccttcccgctcggcagacggaagccgccgcccccgccgccgccaaacggcgagcctgattgtccacgtcgatcttcaacattgtcgctttcgcgacgcccttgccagcgcataagcacctcattccctgttatgtatcaatagcagagatcgtaggcggttcagcgcaggattaccacaggaaacagcaagagacgccagaagatgaggccatcttctggcggcgggcgggttagtcgagcttaacgcccaggcggtgagccacttcttcgtaggcttcgatcaggccgccaaggctctggcggaagcggtctttgtccattttatcgagggtgtttttatcccacaggcggctgccgtccggcgaaaactcgtcgcccagcaccacttcgcctttgaacagaccaaactccagcttaaagtccaccagaatcagaccggcgtcatcgaacagttttttcagcacgtcgttggctttgtaggtcagctcgcgcatccgcgccagattctctttactcacccagccgaaggtttcgcagtaggagtcgttgaccatcggatcgtgcatagcatcgtttttcaggaacaggtcgaacagcggcggattcagctcgataccttcttcaatgcctaaacgttttaccagcgagcctgccgcacggttacgcaccacgcactctaccggcaccatatccagttttttcaccagacattcggtatcggagagcagcgcttccatctgggtagggatgcccgcttctgccagtttactcataatgaaatggttgaatttgttgttcaccatgcctttacgatcgaactgctcgatgcgcgcgccatcacctgctgacgtatcgttacggaattccagtaccagcaggtccggattatcggtgctgtatactgtcttcgccttaccacgatacaactcagcttgctttttcatctttcactactccagtgatattgagccaaaaaatgacgtgtcggtcttacataacatcctgcaacgggcgttggagcggatgctgtacgcttgcggggcgaactgcagtcaggcgactggagcagccttaacgcggcgatttacaggattatatggccacgcacacgtttgcgtcactatacatgaaaaagggccggattgctccagcccttttgattacttgttaaatgcggcctggaatacggctaccagggcgtcattttgcgactgcgtcagggtgtggcctttcgggtcgataaactgcaggctactgcggttatcgaggtcgccgacctgcagtttgtagtcgccggagaccagctgcgggtcacgtgcgcccagctcctgccagctgctgtcagacagcggcttataggtcagcgccatgctgccctgagagcgcgtgctgtcggtcactttcatccccactttctcgagggcgccaggcagacgctgccacaccaggttaaacggcgcgcgaactacgagcatcggcaggccggtatcgtcggcggcgctctgcacgtcgaaggtggcccccgcgctgcgctgtgcggcgttctgggcgctggtggcattcatgtcaaggccttccgaaatgacgttcagcatagcggtgctgtagcgctgcagagatgccggatcggcaaccggtttacccgcctgctccagcttcaccagcttaacgaccaccgcttgctgataaccctgcggtttgacggagatttgataacgaccgcgatactgctgatcttcatcaagacggttccacgcaacccagtcggtgttcagcgtctggctcgcatcatcgcgcttggcgataacgtagttcttcgcctgaagaatactggtgacctgtgcccacagcgaaccgctgcggccgttctcgaccatcagcgtcgcggtatcgccgttaaactgggtccgcgcaccgctcaccagcgccagcggctgcgccggcggacgaatgtccagcgctttaccgaccgcgccggtgctgttagccaccggaatattgtaatcacccacctgaatcggcaggatcatccccgccggcgcatgaagttcgctcaacggtgatgcctgtaaataggcctcatcaccgctcacctgacgcttatagcgcgagtcagaactacaggccgcgaggagtagaaccagcgaaacacccgcaaccttcgccaggcgcgacttctgtactgagtaagccatcaaatctccctaaactttacagcaaaccggcatgcttcagcgcggcagtgacggcttcacgaccatgatcggtgataggcgtcatcggcaagcgcagcgtatcggtcgccacaagacccaacgccttgcatccccatttcaccgggataggattgggttcgacaaataattttgtatgcagtggcatcagacgctggttaatcgcacgagcttcggcaaattgacccgccagcgccagacggcacatgtcggccatttcgcgcgccgccacgttggccgtaacagaaatcacgcctacgccgccgagctgcatgaagtccataccggtcgcatcgtcaccgctcagcagaataaagtcgtctgaaaccagctctttgatctggtgaacgcgacttaagttccctgttgcttccttaataccgacaatatttttaatttccgccagacggccaacggtttccggcagcatatcgcaaccggtacgggacggcacattatacagaatttgcggcaggtcagtatgttcggcgatagctttaaagtgctggaacaggccttcctgggtcggacggttataataaggagtgaccgtcaggcagccaacaacaccgctgtcgttaaaacgtttggtcaggctaatcgcctctgcggttgcattggctcccgttccagcgataaccggaatacgcccgtcggccagctccagcgtcatcatcaccacgtcgccatgctcttcatggctcagcgttgcggattcaccggtagtccctaccgaaacgatcgccgaggttccgttggcgacatggtaatcaatcagttttttcaggcttgtccggcagacattaccgttttcatccatcggcgtgacaagcgctacaatacttcccgtgaacatgggccatcctcagagcagaagtgcgacaagattctcaatgttacgtttggagctgtaataaaagcaagagacccgacgccatcagggatgttgtatggcggttttttttatgctttcctaatgttacctcacctttttaaaggaagaacaggtttgacagcctcattacaacactatctggttattaccgccctgggggctgaccgtcccggcatcgtgaatacgatcactcgccacgtcagcagctgcggttgtaatatcgaagacagccggctggccatgctcggtgatgagtttacgtttatcatgctgctttccgggtcgtggaatgcgattaacctgatcgaatcaactctgccgctgaaaggcgcggagctggagctgttgatcgtgatgaaacgcaccactgcgcgcccgccgcaggccatgccaaacaccgtttgggtccaggttgaggtgccggactcaccgcatatcatcgagcgctttactgccctgtgcgatacatggaatatgaatattgcggagctggtgtcccgcacgcagccgggagacggcgattccgcgcagctttttatccagataactgcccacagtcctgcgacgcaaaatgcagcaaatatcgaacaagcgttcaaagccctatgtacagaactgaacgcacaaggcagtattaacatcgttaattattcacagcatgatgaacaggatggagtttaacccatgaccccactgaaagccggtgatatcgcaccgaaatttagcttaccggaccaggacggcgaggaagtaaatttaaccgacttccagggacaacgtgtcctggtttatttttacccgaaagccatgaccccgggctgcaccgtacaggcgtgcggcttgcgcgataatatggacgacctgaaaaaagccggcgttgaagtgctgggcatcagcaccgataaaccggaaaaactctcccgtttcgccgaaaaagagctgctgaactttacgctgctgtctgatgaaaaccatcaggtttgcgagcagtttggcgtctggggcgaaaaatcctttatggggaaaacctacgacgggatccaccggattagtttcctcatcgatgccgatggcaaaatcgaacacgtctttgatgatttcaaaaccagcaatcaccacgacgtggtgctgaactggctgaaagaaaacgcctgatgcaaagcaagacgccgggagaggaagccctcgcccggcgtctttttttattctcattgccttagtcgtcgaccgccaaaccatccggccaggcatgcaccacagctttaatcagcgtggccagcggaatggcgaagaagacgccccagaatccccacagtccgccaaagatcaccaccgacaggataatcaccagcgggtgtaaattgaccgcttccgagaacagcaccggaaccagcaggttaccgtccagcccctgaataatcagatagaccgcaaacaggctccagaactcggtgccagcgccaaactgaaacagcgccacccccaccaccggaatggtcaccacaaacgcgccgatataggggatcagcaccgagaagcccaccagcaccgccagcagcaacgagtagttgaggccaaagagaataaagcctatccaggtggcgacgctgacgacaatcatctccagcaccttgccgcgaatgtagttggtgatctgctggttcatctctttccacacctgcccggcaagcccgcgattgcgcggcagaacgcggcgcaccgcgttgagcatctgctctttatccttcagcaggaagaagaccatcagcggcaccagcaccagatagaccgccagggtgagtagccccaccagcgaggccagagagtacttaaccaccgagtcgcccaccgtcagcatccgggtgcgcatattttccgccatcgcatcgataatgccggcatccattaacgccggatagcgccgcgtcagcgtggcggcgaaatcagagagcttatttagcatgcccggcatatcgcggatgaggtagatcccctgctgccaggctaccggcagcaccacaaaggccagcaacagcaggatgcccacaaagaggatcagcaccagcgaggtggcccaggtgcgcgacagaccgatgcgctccagacgaacggtcggccactccagcagataggccagcacgatagccaccagcaacggggccagcaggccgctgaaaaagaacataatgccgaaaccggcaagcaaaataaccagcagcgctatcgcctcagggtcgctgaatcgacggcggtaccactgcattaacatctcaagcataaaaccttccctgaagggccaagcggcgacaatccagggaattgtatcgaaatgtaacaaaaaagacttcgctttttgatgcgccgcagtcaaaccgttctccgccatgaagaacatattttcaaggcggccaacgccagctaaactcgctgggatgcggccagggaacattacgccgcacaatcggtcaaactggcacacccacattacaggacagaggttatgttcaggcagttgaagaaaacgctggtggcgaccgcgatcgcgtcgctgacgctgggttcgataggtcctgcttttgctgactccgcagataccctgccggacatgggaacctccgcaggaagcactctgtcaatcggtcaggaaatgcagatgggggattactacgtccgccaactgcgcggtagcgcgccgctgatcaacgaccctctgctggtgcaatatatcaacgggctgggtatgcgtctggtggctcacgccaactcggtgcgtaccccgttccacttctatttgattaataacgaccagatcaacgccttcgccttcttcggcggcaatgtggtcctccactccgccctgttccgctactctgataacgagagcgaactggcctctgtcatggcgcacgaaatctcccacgtgacgcagcggcatctcgcccgcgcgatggaagatcagaagcgcaatgcgccgctgacctgggtcggtgccctgggttcgattctgctggcgatggccagcccgcaggccggaatggcggccctgaccgggacgctggccggcacccagcagggtatgatcagcttcacccgccagaacgaagaagaggccgaccggattggcattcaggttctgcagcgctcgggtttcgacccacaggccatgccgatgtttatgggtaaactgcttgacgagtcgcgctactcgacgcgaccgccggaaatgttgctcacccaccccctgccggaaagccgactggccgatgcccgtaaccgcgccaaccagatgcgcccggtggtggtacagtcctcggcggacttctatctggcgaaggcgcgtaccctcgggatgtacaccaacggcgacaacaagctgggcaccgatctgctgaacgcctgggataaaggcaatatccgccaacagcatgccgcccagtatggtcgcgctctgctggcgatggaaagcaataactttgaccaggcacgcaaaacgctgcagccgctgctcaacgccgacccgcaaaatgcctggtatctcgatctggccaccgatatcgacctcggacagaagaaaaccagcgacgccatcaatcgccttaaaaacgcccgcgagctacgtactaatccggtgctgcagttgaacctggccaacgccctgctgcagggcgggcagcccggggaagcggcgaccattctgaaccggtatacctttacctataaagaggatggcaacggctgggacctgctggcccaggcggaaggcgcgctgggcaatcgcgatcaggagctggcggcgcgggctgaaagcatggcgctggtcggccagctggagcaggcgatttccctgctcagcagcgccagctcgcaggtgaaactcggtagcctgcagcaggcacgttacgatgcccgtatcgatcagctacgcgatctgcaggctcgcttccgtccctatcaaaaaatgtaaggagaccccatgaccgacgcggtaaaaatttaccataacccacgctgctccaagagccgcgaaacgctgagcctgctgcagagccgcggcatcgatcctgaggtggtgctttatcttgagacgccaccggatgccgggacgctgcgccagctgctgcagctgctgggtatggagagcccccgcgagctcatgcgccagaaagaggatctgtataaatcgctcaatctggccgacccggctctcagcaacgcggcgctgatacaggcgatggtcgacaatccgaaactcatcgagcgccctatcgtcgtcagccgcggccaggcgcgtattggccgcccgccggaacaggttcttgagatcgtaagctaactcacccgcgccgcgcttgcgcggcgcttttttttacgtgggcgattccagatctttcacgccaatatctcccgcccgccggacggtgctactgttcatccatcgctcaatccactggacggatgaacatgaaaaagccgacctccacgccccatgacgccgtgtttaagacctacctctcccatcccgataccgcccgtgatttcctgcagctgtatctgcccgagacgctgcttaaagtgtgcgatctgcgtacgctgcatctcgagtccgggcattttgtcgaagacgatctgcgtcccttttacgccgacattttgtattccctgaaaaccacggcgggcgacggttatatttatgcgcttatcgaacaccagagcacgcccgaccggcatatggcctttcgtctgatgcgctacgccatcgccgccatgcagcgccatctcgatgccggccacgatcgcctgccgctggtgatccctgttctcttctaccacggtctggtgagcccctatccgttctctctgcgctggctcgatgaattcgtcgctccggagctggccggccacctttatcccggggcgtttccgctgtcggacataaccgtcattccggatgacgagattgccacccaccagcgcatggcaacgctggagttactgcaaaaacatattcgacaacgcgatctggcgcagctcctcgacaagctgagcgaattattattgactggactggcgacggaatcgcaggtacaagccctgatgcactatctggtacagtcaggcaacacgcgcgagccgattaaattcattcgcgagctggcgttacgtacgccgcagcataaggagacgttgatgacgattgcggaatatctggaacaacaggggctggagcggggcctggcgcaaggccgtcaggaaggacggaaagaagaggcgcagcgcatcgctgtcgctatgctgcacagcggccttccgcgcgacctggtcgcccggttgaccgggctgacggagcaggagctgactcccctggcggactaaagcttaaggagctctttcacgaaggggatcgtcagtttgcgctgagcggtaatcgaggcatgatccagctgatcgagggtcataaacagcgaacgcatctcgcgatccagccgcttcagcaggaagcggcacacatcttccggcatctcgaagccgcgcagtctggcgcgcagctgcagcgcctgcagtttgtcttcatccgacagcggctgcagcttatagatctgcccccagtccagccgtgaggccagatccggcaggccaagattcagctgccgcggcggccgatcgccggtgatcagcagccgggttttgcctgattccaggatccggttatagagattaaagatggccatctcccagggctcatcgccggcgacgcactcgatgttatcgatgcacaccagcgccagctgttccatcccctccagcacctcgggcacaaaccacgtccgtttatccagcggcacgtagcctaccgcatccccgcgctgggaaagctccgcgcaggcggcgtgtaacaggtggctacgacctgccccttcacgtgaccagatataaatgtacccgctgtgttcctggcgcagtacgttctggagggcggcaagtagggaaggattatcacccggccagaaactcgcgaaggtttcgtcgtcaggaagatacagtggcaaagagagctgtgccggtgcgttcagatggacctcaacataggcttacagaaaaacgcgaagagtttaccacagatttaggtcaggagagaaccgggcgggatcgccgcccggtcaggcgatcgttatttaaactcttcgctatccgccgcgtcgaggaccacctcttccggacgcaggacgctgataagcttgaaaatcaggctgagggcgatgcccacgatagtcgccagcgccatccctttcagctcggcggcgccaatgtgcactttagcgccgctagcgccgatgatcaggatcacggaggtgaggatcagattctgcgctttactgtaatccaccttcgattcaatcagtacgcggatccccgaggcgccgatcaccccgtacagcagcagggaaacgccgcccatcaccggcaccgggatgatctggatagccgccgccagtttgccgacgcaggagagcagaatcgcaatgatcgccgcgccgccgattacccaggtgctgtagacccgggtaatcgccatcacgccgatattttcaccgtaggtagtgttgggcgtcgaaccgaagaagccggaaacgatcgtcgacaggccgttggcaaacatcgaacgatgcaggcccgggtcgcggatcagatcgcgcttaacgatattggcggtcaccaccagatgccccacgtgctcggcaatcaccaccagcgcggcgggcagtatggtgaagatagcaaaccactcaaagcgcggagtgtagaaagtcggcagcgcgaaccagtgggcctcggcgatcggggtggtatcgaccacgcccatcacaaacgacagcgcatagcccaccagcacgccgatcaggatcgggataatcgccaggaagccgcggaacagcacggatccgaacaccgtcaccgccagggtcaccatcgagataataatggttttactgtccggtgactggccgtcggccggcagcagcccggccatattagccgccacgcccgccagttcgaggccgataaccgccacgatggcgcccatcgccgccggcgggaacatcacatccagccagccggtaccggcttttttgacaataaaggagacgaggcagaacagcacgccgcacataataaagccgcccagcgccacttcgtagcccagcggcaacagcagcagcaccggggagataaaagcgaagcttgatcccagataagcgggaattttgcctttacagataaagaggtacaacagcgtaccgatgccgttgaacagcaggacggtggccgggttaatgtggaacagaataggcaccagtaccgttgcgccaaacatggcgaacagatgttgcaaactaagcgggattgtctgtaaaagcggcggtctttcactccccccgatggcacggcgcgtcatagtgtattcctctgagagtcgtctgttatttgctgtggattacttttattcaaaaaaaagccgactctcaaagtcggcttttttcgcggtatattttatttcgttccaaaaatcttgtcgccggcatcgccgagaccgggaatgatatacccgtgctcgttcagtcccttatcgacagaggcggtgtacagctcaacgtccgggtgggctttctccagcgcggcaatcccttccggcgccgccaccagcaccagcaccttgatgctggtgcagccggcgtttttcagcagatcgatagtggcgatcatcgacccaccggtggccagcatcgggtcaacgaccagcgccatacgttcatcgatgttagacaccagtttctggaagtaaggcaccggctcgagggtttcttcattgcgatagataccgaccacgctgatacgcgcgcttggcacgtgctccagcaccccttccatcatgccgaggccagcgcgcaggataggcacaacggtaattttcttgcccttgatctgctcgacttccaccggaccgttccagccttcaatagtgactttctcagtctccagatcggcggtggcttcataagtcagtaagctgcccacttctgaggcgagttcacggaagcgtttggtgctgatgtcgtgctcgcgcatcaggcccagcttgtgtttgacgagtgggtgtttgacttccacaatcttcattctctttctcctctgaggggcagccacaaaaaaaatcgcgggattataccgctttttgcggattgtgccatacccatcttgcttgacgtatatcaagcaaagtgatttagagacaaaaaaaccggaggcgaggctccggcttgggtgcggggtgcagtccatacgcttacgcgggcctacgtgtattgtaggtcggttaagcgttagcgccacccgactacgacaggttctccccgttgctggcaattacctgctgataccaggcaaaggactttttccggctgcgtgccaacgtgccattgccttcattatctttatcgacataaataaagccgtagcgttttttcatttcccccgtgccggcggaaaccagatcgatacagccccagggggtgtagcccatcagatcgacgccatcctcgaccaccgcctttttcatctccgcgatatgggcggagagataatcgatacgatactggtcattgacgctgccgtccgcttcgcggacatcaatcgcgccaaagccgttttcgacaataaacagcggcagctggtagtgatcccagaaccagttcagcgaatagcgcaggccgaccgggtcaatctgccagccccagtccgactttttgacgtacgggttggagaccaggctggtggtttcatcataatcaagcaaggggttgtcttcggtggctttggtagcgaacgacatatagtagctaaagccaatgtagtcgacacagccctcggttaacgcctgacgatcggcttcggtgatatccagagtaaagccgcggcgggcaaaatagttgagcagatgctgcggatagcgaccgcgcacgtggacgtcggtaaaccagtaacggcggtgcatggcgttcatcgccatcatcatatcgtccggggcgcaggtcagcggatagatggggcacatagcgatcatgcagccaatctgcagcgccgggttgatctcgcgcgccgctttcaccgccagggcgctggccaccagctcatagtgcgcggcctggtacatcaccggttcccggtcttcatccggcaaatatttcaaaccggagttggtgaagggggcaaagtcctcatggaagttggcctggttgttgatctcgttaaaggtcatccagtacttcactttatgttgatagcgggtgaagacgaccctggcaaagcgcacgaaaaagtcgattagcttgcggttgcgccagccgccgtactcggtgaccaggtgataaggcatttcaaaatgcgacagcgtaatgactggctcaatgccgtgtttcaggcattcgtcgaacagatcatcataaaactgcaggccagcctcgttgggctccagctcatcgccctgcgggaaaatacgcgtccaagcaatcgaggtgcgaaaacatttgaagcccatctcggcaaacagcgccaggtcctgtggataacgatgataaaaatcgatcgcctcatggttcgggtagtttttcccggccaccacgccgtcggtaatttcccgcggcacgccgtgggcgccggcggtcatcacatccgccacgctgatccccttgccgccctcctgccagccgccctctaactgatgcgctgcgaccgcgccgccccacagaaaacctgctttaaatccggacatagtctctccctaatgtcgatcgtcgtctggcgaacgatacagctgattaaaatggtaaaccgcgccaatcaggccggcatcgttaccgtgactgacggtatcgagatagtcggcaatgccgaaccaggccagatgctggcgcagtagcgtcagaaatcctgggcgttccacaacgccgccaccgataaaaatggtctgcggatcgaagatatggacgaggttataaaggccatggcccaggccattgaagaactcggcgaccagacgctgacaaaccgggtcgccggcgtcatagcggtcgaaaatcagttcgcctgtcacgctatccagcggcgcgccaatatgttgcgcatagcgatggcgcagcacccgcagagtgcagttctcattcattgaatagcgacgaggatcgcgtccgccgggacggtcggtaagcatgtagccgaattcgccggcacgaaaacgcgccccgttgatcagctggtgttggcagaaaatcgccccaccgatgccagtaccgatagtgagcaccagaaaattggccatctccgccgctttgccctgccagcgctcggccagcagcacacagttggcgtcgttttccaccgagaccggcagcccggttcgcgtctcgagccacgatttcatggcgaagttatcaaatcgacggatagcgccgcccatggtgataaaaccgctgtgcggatcgatatagcccggcgcgctgatggctattccttcacacgacggatgggccgccagccacgacagcattgcctgtaagatccgatcgccatcgctgtcattgattgactgcctggcggtttccagcagcctgccgtcgcgggccatcacgcccatctttaacgcggtgccaccgatatcaaatgccgcaatcttcattcatccctctcctgacccgcgtcaatcaccgacaaaatgcgtggcaaaccaacacggaaaccggtttcagtcgtataatgaggattcctttacgtagaggcaagcaccagactgtacccggtttcattttcgtgagcagtatcaaatttaaccattcatcagcggttttacgccaactgtaaagcaggctcgcaaacgtttgctttccctgttagaattgcgccgatttttcttgcttaccgcaaacgcgtggagacttcgcagtgaccgataaaacctctctcagctataaagatgccggcgtggatattgatgcaggcaacgctctcgtcgaccgtattaagggcgtggtgaagaaaccccgtcgcccggaagtgatggggggactgggcggattcggcgcgctgtgcgcactgccgcagaaataccgcgagccggtactggtctccggcaccgacggcgtcggtaccaagctgcgtctggcaatggatctgaagcgtcacgacaccatcggtatcgacctggtcgccatgtgcgtgaacgacctggtggttcagggcgctgagccgctgtttttcctggattattacgccaccggtaaactggacgtcgataccgcagccagcgtcatcaacggcatcgccgaaggctgcctgcagtccggttgcgcgctggtcggtggtgaaaccgcagagatgcccgggatgtaccacggcgaagattacgacgtggcgggtttctgcgtcggggtagtggaaaaatcagaaatcatcgacggcagcaaagtgaccgatggcgacgtgctggtggcgctggcgtccagcggcccgcactctaacggctattcgctggtgcgtaagatcattgaggttagcggcgttgacccacaaactaccgaccttgacggtaaaccgctggccgaccatctgctggcgccaacccgcatctatgtgaaatcggtgcttgatctgatcgccagcgttgacgtccacgctattgctcacctgaccggcggcggcttctgggaaaacattccgcgcgtgctgccggataacacccaggcgatcatcgatgagtcctcctggcagtggccatccgtcttcaactggctgcaaaccgccggtaacgtcagccagcatgaaatgtaccgtacctttaactgcggcgtagggatgattatcgccctgccggcagcggaagcggacaaagcgattgccctgctgaatgacaaaggtgaaaacgcgtggaaaatcgggtatatcaaagcctccgattccgaacagcgtgtggtcattgcatgaaaaacatcgtggtgctgatttccggtagcggcagcaatttgcaggcgatcatcgacgcctgcggccggaaacagataaacggcaccctgcgtgcggtattcagtaacaaggctgatgcgttcggccttgagcgcgcgcgcctggccggcatcccggcccatgcgctggcgcaaagtcagtttgccgaccgggaagcgttcgatcgtcagctgatgcatgaaatcgacgcctacgccccggatctggtggtgctggcaggctatatgcgtatccttagcccggcgttcgtcagccactatcagggacgtctgctgaacatccatccctcgctactgccgaagtatcctggcctgcatactcatcgtcaggtgctggagaacggtgacgaggagcacggtacctcggtgcacttcgtcaccgatgagctggacggtgggccggttatcctgcaggccaaggtgccggtcttcactggcgacagcgaggaggaaatcacggcgcgggttcaggcccaggaacatgccatttatccgctggtcatcagctggttcgtcgatggacgtctgcgcatggcaggcaaccacgcctggctggatgagcgacagcttcccccgcagggctatgccgccgacgaatgaacaaccagccccgcatgagcacatcgcggggcttttttttaattaaaagtgtttactaatcaaacatctcacagaaataattcttcttactgtcatattgttgtgacacagtaaatcgctacgcagaaaaattcgtcataatagtctacgtcctgtgagtaaaacggagtgtgagcggtaatgggccaggaaaagctatacatcgaaaaagaactcagctggttgtcttttaacgaacgcgtgctgcaggaagcggcggacaagagtaacccgctgattgagcgcatgcgcttcttagggatttactccaacaacctggatgagttttacaaagtgcgcttcgctgagctgaagcgccggattattatcagtgaagaacaaggcagtaccgcccattctcgccacctgttaggcaaaattcaggcccgcgttctgaaggccgatcaggaattcgatagtctgtataatgaactgttgctggagatggcgcgtaaccagatcttcctgatcaacgagcgccagctgtccgtcaatcagcaggcctggctgcgcaactacttcaagcagtatttacgccagcatatctcgccgatcctgatcaaccgcgaaacggacctcgtgcagttcctgaaagatgattacacctatctggcggtggagattatccgcggggaaaacatcaactatgctctgctggaaataccgtcggataaagtgccgcgcttcgtgaacctgccgccggaagcgccgcgtcgccgcaagccaatgatcctcctggataacatcctgcgctattgcctggacgatatttttaaaggcttctttgattacgatgcgctgaacgcctactcgatgaagatgacccgtgacgccgagtacgatctggtgcatgagatggagtcgagcctgatggagctgatgtcctccagcctcaagcagcgcctgaccgccgagccggttcgcttcgtctaccagcgcgatatgccggatgcgatggtcgaaatgctgcgcgataagctctccatttccaactatgactcaatgctgccgggcggccgctatcacaactttaaagactttatcggcttcccgaacgtcggtaaggccaatctggtcaataaacccatgccgcgcctgcgtcatctgtggtttgataaattccgcaacggcttcgacgccattcgcgaacgcgacgtgctgctctactatccctatcacacctttgagcacgtgctggagctgctgcgtcaggcctccttcgaccccagcgtattggcgatcaaaatcaacatttaccgcgtggccaaggattcgcgcattattgacgcgatgatccacgccgcccacaacggtaagaaagtcaccgtagtggtggagctgcaggcgcgcttcgatgaagaggctaacattcactgggcgaaacgcctgacggaagcgggagtccacgttatcttctctgcgccaggtctgaagatccacgccaagctgttccttatctcgcgtaaagaaggcgatgaggtggtgcgctacgcccacatcggcaccggtaactttaacgagaagacggcgcggatctacaccgactattcgctgttaaccgccgatgcgcgcattaccaatgaagtccgccgggtgtttaactttatcgagaacccctatcgtccggttagcttcgactacctgttggtgtcgccgcagaactcgcgtcgtctgctgtatgagatgatcgatcgcgagatcgccaatgcgcaaaacgggcaaccgtccgggattacgctgaagctgaacaatctggtggataaaggtctggtggaccgactgtatgccgcctccagctccggcgtgccggttaatctgctgatccgcggcatgtgctcgctgatcccgggtctggaaggtatcagcgaaaatatccgcgtcatcagtattgtggaccgtttcctcgagcacgaccgggtctactgttttgaaaacggtggcgataaacaggtctggctctcctctgccgactggatgacgcgtaacatcgattatcgcatcgaagttgccgctccgctgctcgatccgcgtctgaagcagcgggtgctggatatttttgatatcctgttcaacgatacggtaaaagcgcgctatcttgataaagaactgagtaaccgctatgtgccgcgcggcaatcgccgtaaagtgcgcgcgcaaatggcgatttacgattatctcaaatcactcgaacaacccgactaacctatgccaataaacgataacacccctcggccgcaggagttcgctgcggttgaccttggttcgaacagttttcatatggtgatcgcccgtgtcgtcgacggcgccatgcagatcatcggacgcctgaaacagcgcgtacatctggccgatggcctcgatgaaaactcggtgttgagcgaagaagccatgacccgtgggctgaactgcctgtcgctgtttgccgaacgcctgcaggggttctccccctccagcgtctgtatcgtcgggacgcatacgctgcgtcaggcgaccaacgcggcggagtttcttaaacgcgcggaaaaagtgatcccctacccaatcgagatcatctccggtaatgaagaagcacgcctgatttttatgggcgttgagcacacgcagccggagcgcggccgcaagctggtgattgatatcggcggcggctcaaccgagctggtcattggcgaagattttgagccccgcctggtggaaagccgccgcatgggctgcgtgagcttctcgcaggcctatttccctggcggcgttatcaataaagaaaacttccagcgcgcgcgcctggcggcggtgcagaagctggagacgctggcctggcagttccgtattcagggatggaccgtggcgctgggcgcctccggcaccattaaagccgcccaggaagtgctggtggcgatgggcgagaaggacggatttattacgccggagcgcctcgagatgctggtaaatgagctgttgaagcataaaaacttcgacgcgctcagtctgcccggtctctcagaagaccgtaaagcggtctttgcgcctgggctggcgatcctctgcggtgtgtttgacgcgctggccatcaaagaacttcgtctgtccgatggcgcgctgcgcgaaggtgtcctgtacgagatggaaggccgcttccgccaccaggatattcgtagccgcacggcacagagtctggcaaatcagtacaacatcgatcgcgaacaggcgcgccgggtactggaaactaccacccagatgctggagcagtggcaggagcagaatcccaagctggccaatccgcacctcgcggcgctgttgaaatgggcggtgatgctccatgaggtagggctgaatatcaaccacagcggcatgcatcgtcactcggcctacattctccaaaatagcgacctgccgggcttcaatcaggagcagcagatgctgatggccaccctcgtacgctatcatcgcaaagcgatcaagctcgacgatctgccgcgctttacgctattcaggaaaaagcagtttctgccgctaattcagctactgcgcctgggcgtactgctgaataaccagcgtcaggctaccactacgccgccgacgctgcgcctgcagacggaagctcaccactggacgctgacgtttccgcacaactggtttagccagaatgcgctggtgctgctggatctggaaaaagagcaacagtactgggaaggcgtgccggagtggatgctgaagattgctgaagaagagccagacgcctgatcgtatctctggctatcaaccgagccgggcgcttacgcccggctttttgctgctcagccggtcatctcctccgccaactgcgtcagaggtaccggtaccccgatatcatagccctgcatataatcgatccccagcgtgatgaccgcctgacgtatttccggcgactccacatattcggccaccacctgcatgttcttcatacgtgccagacgacaaatagagtccacgacctggtaatcaagactgctggcaagcagattgcgaataaaactgccgtcgattttaagaatgtcgacgttcattgtttttaaccgggcgtagctggcgtagccggtaccaaaatcatcgatcgccacccggcagcccagcgcccgcagatgttctaaagtctggcagaccagctcgggattgctgagcgcgtagttctcggtcagctcgaaaataatctgccatggctcaatgttgtaggcctgcagcagcgcttcgacctcctgaggaaactggctgcggctcagcgacaccggagaaagattgatcgccagccgcagaccgggcagcgcccgccggttggcgtccataaaggccagcgtatgctcaataacccactggtccacccgcgtggacagcccaaactcgtgcgccaccggcaagaactcgtttggccccgttagctcacccgactccccttccatcctcaccagcacttcatgatagcgatcgccgcgaatgccctggataggctgcgccatcaggacaaaatggtcatgttccagcgctttgagaatgcggttcatcatcacgactttatctttcagatcctgctgaacatggcccgcgccgcggcgctgtaaattttccggatggccgctggctaacgacatgtcggcaatggtgttcaactcgccaagcagtaaatacagatgcttgaccggcgagcgaacgctgcaatagctcatgccgatccgcggctgcagggggaccccgtcccagtggaaacggaactgtcgcagggagcggtcaattaagtgaatgcgcgcctggtgcccttcgctattgagacggaacactaaatcgtgaccggcaagatgatataccgcttcgttgggctgcagcagcgttctcaggtggttcgccagcatttgcttatactggattcgcaaaagtaccccatagtggcgccccagcagttcaagctcaggaatgcgcagaaaacagagcgtcgaccagctcgtgccgttgagcgcccggctcagcgcccgcaagttcggcatatgaaccaccgggtcgaggaaggccatctgccggacgcgagcgtagatcagccgctgctgtgtcgccagcatcgccgtataggcgacaataaacgagaataccagatagcttgatgacgtgatcgccaactgggtgttatagcttgggtaaattggtaagtaacggtaatgaaaatggatcacggcaatcagcaccggcgtccagatcagtgagataaagcgatagccaaaacgcatggcaccccagagcatcaccggcatcagcaatgacaacgtataattcgtactaaatatggtgctgctatcattaagcggcatcaataatagccacagtagcagaattaataccgtcgcccagcaaataatttcaattttttttatttttggatcaatttgtaagcgaacctgagaaataaagccgcgtaaatgaaaaggattacgaatgacccgtaacacaaaataacacagcggcatgccggtcaggcaccctaccattagcgcctgaaaggtgattaatgaacgtaaactaaatggcgtaacgccggtcatttccgttgtgcgcggatggagtccaagatattcggcaatctgtgacaaaatcagaaaaatgaccgaggggagcagcatttgccagaacagacgatgcggcatcagtcggacgttgccgtgtgagacctgctgacgctgggggacaaaaatgcggtagccgccccagcagagcacgcaggggataaggaaatggaacagtacaccgatggattgctcaagcatcatgccgtgggccagagttaacagcaggccaataataatgccagggatcgccgcccaaccaaaaaacatcatcaggctgagcaccagcgccaggggaagataatacaaaaataccatatgaccattgagcatggtgtaggtattcgcccatctggcgaccggtaataacagcgcaggcagaacgagcggtaaagcccaccacttgtcgcgatattgttgatagtattttaataaattcataggtgctctacagagtgcctctgctcccgcgaggcatattcaggcaggcatccaaccacccatgctgaccgcgtaaataataacgacacggtaacgtccgctgattttagtggccaagagaaggagactattgatataaatcaacaaatgctgacaccaacattaataaatcttatttttcccgacatttcacggctaataaagtgagcatgtaaatacgacgattatcttatataacattaattaatgttttcactgccgcacttttacatctgcatcaattgaccccatctcgttcctgtgccttaatacccccatcgcccatcttcgggtatacttcaaggatccttttgtgagtcaggcacccagtatgcgtaaacgacatcgatttaaccgtcgcatgacccgtatcgtactgcttatcagctttctcttcttctttggacgctttgtctactcctccatcggcgcctggtaccatcatcaggataaaaaagcgtcgcaggagtcatcgctcaccgtcgaaccctccccccgcgagtaatcttttgattctaatactgcaagcgccacactccgcaggcagagccgctcgctgctgaagtactgtctttgatgcggtaattttgccgtcggcgatttataagcgcacggtatgcagcaggcgcagcatttcagcgataccttttgtcacaattttgtcctgacgcatgactaccgccagctgtcggtatagccgcggcgccagcgagtgtacgcgtaatccgtcgcgatcctccacccgctccaccgccatgcggggcacgatgctgtagcccagccctgcccgcaccatgcgcttaatcgcctcgatgctccccaactgcattaccggcgtcaccgccagtcccgccgagcggaaccagcggtcaatcagatcccgcgtgccgctacccgcctcgaaggcaatgagcggctgcgcctgcagctcggcgggagtataaaccgccggcatctccgtctcgcggctggcatagatggtcacgaactcctcatctaacatcgcagtcaccgccagactgcgcccctgcacgggcagcgtgaccagcccgagatcgagccggttttcttccaccgcgcggacgatatccagcgtgttgccggtggtcacccccaccgtcagcagcgggtgctgctgacgaagatgctgcagcagcggtggaagaagatgaatgcaggccgtcgcgccagtccccagcgtcaacgatccattaacctcctgactgaatgcgctgaccgactgcaccgcgctattcaccgcccgatcgatctgctcgctgtgggccagcaatgccattcccgccgccgtcgccttgatcccacgtccggttcgctccagcagcctggtctgtaaaaactgctccagctgacgtacctgcaggctgacggcaggttgggagatccccagcgcgtcggcggcggcagaaaagctgccgcgctgtacgaccagccggaaggtcgccagatttcccaggttcagtgttgtcataaaagtttctcttataccgcgcataaggtagccgctctgccagaacaatagcctgccgggtaggctcaggacaactgtcttaacggaatgaaaaaccatggaaataaacgctattccccgacgccttgccttcaccgcgggcggtcagcaactcatcaactgggggatctctttttatatgcccggcacctttgccggggctatcgccgccgacaaaggatggtccttgccgcagatctatctcggcctgacgcttgcgatgctgatgatggccgctgtctccccgttcgttgccaggttgctggctcgctttggcggaaggctggtggtcaccagcggtaccttactgatagccgccagctgcgccatgatggcctggcgcccttcgctggccggctggtacggcgcctggctgctgaccggcatcggcatgcggctctcactgtatgatgcgctgttcgccgcagtggtgaatctgtacggtcagcaggcgcggaaaactatctctcatatcactctcgctggcggtctggcctctgccctcttctggccgctgggcgaggcgttattaaccatcatgccctggcagaatgctctgcggatctatgcgctgtttggcctgctgagcgcatggctgagttatcaactgcctcgccagcggctcagttcagcggcgaaatcaccagcctcgccagcgacagcagagggcgaccggcgtaacggggcgcgttacgcgatctttattgcgctgatcaccttcatctctaacggtacctctacccatctgccggagtttatcagccactttggtctgccggttgccgtcggtatgctgtggggattcggccagaccggcgcccggctgggggaagtgctggccggtccccgggtcacctcactcacgctaacgcgttttactgcgctcgtcatgccgctctgttttctccttggattgagcagcacgacctatgccggatgcgcagccgggtttgtgctgggctatggcgcgattaacgggctggtgacgattgtcaaagcgacgctgccgctggcgctgtttagcgcagaaagctacgccagccgcacgggtctcctgctgatccccgggcaactgatggcagctgtttcaccctttgcctacgcatggctgaaccaccggctgggcattatcggcggaatgtgggtgtccaccgggttaacgttgatcgttgccggactggcgctggcgatggtgcgcgaggcgggtaaggcgcaggatgaacgtaatgtagaatacccggcagcggccgttgaccaaccgatagccaaaaacaaccttgctgaagagtaaacgtggatcactacgcccttgataatttacgcctgcgcttatcgccatatggcaggcattattcatactataaatttttaatgaaaatacattcaccaaatcaatgatgaaatttttaagagaatagcagggcatgctgtcacctgcgaaaaataacgataccgcctgtatttttcgcttgcataatgatccaaaaaataaagccagtcgccatcggtaacattagccacacctccggtaacacaattagctttactctcttcctcatcgaaaacgttcgagcatagcaaagaatgagcgctaattttaataccgtagcaaaacccggcggcaatcgatgcaatctggcctgtcggtattgtttttatctggaaaacgaggttccgcgtccagggtatgccaccatggacgacctcacgctggaagcgtacattcacaacaccatttcatcgaccccctcgcaaaacgtcgagttttgctggcagggcggtgagcctaccttatgcgggctggatttttttgcaaaggtggtcgagctccagcagcgttaccgtggtaacaaaatcatcgccaacagcctgcaaaccaacggcatcttgctgaacgataaatgggctcgttttttgcgtcgtcatggatttctggtcggattatccattgatggccctgcgtcactccacgacacctggcgtacgacgggctgcggaaaacccacctgggaaaaagttgtgcaggccatacgctgcctgcagcagcatgacgttccggtgaatgccatggtggtggtcagtcgccagtctgcaagccaggggaaaagtctctatcgctgcctgagccgcgagctaaaccttcaccatctccagtttattcctctcgttgactcccctgctccctggtcagttacccctgagggctggggcaaatttttgtgcagtgttttcgacgactggctggaaaacgatgttggcagggtgtttatccagtactttgataatctgctcggcgtatgggccggccagcccgccacgctctgcaccatgcagcctgtctgtgggcagagtttactggtggagcaaaacggcgatgtctacagctgcgatcactttgtctcagcggaatataaactgggtaatctgaagcaagatgctatggcagcgatggcgagctcgccatttcagcaacagttcgggaagcaaaagggccaactctctgcccgctgtcagagctgccactggcgctttgcctgccatgggggatgccctaaacaccgttttaccatccatgacgacgaagcacagaattacctgtgcagcggctatttaacttttttcggccatatcacgccctatatgaacgtcatgcgaaggcttttattaaattgccagccgcccgcgctcattatgagtcttatcccggagattcggcaaaatatattacaattaacggagtctgaagatgaaagaaccaaataaaatagatggaaatcgccgcgatctcctcaaaggtctggggattgccgctgtcgtgagcctgttaccagagacgggaaacgccgcacaaaataatgccgccgcgaaagcggcatgggatattcctttcaccggcgaaatccctgacacactgcccgaaggctacaatattttactcataacctgcgatcaggaacgttatttcgagcggtatccctttccggtgccgggccgggaacgcctgatgaaaacgggtatcacttttaccaatcatcagaacacggccaacgtttgtacgccatcgcgctctgtcatgtacaccgggctccatatgccgcacacccggatgtttgataatcttggcttcccctggatgaattacgatctggacccggaattacgtaccgtgggccatatgatgcgtgaactgggttattacacggcgtataaaggtaaatggcatcttacccgggagatcgatcagccggtcgctggtaaatcggtagaagaaatggacctgggtgagatcccgacgccgcgactgcatgaaattatggaaaagtatggtttctctgattatcacggcattggcgatgtcatcgggaaaagtaagggcggctatttctttgattcagtcaccacggggcagaccattagttggctacgtaacaccggccgcccgctgaatgatgaaaataaaccctggttcgcggcagtaaacctggttaacccccacgatgtcatgtttatcgacaccgatgagcatggtgagcaggtgcagtggaaagggccaatggataaagaaaaccacaccctgctgccaacccaccccccgcacaaccaaatctatcagcaaagctggccagactatccgctgcctgcaaaccgccatcagccgctcgatgagcctggcagacctgccgcccataaagagtaccagaatgccagggcggtgatggagggacagttccccgatgaagaccggcgctggcgcaaattactggattattatttcaactgtattcgcgataatgaccagcatcttgaggcgattctcaatgaacttgataatcttcaactgacgcaaaatacgattatcgtctttaccgccgaccatggggaactcggaggctcccaccagatgcatggtaaaggttcctcggtgtacaaagagcagatccatgtgccgatgatcattcgccatccggcgtatccgggaaacatccgctgcaacagtttgactaatcatctggatttagtaccgaccctgattggtctgactggacgcgatcggtcgctgcgagagaaagtcctggagggcaggaaaggccgggatatgagcccattactggcgcatcctgagcaagcgggcttaaatgcgctgcgtccgggttcgctttattgttacggcatgatcctgtatatggatgcgcaatacacggcaaaattcagaaagctggctggagaaaaactcccgcacgatcaatttaaaaaagcgatcgcgtcactccatcctgatttttcccatcgctcagggatccgtatgatcaacgatggacactataaatttgcccgctacttttcgctcaagcagcatcatattcctgcttccctggccgagctgctggagaataatgatgttgaacttttcgatctggttaacgaccccgaagaaaatcataacctcgcccgggagccagagaaataccgggatctgttaatgacaatgaacgataaactcaatcagctcactgccgctgagattggcgaagatgatggcagctatatgcccccgtttgaaggaagccagtgggatctgacggcggcccagatgcatcaatatatgcgcgattagcgcttgccgtcaggtgggagaccttaatgtagcagctataaaaaaaccctctgtaaacacagagggtttcgttttactcagctaacgccggggattactcccactcaatcgttgctggcggcttgccgctgatgtcatacaccacgcgggagataccgttcacttcattgatgatacggttggagacgcggccgaggaaatcgtacggcaggtgtgcccagtgcgcggtcatgaagtcgatggtttccaccgcacgcagggaaaccacccagtcgtatttacggccatcgcccatcacgccgacggaacgaaccggcaggaacacagtgaacgcctggctgactttgttatacagatcagctttgtgcagctcttcgatgaagatagcgtccgcacgacgcagcaggtcgcagtactctttcttcacttcgcccagcacgcgcacgccaaggccggggcccgggaacgggtgacggtagagcatgtcgtacggcaggccaagttccaggccgatcttacgcacttcgtctttaaacagctcacgcagcggctcaaccaggcccatcttcatctctttcggcaggccgcccacgttgtggtgagatttgatgacgtgcgctttaccggtggcggaagcggcagactcgataacgtcagggtagatagtaccctgcgccagccatttgacgtcgtccagcttcagcgcttcttcgtcgaacacttccacgaaaacgcgaccgataattttacgcttcgcttccggatcgctttcacccgccagcgcgtcgaggaaacgctgctcgccttcaacgtgaacaatgttcaggccaaagtggtcgccgaacatctccatcacctgctgcgcttcgttcaggcgcagcagaccgttgtccacgaatacgcaggtcaggtttttgccgatagcgcggtgcagcagcatcgcggtcaccgaagagtccacaccgccggagaggccgaggatcactttgtcgtcgccaacctgctgacggatacgctcaacggcgtcgtcaatgattttcgccggggtccacagcgcttcgcactggcagatgtcgcgcacgaagcgctccagcatacgcatcccctgacgggtgtgggttacttccgggtggaactgcacaccgtagaagcgtttttcttcgttggccataatggcgaacgggcagttgtcggtgctggcgacggtcacgaagtccgctgggatggcggtcactttgtcgccgtggctcatccacacgtccagcagtggtttgccgtctgcggtcagggaatcttcgataccgcgcaccagcgcgctgtcgttaaccacttcaacctgtgcgtaaccaaactcacgctcgttagaaccttctacatggccgcccagctgcatcgccatggtctgcatgccgtagcagacgccaaataccggcacgccggcttcgaacacatactgcggcgcgcgcgggctgttctcttcggtggtgctttccgggccgccggaaagaatgatgccgcttggattaaattcgcggatctgtgcttccgtgacatcccatgcccacagctcacagtagacgcccagctcacgcacgcgacgcgccaccagctgagtatactgagacccgaagtcgaggatgagaatgcgatgtttatgaatgttttccgtcattgacgctaattccgaggcaagtgaaacagagtaaataaatcgcccgacgcaaggtcgggcgaagaaatcaggagcccagacggtagttcggggactctttggtgatggtcacgtcgtgaacgtggctttcctgaatgcccgcaccgctgatgcgtacgaattcagctttggtacgcagcaggtcaatggtaccacagccggtcagacccatacaggaacgcagaccgcccatctgctggtgaatgatctctttcaggcggcctttataggccacgcggccttcgataccttccggcaccagtttgtcagcagcgttatcgctctggaaatagcgatcagaggagcctttggacatcgcgccaagggagcccatcccgcggtaggatttgtaagagcgaccctgatagagttcgatttcacccggggactcttcggtacccgccagcatggagccaaccatcaccgccgccgcaccggcggcgatcgctttggcgatatcgccggagaaacggataccgccgtcagcgataaccggaataccggtcccttccagcgcttccaccgcgtcggaaacagcggtgatctgcggcacacccacgccggtgacgatacgggtagtacagatggagcccgggccgatgcccactttcaccgcgctgcagccggcttccgccagcgcgcgtgcgcctgcgccagtggcaacgttgccgccgatgatctgcaggtcaggatatttcgcgcgcgtttcacggatacgctgcagaacgccttctgagtgaccgtgcgaggagtcgatcagcagaacgtcaacgcctgccgctaccaacgcatctacgcgctcttcgttgccggcaccagcgccgaccgccgcgcctacgcgcagacggccctgctcatctttacaggcgttcggtttacgttctgctttctggaagtctttgacggtgatcatgccgcgcaggtggaagctttcatccacgaccagcgctttctcaacgcgtttttcgtgcatcttagcgaagaccacttcacggctttcgccttcacgaacggtgaccagacgctctttcggcgtcatgtagacgctgaccggctggttcagatcggtgacgaaacgcacgtcgcggccggtgatgatgccaaccagctcgttttcttcggtaaccaccgggtagccggcgaaaccgttgcgctcggtcagctctttcacttcacgcagagtggtcgtcggcagaacagtctgcgggtcggtgaccacgccggactcatgtttcttcacgcgacgaacttcttccgcctggcgctcgatggacatgtttttgtgaataaagccgatgccgccttcctgtgccagggcaatagccagacgcgcttccgttacggtatccatggctgcggagagcataggaatattcagacgaatggttttcgtcagctgagtgctgagatcggcagtattcggcagaacggtagaatgagcgggaacgaggaggacgtcgtcaaacgtcagggcttctttagcgatacgtagcatgggcaatatctcgaccagggtggataaatattgccgtggcattatacagagcgtaaccgattgcatctacccttttttgcaaataatacttgccatcccctctgagcgcgttactatcgactgaataacctgctgatttaaagtttgatcttgctcacatgttaccctctcaatcccccgcaatttttaccgtaagccgcctcaatcagacggtgcgtctgctgcttgagcgcgaaatgggccaggtttggatcaacggcgagatctctaacttcagccagccctcctccggccactggtacttcaccttaaaagacgataacgcccaggtgcgctgcgcgatgttccgcaacagcaaccgccgggtcacgttccgcccgcagcacgggcagcaggtgctggttcgcgccaacatcacgctgtatgagccgcgcggcgactaccagattatcgtcgaaagcatgcagcccgccggcgaagggttgctgcagcagaagtatgagcagctgaaagcgcagttaacggcggaaggactgttcgagcaaaaacataagcaggcgctcccctctcccgcccactgcgtcggcgtcatcacctcgaaaaccggtgccgcgctgcacgatattctccatgtcctcaggcgccgcgatcccgggctgccggtgatcatctacccaaccgcggtccagggtgacgacgcccccgggcagattgtgcgcgccatcgcgctggccaacgcgcgccaggagtgtgacgtactgattgtcggacgcggcggcggttcgctggaggatctgtggagttttaacgatgagcgggtggcgcgggctattttcgccagccagatccctatcgtcagcgccgtcggccatgaaaccgacgtcacgatcgctgattttgttgccgacctgcgggcaccgactccctcagccgccgcggaaatcgtcagccgcaaccagcaggagctgctgcgccagctgcagtccggacagcagcggctggaaatggcgatggactatttcctcgccagtcgccagcgccgttttacccagctgttccatcgcctgcagcaacagcatccacagctgcgcttggcccgccagcagaccgccctggaacgcctgcgccagcggatgcgtatcgccgtggagtcacagcttaagcgcgcagaacagcggcaaaagcgcaccgttcagcgtctgaatcactacaacccgcagccgcggatccaccgcgcgcagtcgcggatccagcagctggaataccggctggcggaaattatgcgtggccgcctcagcgagcggcgtgaacggtttggcaacgcggtgacccatctggaggcggtgagccccttagccaccctggcgcggggctacagcgtcacctcggtgagcgacggtacggtgctgaagcagacaaaacaggtcaaaaccggcgatctgctcaccacccgcctgaaagacggctgggtcgaaagcgaagtgaagcagatcgcgacggtgaaaaaaacgcgggccagaaagccttcgcccactaaaccagcggaataaattccacccgttttttcgagataaggccatgcccatgctggcaaaagtaatccaccgcgccgcacgccttcagcacctccagcggctggtggcattccgggcagcgggcctcaagggtaaacaccctttcgcactgggcgcaatgcgcgctactgcctttgacatctaacggcgcgtggcacagagggcaatcaagttccataaccattcctttcaacgtttatctgcacctattttatcatgttccgggtttaatgcgggccgcgtaattgctgctgcaacctgagcagccattccacttcctcaagcctacgctgcgttagcccggccacgctgtccggcgcccggataaacagattatcagcgccgaggatctgctcatcaagacagtgcgtatagatcgccccgggccgggtccagcgctgcacccgctcgccgtcctgtagcgtcaccacttcgccctcaggggcgcgatcgaaggtaattattcgcccgtcccgcagtcctatccgcattcccttttgcccgcccgcgggacccgcgtatttgttgagccagatattgagcgggatagtgcccagggttccctgcagatgcgcctccccctcggcagtgctcgtatccccaggagcaatgtcatggccgaggcggtctttcgccacccgaagggaaaggctcagcgccgtatcgcctccgctggcgtgcagggtttcgcggagcatcgccaggacatgggtgccgatatcgaggatcaccccatcagggtgacgcagctgccgggtatccagctccccggtggcaaaattgagtgcgaccggctcaccagcgctgttaaagccgcttggctcctgcaaataaccttcgatccagacgatatcctgcgctgacaggtgcggcggaggcaggccgctggcctccccttccgcccgccacagcgggccaggagcgttcagcgcaacgcctcgcgccatccagtggtcaagagccagcacccgcgcggcctgctcagtcggcgccagcagcgcccgcagccgggcggcctgctcaaggttggccacgatcggcttttccaccacgatgcgggaaatgccgctggctaacgccctctccagtacgggcagatgctgaagtgatgaggtggtaatgaagagcgtatccaggggttcggccagcagcgccgacagcgaactacagcgctggatccccggcagcgctctgctgcagtccaggtcatagccctggcagcggtcgatgacgtcccccaggcgacgcagcgccggtaaataggcggtttccaccaccgcgccgaggccgataaaaccaatctgcatagtaagtccacctttgagccgctctgttcccggcgaagtatcgcgggattatggcggaaggttttgacatttaccggcatggcggccacaaaaaacccgccgaagcgggtttaatgattatttgcttttcttgatgtgcttgatcaagcgcttacgtttacgcatctggttcggcgtcagggtgttacgcttgttagcgaacgggttttccccttccttgaactggatccggattggcgtgcccatcacgtccagggatttacggaagtagttcatcaggtagcgcttgtaggaatccggcagatccttgacctggttaccgtggatcaccacgataggcgggttgtagcccccggcgtgggcgtatttcagcttcacgcgacggccacgcaccagcggtggctgatgatcttccgccgccatgttcatgatccgggtcagcatcgcggtgctaacgcggcgcgtagcgctgtcgtaggcttcgcgtaccgattcaaacaggttgccgacgccgctgccgtgcaggggggagatgaagtgcacccgggcaaagtcgataaagcccagacgatagtcgagggtctccttcacctgctccttcacttcctgactcaggccatcccacttgttaacgacgatcaccagcgaacggccactgttaagaataaagcccagcagcgagaggtcctggtcggagatcccttcgcgagcatcgatcaccagcagcacgacgttggcgtcttcaatcgcctgcagcgttttgatcaccgagaacttttccactacgtcggtgattttcccgcgcttgcgcaccccagcggtatcgatgagcacgtattcgcgctcgtcacgctgcatcgggatataaatgctgtcacgggtggtgcccggcatatcgtagaccaccacgcgatcttcaccgaggatgcgattggtgagggttgatttaccgacattaggacgcccgacaatcgccagcttgatcggcagatcctgcggattgaagtcgtcttccggctcttcttccgcttcgccattctgctcggcttcgaatttcgcccagtattcggcgtcttcatccacttcttcctgcggattaacctcatcgacccatggcagcagggcctgctccagcaggctggtcacgccgcggccgtgcgaagcggcaatcggatagatatcgcccaggccgagcgaccagaagtccgccatcgcctggtcgacgtcgatgccgtcggttttgttagccaccaggaaggtgggcttttcacgagagcgcaggtgtttagcgatcgcgatgtccgccggcatcaggcccgcacgcgcatcgaccataaacagcaccacatcggcctcttcgattgccagcagcgactgctccgccatccgggtttccacgccctcttccgtaccatcaataccaccggcatcgatacagatgaattcgcggccttcgacttcggcccgaccgtacttacggtcacgagtcagccccgggaaatccgcaaccagcgcatcacgagtgcgcgtcaggcggttaaagagcgtggattttccaacgttagggcgcccgacaagcgcgaccacaggtatcatgttaaatgcctcatacaatcactaagcaacatcgtcttaacgacgtttttaaaaaagtcaaaacggcccctgtctgccaggggccgtttcttaatcactcacgacagcggtaattaacgcgtaatcgcgtacagcgtaccgtctttcgcctggatcagcagtcgaccatcggcaaccaccgggtcggtcaggaagccggagctgtccactttctgctgcgccacaaaatggccatcttccggattaacccagtgcatgtagccttcgctatcgccgacgaccagattgccattatacaacaccggcgcggtcagcaaacggtgcagcagatcgctttgcgtccacagggttacaccgccgtcggtggtcagtgccagcaggcgatcgttctggtcaaccaggtagatacggttaccatcgacgatgaaatcattcaccgaacccagctcgcgtttccacataatctggccgctacgcaggtccagcgcggtcaggttgccgttataagccagcgcataaaccacaccgttaacgatgatcggcgtcgtgtcgacgtcgttcaggcggtcaatttccgtcgggccggtggccgtagaaatacgctgctgccaaatcatctgcccctgctgcatcaatactgcactgacgcggccgttgtcgccgccgacgatcgccgcgccgtaggcggtcgcaggcgcagactcgccgcgcagggagagcgccggcatatcgaggttaacggtccacttcacggccccatcagtctcgtttagcgcctgcagctggccgttgctggtatgcaccagcaccatgccatcgctcaccaccggacgcgacagcgcctcgccggcgacacgggtttgccaggccacggtaccatcgctggtattcagcgcataaagctgcgctttctcgctgccgatataaacatggccgccagagacggtcaccccgccggaaagcagcgctggcgtgcgcgagaaccaaccatctttctccgccagattcaccgaccacacctctttgccgtcgtcggcgttcagcgctttgacggtgcctttacggtcagcagcatacactacgccgtcggcaaaggccggatgaaggttagagtaaaattcgccgataccatcgccaaccgaggtgctccaggacgtggacggcgtaaactggttttctaccgtcggcagcggtgacattttcaccacatcttcttcgctattaaacagcgaacacccgctcagcaaggtaacggaaagcagccctggcaacagtaatttacgcaattgcatcgagtccctctcagatggacaaattattcattttcatacgcatcatttcgctgagcgcaggagaagcatcgcttttcacgccagcttcccacgccgcacgggccccttgcttatcgcctttgctcaacagaatttcgccgcgcaaatcggccacaatggcggtccagccctcacctttgatgctgtcgagggttttcagcgccgcatcagcctgtttcatttgcagctgaacgcgggccagacgcatactgataaccgatttcagattatcatcagatgcggccgccagcccctgctgcagctgcttttcagcgttcggcagatcgttctgttcaacaaaatgctgtgccagctcgagagaggcgaaggcgccgtaggtatttttattgtcagccgcgaatttctctgcccctgacagcacttctggcgtattcgatttcagcgcggaagtcgccttctcgtaagccagcgacgcgtctctggcggtatcctgctgatgggaggtccagtagcgccagccaaccagcgcgccaatccctaaaatcaccccgaccgccagcgctttgccgttttcggcaaagaaacgcttcagcgcatcgacctgatcgttctcgttgttaaaagtttccacgcagtccttctcctgactaataattcccgggagattaacccagaagtgtgcgcaaatgcgcggcaacgctctcctgcgttacggtagtttgctcacctgagcgtaaatccttcactaccacgtttccgtcagcaatctctgattcaccgaccaccagcgcgacgcgcgccccccacttgtcagcgcgggcgaactgcttcttaaagttgccgccgccgtggttggtcatcagcttcacgccgggcagcgcatcgcgaacctgctcagccagacgcattgcagcagactgagtatcggtcccggaggctaccaggtatatatcgacaacaggatcggctttaaattccggattcactgcctggaccagtaaaacaagacgttccagccccatggcaaaacccacgcccggggtagcgcgaccgcccagctgctcaaccaggccgtcgtaacgaccgccggcgcagacggtgccctgggaaccaaggctggtggtcacccactcgaacacggtgcggttatagtaatcaaggccgcgcaccaggcgctggttgacggtgtagcggatcccggcatcgtcaagcaacgcgcacaggccggcaaagtgggctttcgactcttcgtcaagataatcgccgagcgccggcgcgtcgttgagcagcgcctgaacgtccgggtttttggagtccagcacccgcagcgggttggtatacatccggcgtttactgtcttcatccagtttatcggtaaactgctccaggtatgccaccagcgcgtcgcggtagttggcgcgcgcttccagcgaaccgatggagttcagctccaggctgacgtgctcggagatgcccagctcacgccaccagcgcgcggtcagcataatcagctccgcgtcgatgtccgggccctgcaggccaaacacttcggcgccgatctgatggaactggcggtagcgacctttctgcgggcgctcgtgacggaacattggcccgacgtaccacagacgctgttcttgattgtacagcagaccatgttcgatgccggcacgtacgcagcccgccgtcccttccggacgcagcgtcaggctgtcgccattgcggtcttcgaaggtatacatctctttttcaaccacgtcggtcacttcgccgatcgcgcgtttgaataacggggtctgctctacaatcggcaaacggatttcgctgtaaccgtagctaccgagcacctgcttcagtgagccttcaatgcgctgccagagagcggtttcgcccggcagataatcgttcatgccacggatggcttgaatgttctttgccacgtttattctctttatatatacaaaaatgaaccccggcgcctcgcgcccgcaggttcaatcatacacgggaagcgtatcgcttcccaacacgttattttgcttcaacctgttgaacatcaatccgacgggcttcatcgagcatcgaggctttggcgcggatccgcgcttccagctggtcgatcatgtcgttgttgtccaggcgatctttacgcacgccgtcttcatacaggccgcttttcttgttgccgccggtgacgccaagggtggagaccagcgcttcgcccgggccgttcaccacgcaaccgatgatcgaaacatccatcggggtgatgatatcttccagacgctgctccagagcattcaccgtaccgataacgtcaaactcctggcgtgaacaggtcgggcaggcgataaagttaatgccgcgggaacgaatacgcagagatttgaggatatcgaagccgaccttgatctcttccaccggatccgccgccagcgagacgcgcagcgtatcgccgatcccctcggacagcagtagtcccagaccgatcgccgattttaccgcgccgctgcgcgcgccgcccgcttcggtgatcccgagatgcagcggctgatcgatctgtttcgccagcagacgataggattccaccgccaggaagacatcggaggctttaacgctgactttaaactgatcgaagttcagacgatcgagatgatcgacatgacgcatggcggattcgagcagcgcctgcggcgtcggctcgccatatttttcctgcagatctttttccagcgagccggcgttgacgccgatgcggatcgggatgtttttatcgcgagcgcaatctacaaccatgcggatgcgctcttcgttgccgatgttgcccgggttgatacgcaggcagtcgacgccatattccgccactttcagcgcaatacggtagtcaaagtggatatcggcgaccagcgggacgttaacctgctgtttgataagtttgaacgcctcagcagcgtccatcgtcggaacagagacacggacaatgtccgcgcctacgcgctctaacgctttgatttgatttacggtcgccgccacatcggtggtgcgcgtattggtcattgactgaacggcgatgggagccccatcgccaattggcacattaccaacgtaaatacgtttagattttctacgttgaatcggagcctggttatgcatgaaaaatctcccgcgttacccgtctgttactgcgccggtgatgattcggcattgagggtcagacgcgcaacctggttagttctgataaaacgacttaaatcgacaggcttgcccagatactggatctgtaccgcggccggggcgccaattttcagcttatacggcgcctgaccgctcaggttcaggttaccgcctttacgctgcaggccgctgaacagttttttaccggtggcatcgctcacttccagccagcagtcggcggaaaagttcatcaccagatcctgcgccgacgccgccggagtcgtgacgttcgcctgatcggtcggcaacggcgaggctggggtggtagccggagctgccggcgtcgtccccgcggtatcgacattggcctgggaaggcgccacgacagcgttattatccgctggcgtctgggccggcgcgctggtggtcggtgcgctggcggtatcggttggcgcgctgttcgcggcgctatcggcggtcggggctgcaggggcgctggtatccagcggcacgttctggctgttggcgtcgccgccgttcagctctgcggaagactgatcggccatggtcgaaatctcttcctgctgcgccttatggtcttgccaccaccaggcgccgctcagaccgataaccacaaacagcaccagccaggtgaagctcatcagccagccgtcgcgctttttgcggcgcttgcctaaagagaaactctgcattggcgcgactttcgccgcgcggatgggcgcctgcttggccatcatcggcagcagctcgtcttctggaatatgtacgaggcgagcgtaggagcggatgtacccgcgcaggaaggtggaggcgaggtcggcgggggccttatcgtcttcaatatcacgaaccgtggacaccttcaggcataagcgttcggccaccgcttgctggctaagtccgagttgttcgcgggcgtgacgcagacgcgcgcccgtggtgtttgcttcttgatgatcttgagtggcttcagtattcattcgctacaactactggtacgtgaaatttaaagttcagcgcgggaaaaagccggcgccgcgagacatctgtgctacgtcagcctcacagtataggactgtcagccgcgcgatcacagagacgaatcaaaattgaatgctaagcggttgttgtgccgctacatactgcctcaaagtcgacaaaaacgcaccgtaattattaaccgaatcagcgtatttcgcctggctatcggccataaatatgacccgtgccgcctgcgctgcacgggtcatcatttgtcagaccgcttttacgtcaatcgcttcgccctgcatccgcttacgcagcgtacgcttggtacggtcaatgacgtcgcccgccagctggccgcaggcggcatcgatatcgtcgccgcgcgttttacgcacgatggtcgtaaagccgtactccatcaggactttggagaaacggtcgatgcggctgttggagctgcggccatacggcgcgcccgggaacgggttccatgggatcaggttgatcttgcacggcgtatctttcagcagcgccgccagctcatgggcgtgctcggtgccgtcgttgacgtgatccagcatcacgtactcgatggtcacccggccctggttggcgttggacttcgaaatatagccgcgcaccgagttgaggaacgtctcgatgttgtactttttgttgatcgggacgatttcgtcacgaatggtgtcgttcggcgcgtgcaaggagatcgccagcgcaacgtcgatcatatcgccgagtttatccagcgccggcaccacgccggaggtagacaaggttacacgacgcttggaaaggccaaagccgaaatcgtcgagcatgatttccatcgccggaacgacgttgttgaggttcagcagcggctcgcccatgcccatcattactacgttggtaatgggacgcacgccggtggtcttcaccgcgccgacgatcttcgccgcgcgccaaacctggccgataatttcggatacccgcaggttgcggttaaagccctgctgggcggtggagcagaatttgcactccagcgcgcagcctacctgggaggagacgcacagggtggcgcggtcttcttccgggatatagacggtctcgacgcgctgatcgccaacggcaatcgcccatttaatggtcccgtcggttgagcgttgctcttcaaccacttccggggcgcggatctccgccacttctttcagtttactgcgcaggactttgttgatgtcggtcatctcatcaaagtcgtcgcagcagtagtgatacatccatttcatcacctgatcggcgcggaaaggcttctcgcccatgtttttgaaaaactcgcgcatctgctgacggtttaaatccagcaggttgattttggcatctttgttcggcaccgtcagagcggcggtatcaggcgtgacaatttgttcagacataatattttccggcctcgttattacacgttatggccccaggtgggttgaaaaagaaacgccccggagagcgactgctcgtccaggggcgctatattctacaaattctggcgcatcattgccacgtttgcacaaagcaatgaaaaaaaatctgtaactgactgctcaatcctctaaggcttttcgattgtcgcaaggcggcaagcaagtgacaaattcgtcgggaacgaatttgaccagccgtaggctggcctccggtgagaggcaggagcctctcattaatccccgggagcatagataactatgtgaccggggtgaacgcgcgcagccgacccgcgacggtcgaaaagacgaggtttgtatctccaaagtatttcaggtcacagcgagacggcgagttcgcaaatccccgggagcatagataactatgtgaccggggtgcgcgaaggaagccaacaatgctgtggcgtgaaagacgcaggagattagcgagtgcgcgggcaaacctcgccttcagcaaagaagaacgcgatttcgcgggcagcggattctacagagtcggaaccgtgggtgccgttctcggtgaagctgtcagcgtagtcagcgcgcagggtacccgccagggcgtttgccggattggtggcgcccagcaggtcacggtgacgctgtaccgcattttcgccttccagaacggaaaccacgatcgggccggaggtcatgaactcaaccagaccgtcgaagaacgggcgaccttcgtgctcagcatagaaaccacgagcctgttcaacggtcaggtgcagcattttggtgccgacgattttgaaccctgcagcttcaaagcgggaaaagatgctgccaataacgttttttgccaccgcgtttggtttgatgatggaaaaagtacgttcaatagccatgattacctctaattaaatgttctgttgttgcacatacgattgtatggcctggcgcgcattataatgagcatccccgcccctgcctacggatgaaggtaacattttgttaaaataagatgagtattgaaaacacaaaccgccaacaacaaatttaccctggttattgcagggtgaagctggcggccgccgtctgacccgcttcatccatcactaccaactgccactcgccgggtttatccagcattagcgtggttcttgcgccggcggcctctaacggttcgccattaataaaccaccagcgccgcccctccccaccgctggtttgtagcggcaacatcacccgcgcctcacccgggagacgttttatcaccgccccatcacggatgccggacagcaccagcggcgcggtatcctgagtctgtaacggcgggcatgactccgatgccggacccaggcgcgcgcgccgcctttcgctggccggcagccagggatccagcggcagcggccagacttcgacctggctttcccgagcgccgggacaatccgccgccacccgttcgccgtgttcattgcgccacaccgggaagcggatcccgcgtacgctctcctgccccggcagcagcagggtcggcggctggctggcatccaaaagccagctggccaggcgacgacgacagttgctgtcgcccgccggcagatcctgcccgccaggccagcagattgtcccctggctgaccgttgccgggcgcggatcgctcggcagcccgccgcggctcatcgccgggcgggccagcagcagattattgacctggttgagcagcggtacggcgctggcgaagccaaactggcccaccaccggcgtaccgtccgggcgcccggtccagatgcctatcagatatcgcgcattgaggccgaccgcccacgcgtcgcgatagccgtagctggtgccggttttccacgccagcggcaccgcctgcggcagcgaggcatcgggaaccggttgcgcttcgccggccaaaatacgccggacgatccatgctgccccgggcgacatcagcgcgcgctcggtcaatggatcgctcggcttcaggcgcagccgcgccgccttgccatggcgggcgaaggcgctgtacgccgcgacaatatcttccagccgcgccccggcgccgccgaggattagcgacagattcggctctgcgccagcgggcagcgtcaggggcagcccggcgttgcgtaaattagccgcaaagcgttttggtccataggcttcgagcacctgcaccgccggcagattcagcgaccgaaccagcgcctcgctggcgctcaccgggccatgaaacccgctgtcgaaattaccggggcgataatcgctaaaacgccgtggcacatcctgtaatagcgatgccgggtgaatcagcccctcatccatcgccatcgcgtagataaagggtttcagcaccgaccccggcgagcgtaccgccgagaccatatcaatatggccgaagcggctgtcgtcggtgatatccgccgagcccacccagccgcgaactttcatatccgtgtggtcgacgacgaccatcgccagcgaactgcgcggcggcaggcgcgatttccagttcagcgccagatcttccagttgccgctgcagtccggcatccagagtcgtcaccaccttttcatcacgactggtcgccagcgcgcggcgtgaaaaaagcggcgccagctgcggcatctggcgcggaaacagccatactggctcctccatcgcttcctttaccgcctgctccggccagacgccctggctgaccattcgcgtaagcactttatcacgcgccgcctgggcccgctgcggccagcggtccggacgtaaacgactgggcgcctggggaagtaccgccagcagcgccgcctcgccgtagctaagcctggcaggcggcttaccgagataggcccagctggccgcgccgatcccctgcagggtgccgccaaacggcgcgcggttcaaatagagggttagaatgtcgctttttgacagatgccactccagctgcagcgctcgccacagctggcgcagcttgccgccgaaggtgcgtggatggggatcaagcaggcgtgccacctgcatggtaagcgtgctgccgcccgagataactcgcccggaagtaagatcctgccaggcggcgcgcagcaccgcgaagggattgacccccggatggcgccagaaccagcggtcttcatactggatgagcgcctgcagatagcgcggcgacacgtcggcgagcgtgaccggataacgccagacgccctgcgcgtcggcaaaccgccacagcggcgtcccgtcttccgccaccaccacacgggcaggcgtgacgtcatgcagcggcagcggccacaggcgatcggccgccagcaccgccagccacagcagaaaaataaacgccgccagccagcgccagcggcgttttacccgaggcaatacgcgcatttacggcgtcacggtgagcggaccgctggccgctcctgtcgcccgccactgcggcgcatacatcgattccacctgcggctgcgggacctgataagtgcccggcgtcaccgcccgcgccagatagaccagcgtcaccggctggccttcattgacagcgacggcggcgacgaaacggtcatcgcggaactcgatatgctgaatatccgcctgctgcatctggttaagcaggttttgcaccgcgtcgccattctcctgcaggctggcgctgctgttggccagattctggttttccagctccagaccggctggcaacagatcaaccaccagcgcgtcaggcacgttgcgtttggcggtcacctccagcttgacgagcaccagttcgccgctgcgcagtgaagacagcgatttctgctgcccttgggtatcgaaaatagtgcgttcaatccccaggacgttaccgcccggctgcggcgcgctttgcggatagccgctgctgtcgagacgcagccacagcggctgactgccggtattactcacctgcagcgccgccagccgatcgccgtcgaggttgcgggtttgcgctttgtcgccggccagcggctccgcctgcagcgaggtttgcgcctgccagctgcccggcaggtccgccagcgtacgtccggcaaggaacaaggcgttggtttcctgggtcgacagccagcgctggccataggcctcttccgacagcgtgctcaacagctgagtttgcacctccggcagcagcttattctcttccagcagcgccagcttcagggcgttatcgcgcagcgggctaccgtaatcgcccagccaacgattctcatcctggcgcggggtggcaaccgccagcttcagggcggcgtcgccgcgcggcgcatcgcccatagttttcagcgcaatgccgagctgcagcagcggcaagccggatcgcgcctggtcgtgacggctccagatttcacgcaaggcgccgagcggcgctttttgctgacgcgccagcaccagcgcggcgtatgcctgggcggcaaagcggctagcctgggcgtcgtcgctgtagcgcacggtcatcaggcccggctcctgcagatagcgcagcaggcgctcgttgcctttattaatggcgttgaccggtacgctatagccctgctcgctggcgcgcacgaggaagtccatggcgtaggcggtcagccagtactcttccggcccctctctatcccatagcgcaaagccgccgttttccagctgcatctgcagcaggcgtgaaataccgacatcgatggccgcgcggcgtttttcgtcgctgtccccgctaatgcccagcgcctttagctgcgccgcgctggtatacagggacgggaacaggccgctggcggtctgctcaaggcagccgtaaggataggctttcagctcgcggatatagcgggcgagattcaacggtggtttaccgctgagcagcagttggccctgcagcgtttgcggggcaaagccctggctctgcgccgccggcggctgccagctttcacctggctgcagcactgcgccgctgttgacggtctgtgccgggtacgccggacgcacgccgattttccactgtttttgcagcggggcgaaggtttcgcccggcaggctcaggccgctgatggtggcattaacctgaccatcgccgaagcccgccagcgcgctcactggtataaacagcgtgctgcgcgcccccggcgccagttgcaccggcggcagttgaccctcgctcaacgttaccagcccgctggcggtaaggtgaacctgcagggtttgcggtttatcggtcagattgctgagatccagcgccagacgcgtagtatcgccgctggcgaggaagcgcggagtgttcagctcggcgatgaccggggcggccaccaccactttatcttcgctgctgccgaagtcatccgccgtccacgcctgggccatcacccgcagctcgccgttaaaatcgccaatgggtaacgtcaccgtgccttcgccctgatcgttcaataccaccggctgcgcctgctgggcgacgatcgtcacgtggttaaccggcggtttgccgccgcgttttaactcgtcgccatcgccgccgaagcgcaggctggccacacgtccctgcccttcgatcacctggccgtagatgtcatagatatctgcgccgtaacgcttctggccaaagaaggcgttccacggatccggggtagcgtaatcggtgatattcagtaccccgctatccaccgccgagagcaggacattgacctgtttcggcgcctcgccctctttgacgctggctttcactttcaccgtcagcggctggttggggcgcattttgtccggggcctccagcgccagcgtcaggcgacggttttcatcgcccagcggcagatgaagcaggcccggccccctcaccccaccgcacgctcccggcgggcggcccccggg

SEQ ID NO: 161 - DNA, 50564 bp, Unknown
  source: /note="Description of Unknown: MKP2_2161_1 Mutant Bacteria sequence"
ggttatgaagtgtatctgcgggttcttttgtttgttgttaggtgtgcgggacccaccgggttctaccttaggtcgctggtcggaagcgtcggtggtgtataagagacaggagcagggcgtgaccattactttgggagtaacacactgatgttaagcgtaatcggaattggccctggctcgcaggcgatgatgaccatggaagccgtggaggccctgcaggcggcagagatcgtggtgggctacaagacctacacccacctggtaaaagcctttaccggcgacaagcaggtgatcaaaaccggcatgtgcaaagagattgagcgctgccaggcggccatcgagctggcgcaggccgggcacaacgttgcgctgatcagcagcggcgacgccggcatctacggcatggcggggctggtgctggagctggttaataagcagcagctggacattgaggtccgtctgatcccagggatgacggccagtatcgccgccgcctcgctgctcggcgcgccgctgatgcatgatttctgccatatcagccttagcgatctgctgacgccctggccggtgattgaaaaacgcatagtcgccgccggggaagcggacttcgttatctgtttctacaacccccgcagccgcggccgcgaaggacatctggcgcgcgcctttgcgctgctggcggccagtaaaagcgcagatacgccggtcggcgtagtcaaatccgccggacgcaaaaagcaggagaaatggctgaccaccctcggggagatggattttgccccagtggatatgaccagtctggtgatcgttggcaacaaagcgacttacatcgacaacggcctgatgatcaccccgcgaggctacgcgctgtgaatcacggcgacgtgctggttatcgggggcaccagcgatgcgcgggcgatctgccagcagctggacgccgccgacgtgcgctacaccctgtcggtggcgacccctaccggcgagcggctggccggcgatatccgcgggcagatacgctgcgggcgaatggagtggcagcagatggcggagtggctcagagcgcagcgcacccgctgggtgatcgatgcctctcacccctacgccgaggtggtcagccagaatattgtgcgcgcctgcgctagcgtcggggttctgctcagccgctatcaaaggccggagcagctgagcgatctgcgccatccgctacttcacgtggtcggcgatctgaacgaggcctgcgcggtggctcgtcgcttcggcgagcggatcctgctgaccaccggcagcaaagatctggcggcctggcgggcgggactggcggagaaaacgctgctcgcccgggtgctgccggtgccggaggtggttcagcactgtagcgatctggggtttggcgtcggggagatcttcgccctctgcgggccgttcagcgccgaatttaacgccgccttttatcgccagtgccgggccgatgttgtggtgacgaaagcctcgggggcggaaggaggctatcaggaaaaagtacaaccctgtcttgatgcggggatcccctgcatcgtcattacccgtccggcgccgctggtgacgggcgatgaactactgcaaagccaggccgatttcactgcgcggctgacgcgctggctgtcggcgacttgaggaagaggatatgaaaaaagcacttctggtggtgagctttggcaccagctatcacgacacccgcgaaaagaacatcgccgcctgcgagcgcgatctggccgccagctgcccggaccgcacgctgttccgcgccttcacctcggggatgattattcgcaaactgcagcagcgcgacggtattcatatcgatactccgctgcaggctctgcaaaagctggccgagcagggataccaggatgtggcgatccagtccctgcacattatcaacggcgacgagtacgagaagatcgttcgcgaagtgcagagcatgcgcccgcgctttcagcgtctgacgctgggcgcgccgctgttgagcggtcatggcgattacgtgcagctgatgcaggccctgcgccagcagatgccaacgctggcggcgacggagcgagtggtgtttatggggcacggcgccagccaccacgccttcgcggcctacgcctgtctggatcatatgatggcggtgcagggttttccggcgcgggtgggggcggtggaaagctatcccgaagtggacatcgtcattaacgaactctcccgccagggcgtgaccggcgtgcatctgatgccgctgatgctggtggccggcgatcatgccattaatgatatggcctccgacgaagacgattcgtggaaaacccgcttcaatgccgccgggatccccgccacgccgtggcttaacgggttaggggagaatccggcggtgcgggcgatgtttgtcgcccatctgcagcaggcgctgaacgacacgatggagaaagcagcatgagcggcaaactatacgccctgagcagcggcccgggggcggccgatctgatcaccgtgcgtgcggcgcggatcctcggccagctggatgtgctgtatgcgccagccggccgcaaaggcggcgacagcctggcgctctccatcgtacgcgagtacctgggcgcacacacggaggtccgctgctgccattttccgatgagcgccgacagcgcggaaaaagaggcggtgtggaacgacgttgccgcggcgctggcccaggaggtggcggcgggcaggcaggtcgggtttatcaccctcggcgacgccatgttgttcagcacctgggtctttctgctgcagcggattggctgcccggagtggctggagattgtccctggcgttacctccttcgccgccattgccgcacgggcgaaaaccccgctggccatggagcagcagtcgctggcggtgatctcctgcaccgcgccggaagcggacattgccgcggcgctgcgccagcatgacagtctggtgctgatgaaagtctacggccgcttcgcccgcattaaggcgctgctggcgcaggcggggctgctggatgcggcgctgatgatgtcagaggccaccctgccgggcgagcagtgctggcgccgtctgcgcgaggtcagcgatgaccagccgctgccctatttctcgaccatcctggttaacaaacagtgggaggaggcgtaatgaatcaggtgaaatcgctgaagcagctttcgtatggggggctggcggccgctgttctgctgatcatcgtcccgcaggaggcgttcgccatgcatatcatggagggctttttgccgccgatgtgggcgctggcgtggtggctgctgtttttaccctgcctgtggtacggcctggtgcgcctgcggcgtatcgttcaggaagagagcaatcagaaggtgctgctggccctctgcggggcgtttatttttgttctttcggcgctgaagatcccatcggtgaccggcagctgctcgcatccgaccggcgtcggtctggcggtgatcctcttcgggccgggcgtggtggcggtgctgggggcgatcgttctgctgttccaggcgctgctgctggcgcatggcggcctgaccacccttggcgccaacgggatgtcgatggcggtgatcggcccgatggtcggctatctggtgtggaagctggcctgtcgggcggggatccgtcgcgatgtcggggtctttctctgcgccatgctggcggatctgatgacctactttgtcacctccgtccagctcggggtggcctttcccgatccggcaaccggggcaggtggatcgatcgccaagtttatgggcatcttctgcctgacgcagatcccgatcgccatcgcggaaggcttgctcaccgtgatgatctacgatcagctaaccaaacggcgactgatcgccgcggagggacattaatatgaaaaagaccctgatcctgttggcgatggtggccgccctgatgatcctgccattttttattaaccacggcggcgagtttggcggctcggacggtgaagcggagagccagatccaggtggtggcgccggattatcaaccctggttccagccgctatatgaaccggcgagcggcgagattgagagtctgctgtttaccctgcagggctcgctgggcgcggcggtgattttttacattctcggatatgcgaggggcagacagcgccgtgatgaccgggtttgaccgactcagctaccagagccgctggctgcaggtggcgccagagcggaagtttctgctctggctactgctgatggcgctggcctttacgctgccggcgtggggccaggcgctgacgctggcgctgaccgccgcgctgacctgctggctgctgcgggtctcattctggcgctggtgccgctggatggccctaccctttggctttttgctggtcggcgtgctgaccattgtgttcagcgtcagccgcgacccgcagatgctgttagccagcatccgactgggcgctttctcgatagggatttccgccccggggctggccgtggccggggagaccttctggcgcagcctggcggcgatagcggcgacgctctggctggtgcttaatctgcctttcccacagctgattattttactcaagcgcggtcgcgtaccgcggctgttgacggagcagatcctgctgacctggcgcttcatttttattctgttagacgaggcgatggcgattcaccgcgcgcaaactctgcgttttggctatggtagcgtgccgcagggctatcgctcgctggcgatgctggtgggactgctgttcacccgcgtcctcctgcgctatcagcagatgagcacggcgctggatatcaaattgtaccagggtgattttcacctctaaggataagtatgcttgccacaaccgatctctggtttcgctatcaggatgagccggtacttaaagggctgacgctggatttttcccgccatgcggtgaccggcctggtgggggccaacggctgcggaaagtcgacgctgtttatgaacctgagcggcctgctgcgcccgcagcaggggggggtgctgtggcagggagaggcgctgaattacagcaagcgcggtctgctggcgctgcgccagcaggtggcgacggtgtttcaggatccggatcagcaaatcttctataccgatatcgacagcgatatcgctttcagtctgcgtaacctcggggtggcggaagaggagatcgcccgccgggtggatgaggcgttgaccctcgtcgatgcccaggggtttcgccagcagccgatccagtgcctcagccatgggcagaaaaaacgggtggcaatcgccggggcgctggtgctgcaggctcgctacctgctgcttgacgagcccaccgcgggcctcgatccacgcgggcgggcgcagatgatcgccatcatccggcgcattgtcgggcaggggcggcgggtggtgatctccagccacgatatcgatctgatctatgaggtgagcgacgccgtttacgttctgcgtcacggcgaagtactggccgcgggggatcccggcgaggtatttgcctgcgcggagacgatggacagggcgggattgacgcagccgtggctggtgaaacttcatagcgaactggggctgccgctgtgtaaaaccgaggcggagttttttcagcggatgcacaacaacgcgataggcgcgataaaggaggcgtcatgacgctggcagtgatgttgcagggcacggcttccgacgttgggaaaagcgtgctggtggcgggattgtgccgcatttttcatcaggatgggctgcgtaccgcgccgtgtaaatcacagaatatggcgctgaactccggcattacgccggatggcaaagagatgggccgggcgcagattttccaggccgaagcggccgggattgcgccggatgtccgcatgaatccgattttgctcaagcccaccagcgaccgtcaggcgcaggtggtgctgatggggcaggtggcgaccagcatggatgcggtgagctatcaccagtacaagccgcgcctgcgcgagcagatcctcgcggtctaccagagcctggccggagagtatgaggcgctggtgctggaaggcgccggcagtccggcggagattaacctgcgcgaccgcgatatcgtcaatatgggcatggccgagatggcgcaatgcccggtgatcctggtggccgatatcgaccgcggcggggtgtttgccgcgatttacggcacgctggcgctgctgcagcctcaggagcgggcgcgggtgaaaggggtgatcatcaataaattccgcggcgatgtggcgctcctgcgctccgggatagagcaaatcgaggcgttgaccggggtgccggtgctgggcgttatgccatggcttgacgtggatctcgaggatgaggacggcgtcgcgctgcaggccgggaaataccatcgcaccgaccggcgcgatatcgacatcgccgtggttcacctgccgcatatcgccaattttaccgactttaacgccctggcggcacagccagatgtccgggtgcgctatgtccgcgatccgcaggcgctggctgacgccgacctggtcattctcccgggcagtaaaaataccctcggcgatctgtgctggctgcgcgagagcggcatggcgcacgcggtcgagcaggcccggcagcgcaaggtgccgctgctggggatctgcggcggctatcagatgctgggcgaaaccattatcgatgaggtggagtctggccttggcgcccagcccgggctgggggtgctgaagaccgtgacccacttcgcccagcacaaaaccaccacccaggtgcaggcgaccctggggtctgcgctcccggattggttagccgacgcggcggggctgcgcgtcagtggctacgaaattcatatgggcgagacgcgccgcgaggcaggctgcccgccgctgctgcagctgcataaagcggggcaggcagtggacgacggggcgataagcgacgacggcctggcgttcggcacctatctccatggcctgttcgacagcgatgactttacccgggcgctgctcaacggcctgcgccagcgcaaagggctggcgccgctggacagcgccctggagtatgcccgctataaaacccggcagtttgatcggctggccgaggccatgcgcgaacatatcgccatcgataaaatttacgccatcatgcgccaacatcaggagcccctatgctgactctggttaccggcggcgcgcgcagcggcaaaagtcgccatgccgaggcgctgattgccgatgcgccgcaggtgttatatatcgccacctcgcaaatctttgacgacgagatggccgcaaggatccagcatcatcgcgacggcaggcccgcccactggcgcaccgccgagcgctggcagcagcttgatgaactgatcaccccggctatcgccccagcggaggcgattttgctggaatgcatcacccccatggtcaccaacctgctgttcgcgctcggcggcgacagcgaccccgacggctgggattacgccgccatggaacaggctattgatgacgaaattggcgtgctgattgccgcctgtcagcgctgtccggcgcacgtcgtgctggtgaccaacgaggtggggatgggcattgtgccggagaaccgcctggcgcggcattttcgcgatattgccgggcgggtcaatcagcgcctggcggccgcggcggatgcggtctggctggtggtctccggcatcggcgtcaaaatcaaataactcaatcgctggctgaccgggccagccctggcagggattctgtatgcaaaatttaaacacggttctgcgggcgatccccgcgccggacgccgactccatggcgcgggcacagcaacacatcgacggcttactcaagccccccggcagcctcgggcgtctggaggcgctggcggtgcagctggcgggaatgcccggcctgggcggccagccgcaggtggcgaaaaaggccctgctggtgatgtgcgccgaccatggagtgtgggacgaaggggtggcgatttcgccgaaggcggtcaccgccatccaggcggcaaatatgacccgcggcaccaccggcgtctgcgtgctcgccgcccaggccggggcgaaagtgcatgtaattgatgtcggtatcgatagcgaaccgctccccggcgtggtgaatatgcgggtggcgcggggctgcggcaatattgcccgcggtccggcgatgagccgtgagcaggggcaggagctgttgctggaggtgatgcgctacacccgcgcgctggcccaggagggtgttaccctgtttggcgtcggcgaactggggatggccaataccacgccggcggcagcgatcgtcagcgtcctgaccggcagcgatgcgcaggaggtggtcgggattggcgccaatctgccgctggcgaaggttggcaacaaggtggaggtggtgcggcgggctatcgccgtcaatcagcccgacccgaatgatggcctcgacgtactgagcaaagtcggtggtttcgatctgctggggatgaccggtgtcatgctgggggcggcgtcctgtgggctgccggtggtgctggatggctttctctcctacgcggcggcgctggcggcgtgtcagatagcgccggaggtgaaaccgtatctgatcccgtcccattattcggcggagaagggggcgcgtatcgcgctggcgcacctgggtctcgaaccgtatctcaatatgggcatgcgtctgggagaaggcagcggcgcggcgctggcgatgccgatcgtcgaggcggcctgcgcgatgtaccatcgcatgggcatgctggcggcaagcaatattgtgttaccgaaggggtaagcaggagatgggggcggcaatggccgttcccgttttcggcagaggttttgccggcggcagaaacaaaaaacacccttgagggtgtttgtaatgttggttgcgggggccggatttgaaccgacgaccttcgggttatgagcccgacgagctaccaggctgctccaccccgcgtcaccgtactgcttcactttgtcaaatttgattggttgcgggggccggatttgaaccgacgaccttcgggttatgagcccgacgagctaccaggctgctccaccccgcgtcaccgtactgctttacttcatcaaattttaattggttgcgggggccggatttgaaccgacgaccttcgggttatgagcccgacgagctaccaggctgctccaccccgcgtccgtggaagcgcactatactccgctagcgagatgatgcaaccttttttcgaccaaatcgacatttttgtaagaattggcttataaaacgccatgttgtggtgtttttttacacaaatctgtgccatcgatgagatcgcgcatttcaatagctccggcgctttgttatcttcaacacgcactaaggcttcgcagcaaaagatgagacaccatgaaaggacgttgggcaaaatatgtagcgacgggggcaatgctggccatgctcgccgcctgttcctcaaaaccgaccgaccgcggtcagcaatatagcgatggcaagttcacccagccgttttcactggtaaaccagccggatgccgtcggggcaccgatcaacgccggcgacttctccgagcaggttaatcaaattcgtaacgcctcgccacgcctctataatagccagagcaacgtctacaacgcgctgcaggagtggctgcgcgccggcggcgacacccgtacgctgcgccagtttggcatcgacgcttggcagatgcagggcgtcgacaactatggcaacgtccagtttaccggctactacacgccggtggtgcaggcgcgccacacccgtcagggcgaattccagtaccccatttaccgtatgccgccgaagcgcggtaagctgccttcccgcgccagcatctatgccggcgcgctgagcgataactatgtgctggcgtacagcaactcgctgatggataacttcatcatggacgtgcagggcagcggctatatcgactttggcgatggttcgccgctcaacttctttagctatgccgggaaaaacggctggccctatcgcagcatcggcaaagtgctaatcgaccgcggggaagtgaagaaagaagatatgtcgatgcaggcgatccgcgagtggggtgagaagcacagcgaagcggaagtgcgtgagctgctggagcagaacccgtcgttcgtgttctttaaaccgcagtctttcgcgccggtgaaaggggccagcgctgtgccgctgatcggccgcgcctcggtggcctccgaccggtcgattattccgccaggaaccaccttgctggccgaggtgcctctgctggataataacggcaagtttaacggccagtacgaactgcgcctgatggtcgccctcgacgtcggcggggccatcaaaggtcagcatttcgacatctatcagggcattgggcctgacgcgggccaccgtgccggctggtataaccactacggccgcgtatgggtgctgaaaaacgccccgggcgcggggaatgtttttagcggctaactcccctggccatgcctgttgaccagggcgcccggatgacgccgtttacggcggcctccgggcgctgtcattttgttctgaggttctatgtctgttgtaatcagcgatgcctggcgccagcgttttggcggtacggcacgtttatatggtgaaaaagcgctgcaatgttttgccgacgcccacgtctgcgtggtcgggatcggcggggtcggctcctgggcggcggaagcgctggcgcggaccggcatcggggcgatcacccttatcgatatggacgatgtctgcgtcaccaacaccaatcgtcagatccacgccctcagcggcaacgtcgggctggcgaaagcggaggtgatggcggagcgtattcgtctcatcaacccggagtgtcgggtgacggtggtggatgatttcgtgaccccggaaaacgtggcggaatatcttggcgtcggctttagctatgttatcgacgctatcgatagcgtccggccgaaagcggcgcttatcgcctggtgtcgccgctacaaggtgccgctggtgactaccggcggggcgggcggtcagattgacccaacgcagatccaggtcgcggacctggcgaagaccatccaggatccgctggcggccaaactgcgcgagcggctgaaaagccagtttggggtggtgaaaaacagcaaaggtaagctcggtgtagactgcgtcttctctacggaagcgctggtctacccgcaggcggacggcagcgtctgcgcaatgaagagcacggcggaagggccgaagcggatggactgcgcttccggctttggcgcggcgacgatggtgaccgcgacctttggcttcgtcgcggtgtcgcatgccctgaagaagatgctggcgaaggcggagcggcagacgacgtaaatcccgggtcgcggcgcaggcgccttacccggtctacaggacaattccccggaggcggcgctgcgcacctgtccgggcgacaaaactgcacgagcccgtagcccgggcaaggcgcgtcaagcgccgcccccgggatgagcttaaacctcaacctcgcgggcggcggcgagcaccgcctcgctgagggcgctgaggccctggctgcgcgaggcgctgagctggccgcgcagccccagctcgtcgaacagcgccagcggatcctgcgccaggatcccggcgcgggtttttccttccacggcggttaaaagtaccgccagcagaccgcgcacaatccttccttcgctgtcgccaaagaagtgcagcctgccctcggcgtcctcctcatagcccagccagacgcggttctcacagccggcaatctcatgggcctgcgctttgcgctcgtcggtcagcgtcggcagctttttgcccaataaaatcagctgacggtatttatcctcccactggttcagcggggcgaagatctggcgcagcgtagcgtcggtaatggttgtgccgaaggggtgcagagttgtcattaatccaccagaatttccagggcgcgatccaccgcgtggaccagcgccgcaacatcgtcttgggtattgtagggggcgaaagaggcccgcagggtgccgctgacccctaaggcagccagcagcggctgggcgcagtgttgtccggcgcgcagggcaatgccggactccgccagcagcgtcaccagatcgctgtgatgaataccctcaaattcaaaggccagcaggcttgactgctggcagcggaaagagcggaagcccggccgtttcgccagttcctcttccgccaggctcgccagactgcggctccagttttccgcctggccgatatcgctctgcgccagccactccagcgcggcgctgaggccgataaccccggcgacattcggcgtaccggcctcgaggccatagggggccggctgcggcgtaaagccgtcaaagctgacctcggcgatcattttcccgccgccgagccagggcgacatcgctgccagcagctcgcttttgccgtacagggcgccgatcccggtcgggccatacagcttatggccggaaaaggcgtaaaaatcgatatccagcgcctgcacgtcagcggggaaatgcaccgccccctgggcgccatcgaccatcaccaccatcccggcggcgtgagcaaggcggatagcctgcgccaggtccgggcagccgccggtgacgttggacatctgaccgatggccagcacccggctgcgcggggtaatcagcgcgctgaggctggcgatatccggcagacggtcggtgccaagcggcagtttgaccactctggcgccggtctgcccggccaccatcagccagggcacgaggttggcatgatgctcggcttcgctaacgataatttcatcgccaggctgcaggcgcggccggacgtagctctgcgccaccatattgatggcctcggtggtccctcgcgtccagacgatatctttgccggacggggcgttaagccacgccgccacgcgatcacgggccgcctcgtagcgctcggtcagccgctgggcggcggcgaactggctgcgatggacattgccggcgctcaggcgataaaactggtcgctggcgtcgatcaccgccagcggtttgagcgctgtcgccgcgctgtcgagatagacgccggcatcggccagagccggaaactgcgcgcgaaagtgcgccgggttaaatgcgttcatggaattcctcgtatcaataccgcgatcgtcgcgcaatttgccgggcgtgacaaggtctctgcgtcctgtggaattgtccgaatgtgactccacgtcggtcaaagagggttatgctgaaaagtgttgggtttgtgttttaacctattacttaacgagttacgaatagtataaatagccgtaaggagagaagaatgaaaatgactaaggccgctgcgattatctctgcctgtatgctgactttaggcctgagcgcctgttcctctaactatgtgatgcataccaacgatgggcggaccatcgttaccgacgggaaaccgcaaaccgataatgacactggcatgatctcgtataaagacgcgtggggcaacaaacaacagatcaatcgctctgacgtgaaacaactgggtgaactggacgagtaaggcagtaaaaaggcaaaaaaaagcaccgcgcgttgcggtgctacattaaatcactatggacagacagggtaaatgtacaggaagtgaaaaggggtagctttgctaccagggtctgcaaaaacagaccaattgcaaacgcaacaacacaacatcacaaccgtaagccaaaagcttgatggaacacgcattccaaaaaaagcttctcgttccggctcaggaagtgccgccactataggtatttgctggtagaacctcaacggacaatttataatggctcagataaaaaaaactaataggttaatcattgtttcctatttgttaaattgagttaacatctaagccagaataaccatgtcgaagcgattaccacctctgaatgcattacgtgtttttgatgcagccgcacgtcatctcagcttcactcgggcagccgatgagctttttgtgacgcaggccgcagtcagccatcaaatcaagtctctcgaggattttctgggccttaagctgttccgtcggcgcaatcgttcgctgctgttaacggaagaagggcagagctattttcaggatattaaagagattttttcgcaactgacggaagcgacgcgtaaactgcaggcgcgcagcgccaaaggggcattaacggtcagtttattaccaagtttcgccattcagtggctggtgccaagactaacaagctttaactcagcttatccgggaatcgacgtcaggatccaggcggtggaccgtcaggaggataagctggcggacgatgtcgatgtggcgattttttacggccgcggcaactggccgggcctgcgtgtggaaaaattgtacgccgagtatctgctgccggtctgttccccgctcttgctcaccggcgacaaggcattgaaaacgcctgccgatctggcgcaacataccctgcttcacgatgcgtcccgccgcgactggcaaacttatacccgtcagcttggtctaagccatattaatgtgcagcaggggccgattttcagccatagcgcgatggtgctgcaggcggccattcacgggcagggcgtggcgctggccaacaacgtgatggcgcagtccgaaattgaagccggtcgtctggtgtgtccgtttaatgatgttctggtcagtaagaatgcgttttaccttgtttgccatgacagtcaggcagaactgggtaaaatagccgctttccggcagtggatcctggcgaaagcggcaagtgaacaagaaaaattccgctttcgttatgaacaataattacttgtagggtaacaacatgaccagccgttttatgctgatattcgccgcgattagcggctttatctttgtggctctgggcgcctttggcgcgcatgtcttaagtcaatcgctcggcgcggcggagatggcctggatccataccggcctggagtatcaggccttccataccctggcgatttttggtctggcggtggcgatgcagcgtcggatcagtatctggttctactggagcagcgtatttctggcgttagggaccgtgctgttcagcggcagcctctattgtctggcgctctctcatttacgtctgtgggcgttcgtgaccccggtgggcggcgtaagcttcctcgccggttgggttttaatgttaattggtgcaattcgtctgaaacgtaagggcgttgttcatgaataaggttgtcctctattgtcgccctgggtttgagaaagagtgcgcagcagaaattaccgataaggcagcccgccttgaggtgtttggttttgcccgggtcaaagaagactctggctatgtaatttttgaaggttatcagcaggacgacggcgagaagctggtgcgcgatctgccgttcagctcgctaattttcgcccgacagatgtttgtggtcggcgaactgctgcgcgacctgccgccggaggatcgcataaccccgatcgtcggcatgctgcagggcgtggtggagaagggtggcgagctgcgtgtggaagtggcggataccaacgaaagcaaagagctgatgaagttctgccgcaagtttacggtgccgttacgcgcggcgctgcgcgaggcgggcgtgctgaccaactatgaaacgccaaagcgaccggtggtgcatgtgttctttatcgcccccggctgctgctataccggctactcatacagcaacaacaactcaccgttctatatgggcattccgcggctgaagtttccgtccgacgccccgagccgttccaccctcaagctggaagaggcgttccacgtttttattccggcggacgagtgggacgagcgtctggcgaacggcatgtatgccgtcgatctcggcgcctgcccgggcggctggacctatcagctggtgaagcgcaacatgtgggtctcttcggtcgataacggcccgatggcccagagcctgatggataccggccaggtgacctggctgcgcgaagacggtttccgctatcgtccgaaccgcaacaacatctcgtggatggtctgcgatatggtggagaaaccggcgaaggtggcggcgctgatggcgcagtggctggtcaacggctggtgccgggagaccatcttcaacctcaagctgccgatgaaaaagcgctatgaagaggtgtcgcagaatctggcctatattcaggcccagctggacgagcacggcgttaacgcccagatccaggcgcgtcagctgtatcacgatcgtgaagaggtgaccgttcacgtgcgccgcctgtgggccgccgtcggcggacgtcgcgacgagcgttaatccttccccctcaggccggagacgcgtgcgcgtcctccggccttccccttaaggctgcggcgcatccgacacaatatgcgtcacgtcatccagatgaccaatcctcgcctcgccggagcggttgaacttgcttttgtcgatcagcagcagcgactgcgccgcccgcttaagcaggatcgatttgaagtcggcattgaacgcattggagtcccacagcgcgccctgcgggtcgatgccttcgcaggaaaaaataaacagatcgatctccagcgatttcagctgggaaatcagcgccgggttcacgtagcagccatatttccgctgccgagtgcagccggagcaggggagcgtgatctggtcgcgtttggccagctcctggcagatgggctggctgttggtaaagacgtgcagcgggcggtccggcagctggcgggcgagataccagcaggtggagctggcatcgagggcgatcaccatcccttcgtcaatccaggccagcgcttcgcgggcgatgtcggctttatgcgcgtaatggcttttcaggcgcatgtggaaaggatcgccgctgtcctggctgcgctggtggatcactttggcccggccgtggttacgcagcactttgccctgcgcctgcagctcgctcagatcgcggcgaatagtttccctgctgacgttgagctgttttgacaacgtttcggtggtcaggctgctgtgggtgatcaggagatcgacgatcgcctgctggcgggctgctttcatttattctcatcccatcattgattgagcgtctgcatcaggcagacgctccggcatgagattacggcgtgactcctttttttaaaaggatatttccgtacttagcgcactctcctgtgataacgatcgcaaaggctttttgcgcccggtcgtagaaggcaaagcggtcaatccgcacgatatccgggcagggggcctgcgccgatagcgcctgccgatagcgctgttccaccgtcgggtcgagcgcatcgccttcgacggcggccatcatcaccaccggcggcgcatagctgtctaattcgaacagcgggataatcgcctgcagcagatcgctgactcgcaggccatcggcgcggatcacctgcggccccatgctgtgcgccgggaaatgggcatcggaaaaaatgatttcatccccatggcccatttcggccagcactttcagcagttccggcgatatcagcggggaaatggttttgagcatctcaggcttcctctatcagttcaggttcagtttgcggccagaaatagcggtagcggtacgcgacctgcgctctggcctgttctggcgaagagaactcgcccacgccataccagccaaacatcgccgcgccggccacggtggtttcggcatcgtcgaggactttgatcggtatcccgagtcggttggccttgatctggttccatagcgcgttgcggctgccgccgcccaccagcagcagctctttcgccctgaagccgccgattttttccagggtttgcagatgctgcgccagctgatcgcttaacccctccagcgcggcgcggtaaaaatggccgcgggtggtgttgagcgtgacgccctgccagccggcgtgctggctggcgagcaggtcgcactgcatcctgacgccctgggcgccgggcgggatcgcctgcgcttcgtcaatcagcgtctgccatggggtgtcagcgctccacagcagtttgcgcacccactcgagcacgccggaggccagccactgcatccccgggttatagcggcccggctggctgtccagctcgcaggtggagccgctgtagtcacagagcagcgaggtgtcgacctgcgcgctgcgtaccatcaggatctcccaggtcccggaggaaagcaccggctcatcctgcccggcgccggcgccaaacagagcgaactgggtgtcatgcccggccgagataaccgggatcccgacggggaggcccagcagcgcagcggcctccggcagcagggcgccgatcggctggcctgcttcaaccagccgcgggaacaggcggcgcggcaggccggtcgcctgcaggatcggcgcgctgaaatcgcgctgccggagatcgagcatctggctggtgcctgccatggtgaggtcggtggtgaactccccggtcagccgatggttgatcagtgatgaaataaacagccaggcatgggcctgcgccagcagctgcgggtggttctctttcagccacaccagcttatacagggtattgaacgcaaacgcgccgacgccggctatctgctgcagctgacgcgcgggcatatactggctgatattctccatcaccgccgcggtgcgcgggcatttccagctgatgatcggatacagcagggcgccctgctcatccaccagcgcgccatcgacgccaaaggtcgtgacggtgatgccgcgcaccgtgcaggaggccagctggtcatggatctgccgacagcagtcggcaaagcgctgcataatggcctccagcgaccactggtgccagtcgcttttttccgccgcgatgtcgctggcgttcgccgttgcggcgcgggcgataattttcccttgtcgatccacggccatcgcccgcacgttcgtggcgccgcagtcgaggaccaggataacgtcttgcttcatagtgactcccgaaacaacattgccggatggcgcagcgcttatccggcctacagaccgcgcgcgtctgtaggccaggtaagcctgctcctccgggcgaaaccaacctgttaacgcttatacagcggcccgtagttctggcaggcgcggtagtcctggccctcgatatccatgccgtgcgcggcccaggcggaagggcggtagattttcgcctcttccacgttgtgcatgcagaccggaatgcgcagcatggcggcgagggtaatgaaatctgcgccaacgtggccgatggtcagcacgccgtggttggcgccccagttggccatcaccgagtacacatcgctgaacgggcccttgccggtcaggcgtggggcaaaccaggtggtgggccaggtggagttggtgcgggcgtcgagctggtcgtgcatcgctttgggcagcgccacgctccagccttcggcaatttgcagcaccggccccagacctttgatgatgttcacccgggtcatggtgaacggcacgccgccttcggtcaggaagcgggaagagaagccgccgccgcggaagtattcgtggatcgccgggcaccattcggtcgccgcgaggcaggcatccgcctcgttctgctcaatctcccagtgaggtttcatcgtcgggttgccctgcgcgtcgcgctgctggcaggagccgtccagcgccgcagagccggagttaatcaggtgaatgatgccgtgctccgcccgcccggtgagcggctgcccggtgacccgttcaacggcatccggcgaccagtaggtgcgtacgtcggcaaacacctgggcggtgccggtgagctgatggcccatcagcatggccacgccgttgaggctgtcgttttcggtagcgacgacaaacggttcgcgcaccccgttccagtcaaaagagctgttgagcagcgcttcggcggtatcgccattggggtattgatcggtccagtggcgctgaccctggaaaccggcggcgatggcgttgtagcccagcgactcctccaccagtcctttttctgcgagcttcgggttaccctgcatcatgtcgcggatgcacatcgccatcagcaggctctctttcagcaccgcgcggctctgcgtttcattgcgcttatactgctcagcgttctgatcttcgccgtagcggaagtgtttatccgcccacgccagcgccatctccagctcggtttcatcatagattttttgatcgattcgccggcgcagctccgtcatgtcgacagcctgcaccttcatgccgagccaggattcaaaaaagttgtggtcgacgatagatccggcgatgcccattgagacgccgcccagcgacagatagcttttccctttcatactggcgacagccaggccggcgcgagcgaagcgcaacagcttttcttcgacatccgctgggatcgacgtgtcatcggcatcctgcacgtcatgtccgtagatggagaacgccgggatccctttctggctatgggccgccagcgccgcggccagatagaccgcccccggacgctcggtgccgttaaagccccagatggccttcgggcgcagcggatccatgtcgatggtttcgctgccgtagcaccagcagggggtgacggtgatggtgacgccgacgttctggctgctgaatttctcttcacaggcggccgactcggccatgccggcgatgcaggtatcggcaatcacgcactccacccgggcgccgcaggcgtggcgcagtttctcgctgataagcgcggcggtggctttcgccatgttcatggtttgcgcttccagcgactcgcggacccccatgcgacgaccatcgattaccggacgaataccgatcttcggtaagctgatttttttcattacagatccctcaggttatgcggataacaggcttagttcgtcgccgcttgtgaacggaaacgggcaaaaataaagatgatggcgaagcacagcgccgggaccagttcggcggtcgggatattgccggcggcgtcgctgacaaagcccatcaccggggtaactatcccgccgccgataatggtcatgacgataaatgacgagccatatttggtgtcctggcccagatgcttaatccccagcgagaagatggtcgggtactgaatggacataaaggcgctgcacagggtcagggccagcagaccgacgtggccgccgctgaaggcggagagcaagcagagcagcatggcgataaacgcatagatagcgagcacgttgtgcggcgcgaagcggcggataagccaggtgccggtaaaacggccgataaagaagcagaccatggtggcggtcaggtagttggcggcgaaaccggccggcatgcccgggatctcttcgatagcgtagcgaatcaggtagctccagcaggcggtttgcgcgccgacgtagcagaactgggccagtaccgcccagcgccagtggcggatgcgcatcaggcgcgtcagcgaagcgaaaaaagtgctctgcgcgctgtcgctgtggtcatcgctttgcagggaggggaagcgggtgcagacgatcagcagggcgaccagcaggacaatggccacgataatcatatagggggtttgtaccgacaggaccagactgtgcttccaggcgctgagctgttccggcgtcattttatccagcacctcctgcggctgatgcgggacgttagacaaaataagactctggccaaataccacggcaataatggcgccgaatgagttaaaggtctgggccagattaaggcggaagtgaccgccgctttccggaccgaggacggtgacaaacgggttggccgcggtttccagacagccaagcccggcagcgataataaataatccaatgagaaataaggtgtaattcatcacttcggcggcaggccagaacagcgcggcgccgcaggcatataaaaacagacccgtaaggatgccggctttgtagctgaattttttcatcaacatcccggcggggatgggaataataaaatagccaaagtaaaaggccgattgaattaatccggcctggaagttagtcagggtaaaggcctgttgaaattgcggtaataaaatatcattcagattattagccacggcccacagaaaaaagagggagcacagcagagcgaaaggaataatgtagctcttactctgcccgctctccatggcgcggtaactttgcgttggtatcgttgtgtttcccatagcgtcctcatcagttcagaagcatttacaacagcattcagggcgcagtctggtgctgcagcagaccgcaaaattaagtgagctcaggtgacgcgccggtgagtgaaatgaaagtcacggcggaactcatggcttcattttcaaataaaaaccgtctgttaatatgatgatggtcacacttaacgtactgtgggccattttatgtgattattgtcactttaatttttcaaaaacgctgaccgtttgagaaaataaattcacaaaaccacaacgctaatgaccgaatgaatatatatcgtggaaaacgggcaaatgttacaaagaaataaaatgcccgcttgatgaaatattattaagaacgggcattttaatctctctcgtaatgggcgtggttgctttattcatggcggaataattgacgcggctcacaaaaaataatcatgaaaattcccctttgaatattcaggttgatgatgaagatcattattcaccctatcccacggtagccgacgatatttctgttgccctgccgttgatggatgatgagtcaccaaaagaggaacgcaatggaaagaaacagactggcccggcagattatcgatacctgcctggaaatgacccgcctggggttaaatcaggggaccgccggcaatgtcagcgtgcgctatcagggaggaatgctgatcacccctaccggtatcccatatgaaaagctgacggaagacaagatcgtctttattgatgccgacggccagcatgagcagggaaaactgccctccagcgaatggcgttttcatcaggcggcctaccagacgcgacccgatgcccaggcggtggtccacaatcacgctgtccattgtacggcggtgtcgatcctcaaccggcccatcccggccattcactatatgatcgccgcggccggcgggaattcgatcccctgcgcgccctatgccaccttcggcacccgcgaactgtctgagcatgtcgcggtggcgctgaagcaccgcaaagccacgctgctgcagcatcacggcctgatcgcctgcgaggccagcctggagaaagcgctctggctggcgcatgaagtggaggtcctggcccagctctacctcagtacgctggcgattaccgacccggtcccggtgctggatgacgaggcgatcgccatcgtgctggagaagttcaaaacctacggattacgcattgaagagtgatgccgcaacgctaacaggagagccacgatggcaaacagaatgatcctcaatgaaacggcatggtttggccggggggcgataaacgcattaaccgatgaagcggtgcggcgcggctatcgtaaagcattgatcgtcaccgacagcactctcgcccgctgcggcgtggcggcgaaagtcaccgacaaactggatgccgccgggctggcatgggatatattcagcgacgtgatccctaacccgaccatcgccgtggtccagcaggggctgcaggcctttcaacgcagcggggcggattacctgatcgccatcggcggcggttcgccgcaggatacctgtaaggcgatcggtattattcagcgtaacccggaattcgccgatgtccgtagcctcgaggggctgtcgcccacccgtcagcccagcgtgccgatcttcgcggtgccgaccaccgcgggtaccgcggcggaggtgacgattaactatgtcatcaccgatgaagaacagcggcgcaaattcgtctgtgtcgacccgcacgatattccgcaggtggcctttatcgatgccgatatgatggacgctatgccgccggcgctgaaggcggctaccggcgtggacgccctgacgcatgctatcgaagggtacctcactcgcgccgcctgggctttgaccgatgctctgcacctcaaggccatcgagatcatcgccggcgcgctgcgcggctcggttgccggcgacgccggcgcgggggaagctatggcgctcggccagtatgtggcggggatgggattttccaacgtcgggcttggcctggtgcacggcatggcgcatccgctcggcgctttttacaacacgccgcacggcgtggcgaatgccatcctgctgccgcacgtgatgcgctttaatgctgaggcgaccggggaaaaatatcgcgacatcgcccgggcgatgggcgttagggtggaagcgttaagcctgaccgccgcgcgcgaggcggcagtagaggcggtctgccagcttaaccgcgatgtcggtattcccggccatctgcgtgaggtgggcgtcaggaaagaggatattccggcgctggcccaggcggcgctggcggatgtgtgtaccggcggcaacccgcgcgaggcgagcctggcggatatcgtcgggttatatcaggcggcctggtgattgcctggcccgggtaaagcaggcagttaccctgcaccggcgcacctcttaacgatggtcagcgcgtcagccgcagctgctgcagattgccgtccagctggaggtcggtctgcaggcgggccacctcccggcaggtgaaggccatctcctgatgcgcggccagctttttgcgccacttctccgggacctcggccagacgggcgtacagcccctccaggtcctgaaactcgttcagcagctgggcggcgcttttgggtccaatgcccgccacgcccggcaccttcgagctgctgatccccgccagcccccagtaatccgctagctgctccggggtgacgccgaactcgctggcgatgaagggcgcatccagccagcgcttctgaaagtagtcgcggatgcggatggtgggcgacagcagctgacagtagcctttgtcggtggagacgatggtggcctgatggcccgcctgggccaccttcaccgccagggtggcggcgagatcgtctgcttcgctgcccggcgaggcccagcagcggatcccccgctgttcgaaggcggtccgcagcgccggcatctcggccaccagcgtctccggcatcggcgcgcgtccggctttgtactccggcaggcgctggtgacgccaaccgtgggcgcgatcctcatcgtcgaacaccgccaccgcatgggtgggctgactgtggacgatcagctgctccagggcatgcaggcaggtatcgacgcagggtgaaccctgcaccgcgtgaatgcggcggattagatttaacgcgtcgacgattaacagatgaacagccacagatacccccccttattctcagcgtctttagggtaacatcgccatcagatcgaggctatctgcgcctgaacaatcaggaagataacgcgcaaatttcgctaactgaccgccatcagcggtctgatgacgtccggcgcgggttcgccgtaccacaccgcttcgcgcaccgggaccggtttggcgataagcccgagggcgtaaaagcgatcggcgatggtctgctgggcgcggatcaccgacagatccatcggccgcgggcgatggctgcggcgggcgagggccatgctcagcgaccgggcgtcgatccccagctctgccgagagtaagcgggccgcttcgccgcgatgcgagtcgataaactgcccggtgtgggtcagctccgtcagcaggcggcgcatgatatcgccatgctgagcgaggtagtcccgtcgcgaaagataaaactgatggttgttgacccggccttcgccgctggcgaccacccgcagctcgccggtgtgttcggcgtcgctgagcagcggatcccacatcatccaggcgtcaaccgccagatagtcgctggcggtcagcggatatttcggcggggtatagaccacccgcacatcgttcagacccaggccggcgtcctcgaggatctgcagcagcagccagtggacattcgaccctttattgagggcgatgcgtttaccgcgcagatcgctgagctggcgaatgtcgctctcctgcgggacgaccatcgccacgctgcgcggcgccggcggctcccacgccacgtacatcagttcgctattgctggcctgggcaaacaccggcggcgcttctccggtggtgccgaagtcgatctcgttgcaggcgagggcgtggaggagctgcggtccggcaggaaactcactccacagcacgttgacgccgaggctggcgaaggcggtttccaggctctgacgggctttcaggatcccgaggctgccgaagcgctggtagccaatgcgcagttcgcgatcggccccggctgcgttggcgaacgcccgcggcggcgcaggcgggcggcggcggcttttgatcagcccgaggttagcgagctgggtgcgcaaggtatgccggctgatccccaacagcgcggccgcctggctctggttatcgtcgcaatgcgccatggcgtggcgaatcagggcgctggtcactcgctgccacagcggctcgccgggaagcgccagctggtggcgaataaagtcgtccagttcatgatcgctcgccgcccccggggcgtcgttgagcgtcgccaggcgcagctgggcaggactgatctcctcttctttactgagcagcaccgcgttgtgcagggtgttttccagctcgcgaatattgcccggccacgaatagtccatcagccgggccagtgattccggcgccagacgcagggttggccgcccgaggcgccgggcgtagagtgataaaaagtggtgcgccagcagcgggatatcctgccgacgctggcgcagcggcggcagcggcaccaccgcgatattcagtcgatagtagagatcctcgcgaaagcggcgctcgcggatcgcctgggccaggtcaacgtgggtggcggcaatcacccggacattcactttaatcgctttgcgtgagccgacgcgggtaatttcacgctcctgcagcactcgcagcagcttgacctgcagcggcaggcttaattcgccgatctcgtccagcagcagcgtccccccttccgcggcttcaaaccagccgggctgtccctgctgcgcgccggtgaaggcgcctttctcatggccgaacagttcggcttcggcgaggctctcggtcagcgcgccgcagttaacggccagaaacggctgctggcgacgggcgctgtgatgatggagatagcgggccaccacctccttgccggtgccggtttcgcccacgatcagcacggtcgcctccgttggcgcgagtttgtccagcaggctctggaaggccttcgacgccgggtcgatcagcgcgggagcggtggaaggggattctgggttcagcatagagggcctccgatcgttgatgctctgaacttatcctgcggcggccgcagaaaccagagggggaaggcccgcggctgttgcaaatgcgccagcggatgcgcggcggctgcgcgatttgcaacagcgcggcgcggcgaagccgttttcagggcattgattttaaaagattaattttttattcaccattggcatgattatcgctaacactcatataaccaaattaaaacatctcttcaataaatatcggatatggttatataggaaatagataatgacgcagcaagctcccgacaagatcaatgtcttctggttcttacctacccatggcgatggccgttatctgggtaccaccgagggtggacgcccggtcgatttaccttatctgcagcaggtggcgctggcagccgacagcctgggctactacggcgtgctgatccccaccggtaaaagctgtgaagattcgtggctggtggcctcggcgctggcgccgttgacccgccgtctgcgctatctggtggcggtcaggccgggcctgcagccgccaaccctggcggcgcggatggcggccaccctcgaccgtttatcggaaggtcggctgctgatcaacgtcgttaccggcggcgacccggtggaaaacaaaggcgacggtatcttcctcagccacagcgagcgctatcatgtgacccgcgaatttcttgatgtttacacccgcctgctgcgcggggaaaaagtggattatcacggcgagcatattcacgtggaaggcgctgaggtgttgttcccgccggtgcaggagaatggcccgccgctctatttcggcggctcttctgatgcggccattgatgtggcggccgagcagatcgacagctatctgacgtggggcgaacccccggaactggtggcggagaagctggcggtggtgcgcgagcgcgccgcggcccgcggacgcatcctgcagtacggcattcgtctgcacgtcattgtgcgcgaaacggaagaagaggcatgggccgccgccgaccggctgatcgcccatcttgacgacgataccattgcccaggcgcaaaagatcttcgcccgcatggactcggccggccaggcgcggatgagcgccctgcatcagggatcgcgcgataatctgcgcattgcgcccaatctgtgggccggcgtcggactggtgcgcggcggcgcgggtaccgcgctggtaggtaatccgcagcaggtagcggaacgcatccgcgaatatcaggcgctcggcatcagcaactttatcttctccggttacccacatctggaagaagcgcaccgctttgctgagctggtgatgcctctgttgccgctggaaaacggggcctcgtcgaaggcgcgtagcgtgaacaccggtccgtttggcgaaaccatcggcggcgataagcgcccggtgcgccaggtcagcgccagctgatggcccggagcgcgaccatgagacagcataccggaggagggcagcgatgagtgcagaaccgcatatcgtgattatcggcggcggctttagcggcgcggcggtggcgattgagctgctgcgcctggcgccgaacggggtgcgcgtgacgctgctggagccgcgccagtcccccggggccggggtggcctactccactgcggagccgccgcaccggattaacgttccggccgctcgcatgcagctggccggcgacgaagagggcgccttcgatcattggtaccgccatcagcctgcctttaccgtcgatgtgcaggcgctgcgcccggacggttccgtctaccctcagcgcggccagtttggtcgctatgtggcgcagcgttttgccgacgccgcggcgtccagcggcggacggcttcgccacctgcgcgatcgggcgctcgcttttcatcaggggacggtgaccaccgacggcggcctgcagcttaaggccgatctgctggtgctggcgatcagtcatccaccgccttcgctgccggcacaggccgaagcctggcgtcatcatccggcgctgattgccaacccgtggcagccaggcgcgctcgatgccatcgccccacacgcccgggtggcggtgatgggcaccggattaaccatggccgatacggtcgcgacgctggaccggctgggccaccgcggcagtatcgtcgccttttcgcgccatggcctgctgtcgcgcggcaaccttagcggcgcaggggcaacctggcctggcgactatcagcagggcagcctgcgccagcgcctgcgccagatccgcctcgacgtcgcgtatgcggcgcagcagggcctgagctggcaggtggtgctggatgcggttcgtcagcaggggcaacggatctggcaggcgctcagcgtcgccgatcgccagcgttttctgcgccatctgcgccattactgggatgtccaccgctaccgcgtggcgccgcaggtcgccgaggtgctggaggcgcgccagcgcacgggcagtctgcaggtgcaggcggccaggctactgtcgataagcggtgaaggcgaaacgctgcgtctgacgctggcgcggcgcggcggcggcgtgcagacgctgagcgtcgatcacctgatcctgaccaccggacccgcacaccgcgccctgaccgacagccagccatttttacaggacctcgcccgccgcggcctgattcgcgccgatgccctcggcatgggcctggaggtggacagccgttcccgggcagtggctgagccgcacgttgaggcgctgccggtgctggtggccggtccggccgcccgcgggcgttttggcgaactgatgggcctgccgcaggtagccgaccatgccgctgacgtggcggcgcaagcgttactcacgctcgggatcccgcaggactcccgatgtcctgcgtactgaatacctctctttcttttccctgattcattttgccgcgtgcgccccggcgacgggccgcgctatggagattgctatgtcatcacaacgtgaaattcgtcttaacgctttcgatatgaactgcgtcggccatcagtcgccgggcctgtgggcgcatccccgggatcgctcctggcagtataaagatctggagtactgggtggatctggcgcggctgctggagcgcggcaagttcgacgggctgtttatcgccgacgtgctggggatctatgacgtgctgaacggcagcggcgatgcggcgatccgccaggcgacgcaggttccggtcaacgatccgctggctctgatcaccccaatggcgctggtgacggagcatctgggcttcgggctgaccgcctcgctgtcgtttgagcatccttaccccttcgctcgtcgtctgtcgacgctcgatcatctgaccaaagggcgggtgggctggaatatcgtcacctcctatctggagagcggggcgcgcaatatcggccagcagacccagaccgaccatgacacccgctatgactatgccgatgagtatttgcaggtgatctataagttgctggagggaagctgggaggatggggcggtgctgcgcgacagagagcggaagatcttcagcgatccgcggaaaatccatcccattaaccatcagggacagttcttttccgtgccggggatccacctctgcgagccatccccgcagcgcacgccggtgctgtatcaggcgggggcgtccagccgcggcaaacagttcgccgccggccatgccgaatgcgtcttcgtcgcagcgccgtcgaaggtgctgctgaagaagacggtggcggatattcgccgccgggcagctgaggcggggcgcgatccgcacagcatcctgatcttcaacctgcagacggtaattgtcggcgacaccgaccgcgaggcacaggcgaagtggcaggaatataagcagtacgtcagctatgaaggcgcgctggcgctgctctccggctggacggggatcgatttcggccagtatcagccggatcaggtgctgaagtatctgcacaccaacgccattcagtcggcggtggaggccttttcgaccgctgatccgaaccgccagtggacggtgcaggccctggccgattgggcggggatcggcggcttcggtccgctggtggttggcagcgcgcaaaccgtggcggacgagctgcagtcctgggtcgaagagacggacgtcgatggctttaacctcgcctatgccgtcactcacgaaaccttccgcgatgtcgtcgagctgctggtgcctgagctgcaaaagcgcggcgtctttaagcaagagtaccgcgaggggaccctgcgcgaaaaactgttcggcggcggcccgcgtctggccgcgcctcacccgggcgccagctaccgccgcgatgcgcgcacggcggcatcggtagaggagaaggtgacatgatcgctattgatgacctgtataaaagttaccgcacggcggatggccggctcagcgcggtgctgaaagggctgtcgctgcaggtgcctgagcgctccatcaccgcggtggtggggccgagcggcgccggtaaatcaaccctggcgcgctgcatcagcctgctggagcaaccggacagcggcagcattcgtatcaatggccaggatctgtcagcgctgtccggcgaggcgctgcgccgggaacggcgggcgattggcaccgttttccagtcttcggcgctgttgcgccgcaggaccgcctgggagaatgtcgccctgccgctggcgtggcttggtgtggtggagcgcgatatcaaggcgcgggttggcgagctgctggagagcgtcggcctgagccacaaagcggatgcctggccggcccagctctcaggcggccagcgccagcggatcggcattgcccgcgcgctggcgctgcgcccgtccgttctgctggcggatgaagccacctccggcctcgatcctcaggccacggcctcggtgctggctctgctcaagcggctgcgtgatgagtaccagctggcgatcgtcctgattacccatgaaatggacgcggtgcgcacggcggcggatgcggtggcggagatccgcgacgggacgatcgtccagtacgggcggatcgaagatctgctggcgcgtcccgattctctgctcggccagcagctgttgccgctgacgccggcggcagctacccacagcgatctgctgctgcgtctgagctaccgctgggatgtgccggtggccaccgactggatcagccgcctgagccagcagtgggcgctgcagatcgatctccttggcggtcacgtcgaggtgattaatggtcggctggccggtcgcctgcaggccggagtgcgctttcagggcgaacgcctgtcgcccgcgcgactgcagggcctgctggcgcagctcggcataacggcggagatcctcgacagcgcgccgttgctcagggaggcggtatgaaaccgacagtcatcagtcaggataccccctggggcgaaatcccttcgctgctgctccccgcctatggcgaaacctggctgatggtggccattgtgatgctgtttgtcgtcacgctgggagggctggtgggggtggtgttgtttaatgcctcgccgcggggcttatttccgcacgcactgctgtaccggctgctgaactgggtggtcaatatgggacgttcgctgccgtttctggtgctgatggccgccattatcccgttcacttactggctgaccggcaccacgattggcatacccgccgcggtagtgccgatgatcgccgccggcgtcccgttctttggccgtctggtggagaacgcgctgcgcgagttgccggcggaggtcaccgcggtgggggtcgtctgcggcgggtcgcgctggcaaatcattgccagcgcgcagctcagtgaagccatgcccgcgctggtagcggcggtgacgctaaacctggtctcgatgatcgagtattcggctatcgccgggaccatcggcgccggcggcatcggctacctggccgtggtgtacggctatcagcgcttcgacaaccacatcatgatcgcgacgatcgttgccctgatcgccacgatccagttgattcaatttttgggtgaccgtctggtcaaccgtttacgccacacgcaggggaaccttgtatgacaacagagcaatttgagttacgtaaagcgcggcgctggccctggctggcggcgctggcggtgattatcctgctcgccatcgccttctggtggtggcggggacatacccaaagccagcaggtggtcttcggcagcacgttaaaaattcactacgagccggcgatggccggcgagcagcggatcattgagtatattaatcagcatattgcgcccgattacggtctgaaactggaggcggtgggggtgcaggatccggtccaggctgaccgcgcggtagcggaaggtcagtatgccgggacgatctatcagcatcagtggtggcttaaacaggtggtggacgctaacggctttgcgctgtcgaccacggtgccggtgttccagtgggcgtttggcatctattccgaccgctactcgtcggtacaggcgttgcccaacggcgcgaccattgtcgtgcctgacgatggcgccaatcaggggcaggccctgtggctgctccagcgcattgggttgatctcgctcgacccggcggtggagccgcgcacggcgaagctgaaaaatattgtcggtaacccgcatcagtttgtctttaaagagctggatctgctgaccatgccgcgggcgttaaattcggtggatgccgccatcggctatgtctcgcaatttgacgccgggaaagtgccgcgtgagaaaggcatattattcccgccggcgccgcgcacctttgcttcgcaattagtgattggtacaccgtatttatcgcaggaaaatatcgtcaaattaaaacaggctttttctgatccgcggatccagacgtggttaaaaaccaccgatgacccgctggtaaaagacgtattagttccagtgtccgcggaataagcgtcctgcacgacgtctattttcgttgttatttatttcacttgaggatgcgtgaaagcgcgtcctttttgtgctggtgatatttattaacttattgattatattgatttttatagaatgatttgttgtttttattctcgtcgcgcgcggtctataaccgctgatgacctgcacaaaataataaggtgaaaaaatgagtacattaccagtggataatcccggtatcgcttcggtaccggtcagtagcgtcggggatgtggcgcggctaattaattccggcaaggaacaagcgaaatatgcgcggatgattgtcttcctcgcgctggggggcgtttttctcgacgcatatgacttaaccacgctctcctacggtattgatgacgttgtacgtgaatttcagctctcaccgctgctgaccggcctggtgacttcgtccattatggtcgggactatcgtcggcaatattatcggcggctggctgaccgataaatatggtcgctattcggtttttatggccgatatgttctttttcgtgatttcggctatcgccgccgggctggcgccgaacgtctgggtgttgattggcgcccgcttcctgatgggcatcggcgttggcatcgacctgccggtagcgatgtcctatctggccgagttttcccgctttgccggcaaaggcaacaaagcggctcgcctcgcggcgtggtgcccgatgtggtacgccgcctcaaccgtctgctttctcattatcttcggcctctatttcctgctgccgcaggagcatcttgactggctgtggcgcgcctccctgctgttcggcgccgtgccggcactgctgattattgccgtccgcagtcgatttatgaatgaatccccgctgtgggcggccaaccagggcgatctgacctctgcagtgcgtattttacgcgactcctgggggatccatgcccatgaggtcccggcggcgaagcccgcgccagcgccgaaagtgagcttccgcgtgctgttcgaaaaaccctaccgcgagcggactatcgtcgccggggtgatgaatatctgtatctccttcgagtacacggcgattgcctttttcctgccgtcaattcttgcccagttcctcggggctggcgtcttcgaaactatttcggcatcgctggggctgaacgccctgtttgcttttaccggtgggctgctcggtatgcatctggcgtggaaatatccttcgcgtcatgtggcgatagccggcttcgccctgcagtttgtggcgctgattgtgctggcgctggtggggcaaccgcacgcgacggcaggtatcgtgctggctatcgcgatgctggggctgtggctgttcgccgaagggtttggcccgggggcgcagctgatgatctacccggcgctctcctatcctactgccattcgcgccaccggggtcggtttcagccgggcactctccgggatcggcagcgcgctggcgttgtttattctgccgctgctgcaggcctccctcggcacgcagatgttctgggtggtctcgcttgccgccattattcccattttcttcctgctggcggtccgtcatgaaccgacgcgagaagatatcgacgcacttcatgaataaggaactgacaatgaccctgctctccactggcaccgattatgacgcgctggcggccgccttccgcccgatattcacccgtatcgcccagggcgctgcggagcgcgaacagcagcgcattctgcccgatgagccgatccgctggctgaaagaagcgggcttcggcacgctgcgtatcccgcgcgagaagggcggctggggcgcttcgctgccgcagctcagcgcgctgctgatcgagctggcgcaagcggactctaacctgccgcaggccctgcgcgcgcactttgcctttgtggaagatcagctgaatcagccggattccgccgggcgcgaccgctggtttcgtcgcttcctcgacggtgagctggtgggcagcggctggacggagatcggcgcggttaagctgggagaggtgaacaccagagtgacgccggcagagggcggctggcgactcgacggcgagaagttttacagcaccggcgcgctgtacgccgactggatcgatgtgtttgcccggcgcagtgataccgccagcgatgtgatagccctggtcagcacccagcagaccggcgtggtgcgggaagatgactgggatggctttggccagcggttgaccggcagcgggaccacccgctttaccggcgctcgggtggaaaccgaacatgtctatgattttgcccagcgctttcgctatcagaccgccttctaccagcatgtgctgctggcgaccctcgcgggcattggcctggcggttgagcgggatgccgcgcagggcgtcaaacatcgctcccggatgtacagccacggcaacgccgccgtgccgcgcgatgacgcccaggttctgcaggtcgttgggcagatcagcagctgggcatgggcgacccgggccgcggtcctgcaggccgcggaatcgctgcagcaggcctatgtggcgcacgtcagcgacgacgaagcattgattgcccggcgtaaccagctggcggaagtggaagcggcgcaggcgcaggtgatcgccagcgactggatcccgcgggcggcgacggagctgtttaatgccctcggggcgtcggatacgcgaactcgccttgcgctggatcgccactggcgcaatgcgcggacggttgcctcgcataatccggtgatttataaggcacgtaatatcggtaactggctggtgaacggtgaagcgcccacctttatctggcagataggcaatggtgagaaaacggcggggtaagcctgtcggcgacgggaggcgcagagcttcccgtcgtcaggaaaatcaaggtttatccagcgaccaggtggcgctgcgcacgtcgactttcaccggcagcaggccgatgcgcgtaaaggtatccgccagcgcctgctgttcgttatacaccgccggggtcatgcgttcggcaccgtagggcaggcgggccagggtcttcagccagatggctttatccagtccggttgaggtcgacagcagcccggcggcctcgtcctgatggctgttcgcccacgcgctgagtttacccagctcatccaccacctgctttgctgtctccgggtaggtatctgcaaacttgcggctggcgagatagaaggtgtagtgcggcaccagcccctcggcattgcggatctgtcgggctttcgcgttggtttccacttctgcgaggaacggatcccagatcacccacgcatcaatcgccccgcgctggaaagcggcgcgggcgtccgccggcggcagatagaccggggtgatgtctttatagctgaggcccgctttttccagtgcggcaaccagcaggtagttgacgtcagaccccttgttcaaccccacgcgcttgcccttcaggtcggccacgctgtggattgccgactgttcaggcaccacaatcgcttccgttttcgggttagcgggggagtgggcaaggtagaccagatcggcttgcgccgcctgggcaaaggccggaggcgcatcgccggtcgcggccagatcgatactaccgacgttcagcccctccagcatttgcggcccggcggggaattcgacccagcgtacggcaatgccctgttttttcaggctctcatccagcgtgccgcggtacttcagcagcgcgaagatattcgccttttgatagccgatgttgacggtttccggcgctttggccagcgcggaggtagagagggcggcgaggaccagcagccaggcggggcggaatcggttggacattgtctgttctccttagcggttttgcgtaaggtaacaaacagcgcttataaccattaaataactaaaattttattgatataacaaaaagagttatgcaggacgatggcccgacacgccgatgcgtggcgggccagcaggttaatcgcaggcaacaatcttcatcgccagaccaccgcgggaggtttcccggtacttggcgttcatgtctttgccggtttcgtacatggtctcgatcactttatcgagacacacgcgcggctcgctggtccggcgcagcgccattcgcgcggcgttgaccgctttcacggcagcgatagcgttgcgttcgatgcacggcacctgcacctggccggcgaccgggtcgcaggtcaggccgaggttatgctccatagcgatctctgccgcgatgcacacctgacccgggctgccgcccagcagttccgccagaccggccgccgccattgagcaggcgacccccacttcaccctggcagccgacttcggcgccggagatggaggcgttcatcttatacagcgaaccaatcgcgctggcgaccagcatatagcgggccagggagttgctgttcaccttgcggataaacttgtcgtagtaggccagcaccgccggcacgataccgcaggcgccgttggttggcgcggtcaccacccggccgccggcggcgttctcttcgttcaccgccagggcgaacatattgatcccgtcgaccaccgccatcggatcgctgttggtggtgtcctggctcaccagcatacggcgcagcgcggcggcgcggcgcgggacgcgcagtttgcccggcaggacgccttcggtggtgatgccgcgctcgataccggcgctcatcacttcccacaccgcggcgaagtgttgctcaagggcttctttgctgtgcagcgccagttcgttctgcatcatcaggccggagagcgacagcccggtttcacggcagtgacgctgcaggtcggcggcgtttttgtaagggtaaggaacggcaaccggcgcctcggtagtctggccgaagtgctcctcatcaacgataaagccgccgccgatagagtaatacgtctggctgtagagcaccttgtcgccggccagggcggtgatacgcatgccgttctcatgcagcgacaggttgtcggcatggaaattcatgcactgatccaccgggaagtccacttcgtgcttaccgttggccagcatcaggcggccatgggtattaacatcctgaataaagcccggaatggcgtcgatgtcaacggtgtccggcaggttgccggcgagtcccatgataatcgcgatatcggtatggtggcctttaccggtcagggagagggagccgtagacgtcgacgacgactttgctcacctcggccagcaggccgcgcgcgatcaggtcgtcagtgaattgtttgcccgctttcatcggtccaacggtatgggagctggaagggccaatgccgattttaaagatatcgaatacgctgatcatatgtattcccgtgctgtcggaaagcgcgccgccgtaaagcggcgcggggggaggcgttgaatgaattagctgaacagagagtagaagatcgcggagatggcaatcaggcccataatcaccacgaagacgttgctgatatggccgctgtatttacgcatcgccgggactttctgaatcgcgtacatcggcatcaggaacaggatcatcgcgataatcgggccgccaagggtctcgatcataccgaggatgctcgggttcagggttgccacaatccaggtggtgatcagcatgaacagcgcggtcagcttgttcagtttgttgatttcaatcgatttgcctttactgcgcagggatttaatcaccatgccgttaaagccttcgcgagcgcccagatagtggccaaggaaggatttggtgatggcgatcatcgcgatgatcggtgccatccaggcaatgattggcgcgttaaagtggttcgccaggtaagacagaatcgagatgttctgctctttcgccgccgccaggtctgccggagagaggctcagaacgcagctgaagacgaagaacatcacggtcagcaccatcatgatgtgggcgcgcgcgaggatactggagcatttcttctcagcgccttcgccgtactcttcacgtttggctaccgcgaaggaagagatgatcggcgagtggttgaaggagaagaccatcaccgggatcgccagccacagggtcatcagcaggccgttgccggtaacggaagcgccgctcagggagagcgtctctagcgccgcgccgttccactgcgggatcagatacagagccagcaccatcagcgcgataacgaatgggaacaccagcacactcattgccttaacgatcatctgctcgccgaaacgcacaatggtcatcatgccgacaatcaggatcagcgacagaatggcgcgcggcggcggcgtcatatgcagctgatgcgccatgaaggtttcgacggtgttagtgatcgccacgctgtaaaccagcaggatcgggtagatagcgaagaaataaagcagggtaatcagcttacctgcgcctacgccgaagtgttcttccactacttcggtgatgtcttcgcccgggtttttcccggagagcacgaagcgggtcatgccgcggtgggcgaagaaagtcatcgggaaggccagaatcgccatgatgatcagggggatcatgccgccaacgccggcgttgatcggcaggaacaagacgcccgcgccaatcgctgtaccgtacaggcccagcatccacatggtgtcggttttacgccatccgctgcgggtttcgcccgaaacgatggtgctggtttgagtggtttccatctgtatctcctggaggaatcaacaaaatctaatgaataaatacaattgcgtaacatgaaattcgtttaattacggtttttttagaaattttctccgtaataattgggccggaaagatacatttatatggtttatgcatcagtgatcgcgatctcaaatgcaataatccactttcaatgtgcgtatttttagtccaacagcctgtttctggtgatcagccagcgatttgtggcgcgaaggctaccatttgcagcatatgagataaaagcggagcggcgtaataacgagggatttactgtaaaaaagagaactagtcgacgtttttgcgcttaaaaccattttttgcagtgataattgtcgcagtttttaccaacgcaaacgtttggctatgtagaaataattcaggtgattgattagtaacagaaaggtttttagcgcgttctggaagtcagaggaagagagcccgccgggggcaggcgtcaggcgatgccccggcgggagagtgggaaatcaggcgatgatttcgtagcaaggaatataggcggtgccgcccggaagcttcatgcggtgctgggcgacgaagccctgcagcagatcgtccatacggcgcatcatctccggatcgccgtgcagtttgtaaggaccgtactgctcaatggcctggatgcccacctctttgacgttccccgcgacaatcccggagaaggcacgacgcaggtcggcggccagcacttccaccggctgatccggggagagtttgaggttggccatgttctcgtgggtcggatcaaacggcatctgcaggtccggcgagatgcgaatcgaccagttaaagctataggcgtcatcggtctcgcgacggctctctttcaccagcggcatcgcttttttcatctgccgcgccacttccgcggggtcgtcaatgatgatccggtagtggcgacgggccgattcgcccagggtatgggtgataaactcgtccagtacgcggaagtagtcggcgctctccttcggcccggtgaggatcagcggcagcacctgcgctttgttgtcggggtgcatcagaatacccagcaggtagagcagctcttcggcagtgccgacgccgcccgggaaaataatgatcccgtgggcgatacgtacgaaggcctccagacgcttttcgatatccggcatgatgatcagttcattgaccagcgggttcggtggttccgcagcgataatggatggttcggtcatgccgataaagcggctgtctttgtagcgctgctgcgcatggccgacggcggcgcctttcatcggcgcctccattgcgccaggcccgcagccggtgcagatattcagttcccgcaggcccagctgcgtaccgacgcggcgggcgtagagatattcgttttcgttgatggagtggccgccccagcagacgatcatgttcggcgcctcgccgacgtgcagcgcgcgggcgttgcgcaggatcgagaacaccaggttagtgatatgaaccgaactttcgagatcgaggttcgggaagcgaacggtattgtggatctggccgtaaacgaacaggatatcgcgcagcacggcgaacaggttggcctgcagggagcggataatccgcccgtcaacgaaggcgtcttccggcgggttgatcagttccagcttcacgccgcgttcgcgccgcagcacgttaatctcgaaattttcgaaacgggacaggagctccttgctgttatcggtcaggctccccgaattgagcacagcaagcgagcagttgcgaaagagttggtacaggtcgctgctggcggtgcgcttaagcatatccacttccagctgcgacagcatatccattgaaccaagcgggctaacatgtgtaatcaagtgaactccttacaggacgcttatggtcttcctgtgattacaatagccctgcgaacggcgtttccacaaccttgcgcgcgcctaaacgcacgcaaattgtgaaattgtttattattgacgggcgaggcggccggtggcgggggaaaagtcgccattgctgcgccaggggttgatatccagaccgccgcgtcgcgtatagcgggcgtaaacggaaagcgattccggctggcagaaacggagaatatcgttaaagatacgttcgacgcactgctcatggaattcgttatggtggcggaacgaaaccagatagcgcaggagctgctcgcggtcgattttcgccccccgatactggatctgcaccgagccccagtccggctgatgagtgataaggcaattagacttcagcaggtggctgaccagcgtctcctccacgattttgccgctggcggcgccctgcaggtaatcggcgctgaactgatagttatcgatctcgatatcctgatcgtcgatgcaggtgccgtgcaggcgggcaatcggctggccttccagttcatccaggcggtagagcgataccttcaccttcccctgcgcgcaggcgctgagatcgcgagtcagcgtctctgcaacgtcctgccagctagcgaaacgggtctggttaaagctgttgagatagagcttaaagcttttcgactccaccagattgaggctggtatcgggcagctcgacgtggccgacagctacctgcggcagacctttgccgttcagccaggagagttcgtacagcgtccagatatcggcgccgtgaaacggcagattatcggcatgcaggcccagcgggtcgcggtttaaactgcgcggcacgccctgcagcagcgaggcgtcataggtatcgcggtaatcggttgatttaccgagcgtcaggccggccagcgcctgatgattatcgtaagaagacatgtttcaccatagtaaagcgggtacactattgctccagtgtatcctgtctaacgtgaagagagaaaccggtggaccatcagacagcagaagcgctacgcgcttttacccaacgatattgcgccgtctggcagcagcagcgccacagcctgccgcgcagtgaagagctttacggcgtcccgtcgccttgcgttgtcgacacccagggcgaggccgttttctggcagccgcagccgttttcgctggcgcaaaatatcagcgcggttgaacgcgccctcgacattgtggtacaacagccgcttcattcttattataccactcagtttgccggcgatatgtccggccggtttgccggcgaaaccttgacgctgctgcagacctggagtgaagaggagttccagcgggtgcaggaaaatttaatcgggcacctggtggtgcagaagcggttgaagctgtcgccgacgctgttcatcgccaccctcgagagtgaactggatgtgatatccgtctgtaatctcagcggcgaggtagtcaaagagaccctcggcaccgccaaacgcattacgctttctccctcacttgcgggtttcctcaaccaccttgagccagttctgtaatccagtctgccagatcgtttgtgagagatctcttacaaaacctgtaagagatcgtcatcatttaaggtaaatttaatccatacttttttatataagttgttggtattaaatcagatcttaattttttcgtccttttgagtggggactaatcttaagagattgtctcaagaagggttgtaagaaggggcagaatcagtgatcctatgtctgtcgacaggacgtcgcgaaatgaagcgaacatcaggatgatggcgcttctgcaggacccgccaggacggcgttgcagggacaggcttcaggatgaagcaaggataacgcaggatcgcgtaatggacacctccaggatggagaacgagagccgctcaggatgaacggtggatcaggaagatcgggacaaacttatggataagtcatttcgcatcggggtggtgtgaaagcaggatgcacgtgtttatggatgaacatggtcaggagacctcaggaaaagttttcaaggacgagcagggagcaccaatgtagcgggactgctgcaaaacgaaccgggagcactgtttatacagtgctccctttttttatttctcctgcggatttgctatcctgcgcccggtttttaactcatcgaggtttccccatgactcttcacgatagcgtgcgcgatcgcctgcgcgccattgaagccctgctgcgcgaaacggagcactggcaggagacggcgccggacagcagcgccttcgccagcgataagccggtttgcctggataccctggagccgctggagtggctgcagtgggtcctgatcccgcgtatgcaccagctgctggagagcggccagccgctgccgcaaaattttgccgttgcgccttattacgagatggctctggatcaggcccacccggtccgcgaatccatgctggcggaacttctgctgttagacgcgctgtttgccggtgagcaggcctgatgctggagattatctaccaggacgactggctggtggcggtcaacaaaccctcgggctggctggtgcatcgcagctggctcgatcgcgacgagaaagttgtggtgatgcagaccgtgcgcgaccagatcggtcagcacgtttttaccgctcatcgtctcgaccggcccacctccggcgtgctgctgatgggattgtcgagcgaggcgggccggctgctggcgcaacagttcgagcagcaccagatccggaagcgctaccatgcgatcgtccgcggctggctgatggaagaggcgctgctggattacccgctggtggaggagctggatagaatcgccgataagttcgcccgcgaagataaagggccgcagccagcggtaacccactaccgcggtctggcgacagtggagatgccagtggcgactgggcgctatcccacctcgcgctatgggctggtggaactggagccgaaaaccggccgcaagcaccagctgcgccgtcatctggcccacctccgtcatccgatcctcggcgacagcaagcacggcgatctgcggcaaaaccgcagtgccgcggaacatttcggctgtcaccgcttgatgctgcacgccagcgagctgtcgttaacccatccttttaccggcgagccgctgaccctgcgcgccggttttgacgacgtctggatgcgcgcgctgtcgcagtttggctggcgcgggcttctcccgctaaatgaaagggttgagtttgccgacgacagcggtcaggatgaagagaataaggtcaatccagggagataatagcatggcggaagtcggaatttttgtcggcaccatgtacggcaactcgctgctggtcgcggaagaagcggaagcgatcctcagcggactgggacacaaggctaccgtgtatgaggatccgcaggtcaacgactgggaatcctacacgggtaagtatgtgctggtggtcacctccaccaccgggcagggcgatctgccggacagcatcgtcccgctgtatgagggcatcaaagatatgtatcagcctcacctgcggtacggcattatcgcgctcggcgacagcacctatgccaacttttgcggcggcggcctgaagttcgatcagctgctgcaggagcagggcgcgaagcgcatcggcgagatgctgaagattgacgccagcgaagacccggagccggagagcgtctccaatccgtgggttgagcagtgggccaccctgctcgcataaaagcgctgccctctccctacgcagagggcgctctttcaatacgtcgcggccagatacgcggacgtcaaaatagtagcgctttccaggcgccacgcctttaggcaaacgccacaatatccttaacaatatcatggcttaagccagccagtttcaccgggtcaagtgaggtatttcacactccggccctttttgctgcgctatgcggcgccagcggcgctggcttttcatttccgtgaacttccccccattctttcaggcattcgccacaaaccacctgcaatagcggcgtaaaagctgtgtggatgcacggtgagccgcggtgtgcctcttcatatactgctccagccagtgataaatgcagtgccagatataacgacaactatcaaaacacgaccacgtcattctgattaccctacaggttgtgctgttcagaatgaacgtagctaaacgctatgattcaggagtacaacaatgagttcattaagtcaggcggcgacggcggctgaaaagcgcaccaacgcccgctactggatagtggtgatgctgtttatcgtcacctcttttaactatggcgaccgggcgacgctgtcgatcgccggttcggaaatggccagggacatcggccttgatccggtggggatggggtatgtgttctccgccttctcatgggcttatgtcatcggccagatcccgggcggctggctgctcgaccgcttcggctcgaagcgcgtctatttctggtcgatcttcatctggtcgatgtttaccctgctgcagggcttcgtcgatatcttcagcggctttggcattatcgttgcgctgtttaccctgcgcttcctcgtcggccttgccgagtcgccgtcattccccggcaacagccggatcgtcgccgcctggttcccggcgcaggagagggggacagcggtatcgatttttaactccgcccagtactttgccaccgttattttcgcgccgatcatgggctggctgacgcatgaggtgggttggtcgcatgtgttcttctttatgggcgggctggggattgtgatcagctttgtgtggctgaaagtgatccacgatccgaacaaccacccgggcgtgaaccagaaagagctggactatatcgccgaaggcggggcgctgatcaacatggatcagaagagcagcgcgcagaaagtgccgtttagcgtcaaaatggggcagatcaagcaactgatcggctcgcggatgatgatcggcatctatatcggtcagtactgcatcaacgccttaacctacttctttatcacctggttcccggtttatctggtgcaggcgcgcggcatgtcgatcctcaaagccggccttgtcgcctcgattccggcggtgtgcggctttgtcggcggggtgctgggcggggtgatctccgactggttaatgcgccgcaccggctcgctgaacattgcgcgcaaaacgccgattgtgctggggatgctgctctccatgaccatgctgatgtgtaactatgtcaacgtggagtggatggtgatcggctttatggcaatggccttcttcggcaaagggatcggcgccctcggctgggcggtgatggcggataccgcgccgaaagagattagtggtctctccggcggtctgttcaatatgttcggcaatatctccggcatcgtcaccccgatcgccatcggctatatcgtcggcaccaccggctcgttcaacggcgcgctgatctacgtcggtatccatgccctggtggcggtgctgagctatctggtgctggtgggcgatatcaaacgtatcgaactgaaacctgtagcgggacgttaatcatgactactcaatccagcccgattatcacagagatgaaggtcattccggtggccgggcacgacagcatgctgctgaacatcggcggagcgcataacgcctggtttacccgcaatatcgtggtgttaaccgataacgccggccataccggcgtcggcgaagcgcccggcggagaggtcatctaccagacgctgctggcggcgatcccgcaggtggtgggccaggaggtcgcccgactcaatcgcgtggtgcagcaggtgcacaaaggcaatcaggcggcggatttcgacaccttcggcaaaggggcgtggaccttcgaactgaaggttaacgcggtggcggcgctggaagcggcgctgctggacctgctcggccaggtgcttaatgtgccggtctgcgagctgctgggcccgggtaagcagcgtgatgccgtcaccgtgctgggctacctgttctatatcggcgatcggcagaaaaccgaccttggttatctggaccatacgccgggcgatcacgaatggtaccgcctgcgccaccagcaggcgttgagcagcgaggcggtaatgcgtctggcggaagccgcccaggatcgctacggtttcaaagactttaagctcaaaggcggcgtgctgcccggcgagcaggagattgacaccgcgcgggcgctgaaaaagcgtttcccggatgcgcgcatcaccgtcgaccctaacggcgcctggctgctggatgaggccatcgcgctgtgtaaagggctgcaggatgttctgacctacgccgaagatccgtgcggcgccgagcagggtttctccggccgggaggtgatggccgagttccgccgcgccaccgggctgccggtcgccaccaatatgatagccactaactggcgcgaaatgggccatgcggtgatgctcaacgccgtcgatatcccgctggcggacccgcacttctggacgctctccggcgcggtgcgggtggcgcagctgtgcgacgactgggggctcacctggggctgccattccaacaaccactttgatatttccctggcgatgtttacccacgtcggcgccgccgcgccgggcaaccccaccgccatcgatacccactggatctggcaggagggcgacgcgcgcctgaccaaaaatccgctgcagattattaacggcagcattgccgtgccagacgcgccgggactcggcgtggaacttgactgggagcaggtgcgcagagcccatgaggcctataaagcgctgccgggcggcgcgcgcaacgacgcaggcccgatgcagtacctgatccccggctggacattcgaccgcaaacgtcccgttttcggccgccactaattaaaaaggatgatgctatgacgactttctcttcaacgcccgttgtcaccaccatgcaggtgatcccggttgccggccatgacagcatgctgatgaacctgagcggcgcccacgccccgtacttcacccgcaatatcgtaattatcaaagataacgccggccataccggcgtcggtgaaatcccgggcggtgaaaagattcgccagaccctggaggatgccattccgctggtggtgggcaaaacgctgggcgagtataaaaacgtgctgggcgcggtgcgcaatcagtttgccgaccgcgacgccgggggccgcggcctgcagacctttgacctgcgcaccaccattcacgtggtgaccggcatcgaagcggcactgctggatctgctgggccagcaccttggggtcaacgtcgcctcgctgctaggcgactgcctcttatacacctctgccgctgccgacgagcgctcgagtgacgacctcggcgcgcgacgaaccctgaaaacaaaccaaacacacgaacgagcgcacacgagcgcgcg

SEQ ID NO: 162 - DNA, 49693 bp, Unknown
  source: /note="Description of Unknown: MKP2_2161_1 Mutant Bacteria sequence"
gtattatcgcatcgccgccaccgcctgcgacagtcacctgcaggcggtgctgagcgaggcggtggcggcggtgcaggggcgttccctgacgctgccgagcggcgcagggcatgacgccatcgccatcgccgagcgctggccatcggccatgctgtttgtgcgttgcctggggggcgtcagccatcacccggcggagtcggtcaccgccgccgacgtcgggctggctatcgacgcgttctcccgggcggtagagaaggtggctgacgcctgatcgcgccggtcaccgtgccccggctggcggctttacaccgccagctggttgaccacctcggcgacggaggtgatggcatggatgttgccgatccccgcgcccaccgagatatatccctcatcggtattcccctccagcatgcccagccgcatcccgcgcagcccgcccatcgcctgggccagctcggcttttgaggcgccggcacgatccatggccaccagtgtgtcgctcagtttgccgggcagcgcgcggtagtagtccggcagagtacggaacaggcgcagatccagaccgttggcggccacaattttcgctttcaccgagtcgggaacccggctttcgatggtgctgataaataccgaaccggcgaagacgccctccgcccccagggcatgaacggcgcgcgcgccccgggcgtcggtgatccctccggcggccatcaccggaacccgctgtaccgcgtcaacgatcagcgggacgatggtgaaggtcccgagggcggtacccggcagcgtgccgccttcgtcaaagccggtggcgacaataatatccgctccggcctgctccgcgcggcggctgttctccggcgtcgggttgatgtcacgatagataatggtgatcccggcggctttcagttcgtcgaacagcgccggttttaacgaaccgtcgccgtagccggtgtagaccaccaccttaaccccttcctctttgatcaccgggaggatcgccggcgtccagatgtcattttccgccgtcgggatcaggttgacgccaaagggtttctccgtcagctgtttggttttgcggatctcttcgcgcattttctcggcggtggcctccggggtggagacggcggttgccgccgtcagtccggcgttcgggcccagcacgccaagcccaccggcgttgccgacggccgccaccagacgagcatcggttagccaggagaggggcccctggaccaccggtttttcaatacccagaatgcgggcgacgcggttaggttgcatgctatttttccttgtatgttaataagttataaatttgttcgccccagcgatgcggcaatgagggcagtgtaggcgtctttattgttttaaaaaatgagcaaaaactttcatcactattattaaattagtaataatgtgaactgatgaagaagtgggaggcgggccatcatgcaaatgaatctgtttgaaaatattaaaatttttattgaaatcgtcgatgccggcagctttgcccaggcggcggaaaatttgcagatccaccgaccggcggtgaccaaagcactgcagcagctggagcaggagagcggggtccggctgctgcagcgcaccacccggcgtctgtatcttacgccggagggggaagagttttatcgtcgcagcaaaccgttgctctcccaggccgacgatctgctggagtcgttcgcgccggaccggccgatccgcggtcagctgcgcgttgatatgccgatcgcctttgcccggctgctggtgatcccgcatctgccggatttttatcaggcccatccggaggtggagattgtcctcagcagctccgacgtacgccgggatatgctgcgcgatggtctggattgcctgctgcgggtgggggatcttgaggatggcgactatgtggcgcgttcgctgggggaggtggcgttaaccacctgcgccagtccgggctatctggcgcgctatggggcgcccgcgacgctggaggacctgcagtcgcatctggcggtgaactgggtgaacagcagcagccgacagattatgccctggcgattccagaccccggagggcatcaggcagatcgccattcccggtaaactggtgctggacaactctgaagtctttactgctgccgggctggcggggctggggatgctgcaggggatgcgtttctttttgcaaccttatatcgacagcgggcaactggtggaagttttgccggactttccggcgccgcgtcgaccgttgtcgctgctctatccgcaccggcatctctcgcataaggttcgggtctttgccgactggctgcaggggctggtggcgaccctggactgacaatcggcgctgtcgccttgactctatcggctgagcgtttatatataaaatgtgaatgctattaatgcaacgaatcacaaagctggataacgacttaacctgtaagggaatgctgatgaaactctggaataaaacactactcgcttccgccctgtgcctgaccctgtttggctgcgacgatgcgtcgaaagttgataacaaactggataaggctaaagataatgcggagcagatgaaagatgccgcggcggataaagcgcaggcaattaaacaggatgcggataagcaaatcgatacgctgaaaagccaggctgacgccgaggccgatcgcctgaaggatcaggccagcgccatcaaggccgaggcggacaagaaggcggacgccatcgcccagcaggcgaaagcccaggccgatgcggtgaagcagaacgcaaagcaggaaagtgaccgcatagtcaaagaggcgggtcagattaaagacaacgccatcggtgacgccaatcagctctcggctgaagcggcgagcaaaaccaaagccatccaggacagtatcgcgaaggataaacagaacgccgcgccgcctgccgcacagcagtaactcgcggtgtttgtctgacccgccgcccggaaatatagggagcggagcctgatagattacccggcggcgctgcgcttgcgcgggcctacgcagggagcgggttggctgcgcaatgaccgggtatcacccttttgtaggccgggcaaggcgtcgtcgccgcccggcacatggaccgcaataacatcctgctcaggggtatcttacgataccccttttttatgcccgccgtgggttcaacggtttggcagcagggtgcctttcaggccgtgcggctccgagcgcaaatactgcgacggcacacggacctgggcgccaaggctggccgctgcgtgccacggccagtgcggatcgtagagtaccgcgcgggcgagggcgatcaggtcggcatcgccattctccagcgccgcttccgcctgctgcgggtcggtgatcagccccacgccaatcaccgggatggctacctgctggcgaatgtcgcgggcgaaaggcaactggtatcccggcccaacggtgatcgcctgctgcggcgacaaaccgccgctggagacgtgaatatagtcactgcccagcgtttccagctgctggctaaacttaatggactgctcgcagtcccagccgccttcgacccagtcggtagccgacagcctgacgcccaccgccatggtgttgcccactgcctcgcggatcgccttaaagacttccagcggatagcgcattcggttctccagcgaaccgccgtactcgtcgcggcgctggttgctgagcggcgagagaaactggtgcagcagatagccgtgggcggcgtgcagttcaatcagctcaaagcccagccgctgggcgcgcagcgcgctggcgacgaaggccgctttgatgcgcgccatatcggcatggctcagttcagcgggggcgcgatcgccatcgtgaaacgccacggcggaaggggcgacggtctgccagccaccatcgttgagcgccagctgatggcctcccagccacggggcggcgcaggatgccttgcgtccggcatgacccagctggatccccagacggatcggcgaccaggcccgaatatcttcgactacgccgcgcagggcgttttcggtttcatcatcccacagccccagatcccccggggagatacgccccgcaggctctaccgccgtggcttccagaattaacaggccggcgccggagaaagccagttggccaagatggatccggtgccaggaggtcgccttaccctcgtcggcggagtactgacacatcggggcgataacgatacggttatcaagggtgagttgaccaattcgcgtcgcgctaaaaagatgactcatgaatacctcgtaaatgttaaacgtggtcgtgcaggggacggacagttgctgtttatagcacgcctgttcacccccccagtattcggatattgcgcttaagcgctccgctattcgatataccagagacggcgccgtcggccggcggcctgctgcgacacggcgcgggccattgcgctgccaatctcggcgctggccgtcagcccctgcacaaaggggcgatcgtgcatcagccagggaagggcgccgaaggcgacccgaccgcgcactgtctccggcgcctgcagcgtgtagtcatcaccgacgtccggaatgtcgtcgccgcaggccagcagctgctggcgcagtgaagggaagggcagatcccgagttttcagcgctttttgtccgcgggcatcgataaagacatcgaattcgcagcgctgacgatgatgaacaatcagcgtccggtcaggctcccgctgcagctcataatcttcgcccagcgtcaggatccgcagaatgccggcccggtgcagggccagcagccgacgtatggactccggcggaatggcggcgtagttatcgataaatacccgggcgaggccctggcggaagcgacggctgtccgcgtcgttgaactgcggcaccacggtttcaatcgcctcatgcaggcgcagaatggcatagcgccagggcaccgtgtggtgttcgcgcttattgcgctccacctcctgcagattgcgctgcgcccactgaaaggggtcgtgggtgaggcggtcggcaaaccaggcgtcggcgatacagtcaggcgtcagctgacgaagcccgatcgcctcgctccagtcgggggcggcatattccagctctttaacgatcagctcaaaaatccgatctaacagagcgtcgctaccctccgcaatggccgcttcgagggcggcgggagtggcaatctccagcggctcccacgggatcgggcagtaaaaatcggcctccggcagcacgccgtggcgtgacatcagggtgatctccagcgcttcgctgcctggatggagggaaaaatgggtcgttttgtcgtcctcggtatggaaaacgccgtggcgggccactaccgccacggcggcatcaatcgcgcttaatgaagtcccaaggatccccacccggcagggggcaatgcgggcctccatcaggccggtccacgggctggggaagtactgtcggctggcgcgctcttcttcaggccacagatggccggtggcaatcgccaccaggtcgacgattaccgggtctgctgcactatcggtgtggatggcgatcccggtggactgaaccgcaatatccgtgacttcacaggattcacaaacgctaatcacaaagccgacgtcccgggcccgctcaacgaggtaaagaaaacggtcgcgatagtattcgccgaggataacccgcggcagaaactggcgctcatgcagggcgtgccgttcaagcccgcgcgccgccagccagttctcgctttgctgctgcagccattgcaggtaggtcaggtcgatgggggggatctcaatgctggcaatattggccagcatttgcgccgcggtattatcgtcactgtagggcatacccaccccggcctgcgcctctttttcaaacaaggtgatggccagcggctcaccgcgcttcaccagttcataaaaggtgtaaatccccgtcggccccacgccgacgatggcaattctcttcatgattctctcccttcctgtgggcagatgcggcattgatgacgcttcgcttaagcgaacctggttttaattctggtcgaaaattaccgaaccggtgaggggaacacgcaatttgaaacaaattagcatgctaataaacttgccgattgtcgtaaaaggggtgtaattaacaaaagagcaactttctatacaaacaatttacacaagcggtaaccccagctcgccctgctggacgccgcgcacactcccggcaatgccgtcgggatagggatgacaagatgcacggctggacctcacgacagcgtaatgcggcgatagccagttttttaagctggacgctcgatgctttcgactttttcctgttagtttttttactgagcgatatcgcccactcgtttcatgtcgaccttgaggaggtcaccctggcgattctgctgactctggccgtgcggcccgtcggcgcgctaattttcggcagggcggcggagaagtttggtcgcaaaccaatcctgatgctcaatattgtgttcttctcggcttttgagctgctctccgccgccgcgccgtcgttgatgctgtttttcctgctgcgggtgctgtacggcgtggcgatgggcgggatctggggcgtggcctcttcgctggcgatggagacgatccccgaccgctcgcgcggcctgatgtccggcctgttccaggcgggataccccttcggctatttgctggcggccgtcgcctatgggctgctttttgaacaactcggctggcgcgggatgtttgtcattggcgccgcgccggtgctgctgctgccgtttatctatttctgcgtcgaggagtctccggtttggcaggcggccaggcagaataaagagagtacggccctgctgccggtactgcgtagccactggaagctgtgcctgtacctggtggtgctgatggcggctttcaacttcttctctcacgggacgcaggatctttacccggtctttttgaaagttcagcacggcttcgagcctaaaacggtcagcatcatcgcggtctgctataacatcgcctcgatcattggtggagtgttcttcggttcgctgtcggagaagattggccgacgcaaagcgattatgatcgccgccctgctggcgctgccggtcattccactgtgggctttcgccagcggctcgctggcgctgggggcgggggcgttcctgatgcagtttatggtccagggggcctggggggtgatccccacctggctcaatgaactggtcccggccaacacccgggcggtgcttcccggcttcgtctaccagctgggtaatttgctggcttcggtgaatgccactctccaggcatcaatcgcccagcatcatgggcataactacggcctggcaatggccctggtggccgggacggtggcgattgtcattaccgtcctgaccttttttggtcgcgaaggccgggtgatccaatccgcaggagcgggacatcaccagccgctctccaccagccgttaacatttgtgaccgggcgtggccaggcgcccggtcgcatacattagtcacgcagacgaatagacgccgcctggcgtttctccagcgagcagatcccaatccccaccatgatgaacagcgcgctaaacagatgccaggcctgcggttgagtatgcaggaacaggatgctcaacaccccgccggagagggggatgatgtgggtgtaaatttcgccccgcgtggcgccaatggtggcgatacctttgttccagaacaaataggccagccacgatgggaaaattaccagatacgccaggccgctgaggaaaaacggctcgcgccaggctgcccagtcctgcgccgggtggcgcatcagccagaagatgacgattggcaccaggatcagggcgccgagcagcgagctgacggcgacaaagccattcgccgggatacggcggtccttcagacgtaacagcgaacagtagagcgcccagctcagcgccgaccccatcgcccacaggtcgccgacggcaaaggtgtgcagagaggcggcgtgcagcggatttccctgaaataagaggatcatcacgccgagggtgctaaaagccactccaagccagttacgccctgataccggatcgcggaaaaacagtcggttaatcaacagtaccatgctcggcgtggcggacatatagatggcggcgttgagcgcggaggtggtttgcaggccaatatagagcgtaagcgggaagctgacctggccacagagggtgagcaccaccaccgccggggcgtttgcccgcagcaggtggcgactgccggcgatttgccgtcggtagagcaggcccagcagcagcgccgtcagcgcccagcgcgcttcggtcatcaggatcggatccacgccctgcaccagcacgtgcccgacaacataattcccgccccagaacagagccgccagcgtcagtaacagataaggcatgatgattccttgtgtcgtttgtcactgtactgaatggtaatgttattgcttttataatatcaataatattttagtggtttttgttgtactcatttaaactttttaataaacaataaattgaaaatgcgtgtgaaatatacgttgccgcattatggacggtactataccgtatagtagccatgtatttcacagggataaatcatgcgtaacacagataatggggtgattggaagcgaccagaccgcggtgatggccaggctggcgctggatgagttaattgaccagcttctgcacagcaacgcgctgtcgctgaagctgacggccaacccgctggtggccgacagagcctggcatctcactgagaatacctgcatccgcgccttctccgctgacgatccacaggccaaaaagcgtgcgcaccacgcgctgttcattctttatcagtcctggcttgccgacccgctctcgccagcggctgccaatcagtttcatccgctgctttccgggatcagaaattacatcgagtctgagtggctgcgggcggaaagcaaacgcttccaccaccagagaccaatgcttaacgccggcaatatcgtcgacgaactgcgctccttatgccagcagcacccggcgtctcatcatccgctgttctatttccttgccagcgaggcctctgcggcgcaaatcgactatttcttcaaaagcgacagcgccctcaatctgcttttcttcgatctggtggcgatggggctggtgggctcgctgccggaaacccgcgctgagatggcgcaaaatctgtgggatgagataggccagggcagcaccgagatcacccacgttaatctgtataaggatttactgaagcggcggaatatcgcgttgccggacaatcattttgcccatttgtacgagtggcaggggctggccgggtataacgcctttatgctgggcggcgtaaaccgtcagcattattacaaatcgctgggggtcatggcgatgaccgagctgctcgacccgccgcagtatgaaaaactggtggcgggctgtcggcggattgggctttccgagcgcgacgtgcattactatgccgaacatatcacggtcgatatcggccatgcggacggctggctgaacaatgtgattgtgccgattggcaaaaaacatccggcggcgatggaggaggtctactttggcgccgcgctgcgtctgcaaacctgcaacgattactatgatggtctgctggcggccctgcagtcgctgggcggcagcttatcatctcacagcgtaccgccttctgagtagataagcgctttggccgcgctccaggcggtcacccctggcgggatctcccggcattcggcggactcggcctgctgggcggcgatggcgccatcgatgagcatcaccatcatcatggccacccgctcggcaggttccggttttaacacctgcaggaggatatcgcggaagaactgccagaggagcgacttaaatcgggagcattgctcccggatcgccggcgatgacgcaccatattcaaacagcgcgcgagtaaacatgcagccgtggaacgtttcgcaggtaaaccagcgatggtagtagtcgaacacggcgaacagcttttcccgtgcgctggctttatccgcggtgatctgcgccaaatcctgcataaattcgctctctttctgcttgaggatagccagaatgagcgcctctttatcggcgtaatagcggtagaaggtcattttggagatgccagcatgttcagcaatccgctcgatgctgggcgactgatatccttcgcgattaaacagcgtgctggcgtggcggagaatgtccgcttgttttggcttcatgcgttttcctgtcgaatggttcgctgtcacgattgccggtgacacggccgtcctgcgacagcggtgcattatgccggatcttgccgccagacgggcaaaaagtaaatcagccgcggtttatgcggcgtcggttccctcaataaaaacaagattgcgtagacatacacaagtcatgtccttatgtttctgaaccgacgtattattcggacctttatacacataagctgtgaatgatgtactttctacaagaagagaagagatgatgttacccctgaccacgccccggttgctgctgcgccggttcagaacggaagatctgccgtctttcagccattatcgcaatctgccggaggtggctcgctttcagagctggacccactacggcatgacagaggcgacagccttctatgaacaacagcgttcgcaggcctttgctgaggatgagagctggttccagcttgccgtagagattccggccaacggtgcgctggcgggagatgtggggatccacttcttagatcacggcagacaagccgagctggggatgaccttttcccctgcgtatcagcatcaggggtatgcccgggaagccatgcgggcggtgatggccttactctttgaacagttagcccaccaccggctgacagcggtggtagacacccgcaataccggcgcgatcaaactcctggaagggctgggctttcgtcgcgaggcgcattaccggcagaatatcttttttaaaggcgagtggggcgatgagtacctgtacgcgctgttgcgtagcgaatatcagtgaagtgacgggcgagccgtcacttctgcccggcggacgattagctatgctggcggataaagcgcgcgcgccacggttttagcacccacagcgcgagggcggcggtgacaaaatcaaggccaatcgcgcagctgaagaccacatgccagccgtgagtgtgctgatagagcagtgccgccagcggaccgccaaagattgacccgatgccctgcgaaatatacagccagccatagttgctggcggcatgctcgctgccgaacgtatcggtgagcgtcgacgggaagagcgagaagatctccccccagccaaagaacaccaccccggagagcaggacaaacagcagcggatcttcccggcacgccagccagagcatcatcgctaccccctccagcgcaaaggcgataaacatggtttgctcgcggccgaagcggtcggaaataaacccaaacagcggccgggttaagccgttggtaaagcggtctatcgttaacgccagcggcagcgccgccatgccaaacaccaccgcctggctaatgccgaaatcctcggcgaacaccgccatctgcgaagtgaccatcagcccggaagtcgacatcatcgccatcatggcgaacatcagccagaacagcggctggcgcagcatttcccgggaagtaaacgatctgctgctctgcgccaccgtttgactgacgggcagggagacagcagggggcggcagcttcagcccctgactggcgaggaagccgacgagggcgaaaaggatcccgaaagtcgtcatcgtatgttcaaggccgttagtggtcagcgacagggagatggggaaggtggttatgatggcccccatcccgtagcccgccgccaccgcgccggcggcaaatccccgctgctgtgggaaccatttgaccatcaggccgacaacgccgatgtagacgatcccggtcccgaggccgcccatgcagccataaaccagccagagcgttgccaggccattcacctgcgcggaaagcacccagctcattcccgccatcaccgtgccaatagcgatcagccgccgtgggccaaatttttccactaaccgcccctgaaaaggggaaaagaaggtctgcaggatgatcagcagcgagaaggtgacctgcaattctggcagaccgacgccaagtttggcggccaggggttttgtcaacagcgtccagacatattgcggactggagatggcggccatacagatcaggcccagcaccagctggcgccatttgccaaatttcggggtaaccaacggttcgctgagtgtcgtcatgttgttctccgttttcagtaagcaggcttccgtgaaacgcatccaccctggatgcctcacagaaaggggaaggttgcgaccgcagactggcgacctgttgtggccatatggcatacgttcttgtccacattgcggtatacaagcgaagagcattaaacgtgccatataaaataattttttatattcaagtagttaatgtaatgagggcatgtctgacggggggcggcatgatgaatgtgcggcaccagggcggtgcaaatgaattatcgcggtgcgctttgcctgctaactggcgtaggagacatcgtatatcctggactggcgctagacggacttcagtgcaaagccgcccaggcgggtcgaggctacgaaatcaccgcctggggcggctggcaagataaacgggaaatgaggctggcggtctacccgcttagtagcgaaaaaacgctactgtcccgactattttttgctttatgagctgggcatttattgtatggactctcgcagagagacattcttcctggtagaaagcctggctactacacacgggaagccttaccgccccatattaagctcatgccgcggtactggcccggactttgagcactgacggaatttcaatgaacttttcaccaggcttatcgttaagcagttcgagaagagctttaccggctttcaccccaatgtcatgccagggaaactcaacggttgtcagggcaggggaacagactgtcgataacactcctccgcctaaactcgcaatggctacggtattgggcaccttaatgccggcactgtggcaggccatcatacatccacaggccatttcatccgacgtgcaaattaacgcatccagatcgccccaggtaatcatcatatccttgaatatattgacgcctgtggcgatggtggatggcaaatgcgtggttaccacccggtgcggggagcggttcagagcgagcatcgccgtattccatccgctcagcaactggcgaaacattgtgttattagccggggtacagagcagtgcgatgttttttaatgaggcgtcggccagatgagtcacgatctgttttacggccttaccgtaatccacgccgatgcacatacccacagggtgggtatttagcgcgccaatttccagaataggaacatccacgttggccagcaactgggtgcagctctcaatggtatcgatattgaactgaataatggccgccgggttataggcgagcattttttcaaacgtcttttgttcactttgaccgtcatgcccggattccataaacatcatggtatatccgcgttcggtcagcactttttgcagcgcttcagagaccggcaaaaaacccggcgaagagaaggtgggaacgacggcgagaataagatcggaatggaccgacgccagattacgtgcctgcagattagggacatagccgagttgactgacggccgcatcgatgcgatcgcgaagctcaggattcactttttcaggcattctcagcgctcgcgagacggtcatggcgctcacaccgacaaactcagccacctcggttagggttatcttacccgttcctttacgtcgtttttctttcgggctaccgtccgcgtctaaactcttcaccaaaatcaccaaccgtttgaaaaataaaatataacgaaagtatatctgcgaatcgcattataacttaccacagcgagggggaaagcacattatagctagtgttagcggtaacgcactttttaacatttttctttgttagcgctaactttgggaggtgtatcacagttgcattttatttagctgtttatagtgcagcacatagaccccctcgggagagcatatgatcagagactggttaaccccggataaaattaaagtcattaactcaatagatagctgggaaaatgccgttcgacttgcagcagaacccttgctgatgcaagggtatatagccgggtcgtatattgaggcgattttgcaaagccataaagaacttgggccctattacgtattagctcccggcttggcgatgcctcatgcccgtcctgaacagggggtgttaagaaatggattatcgcttcttcatattaaagaaggggtgtcgttcggctcggaagagaacgatccggtatacgtggtaatcatgctatgcgctcgttccgggaatgaacatatcacgatgatcggtgaactggctgaaatctttagcgatcagcaaaagttacaccgattgttaaatgccgatgatagcaaggcgattcaggccgttattgactgaaggaaaacagaatgaaaaaagtgcttatcgtgtgcggtaatggtttaggcagcagcttcatcgttgaaatgaatgtcaaaaagatccttgccgaaatgaataaagaagctgaagtcgcacataccgacctgacgtcggcaaaaagcgaaactgccgatcttattcttagcgccaaagacattgcagaacatcttagcagtcactctgcaaaggtcgttggattaagtaatttacttgataacaataaaattaaagaaattttagcagaaaacatttaagcaacggctatctgattcgtggagtttatcatgcttcattttcttatttatgatgtgctaggaacaccggcgatactggttggtttattttcactgatcggtctgctgttgcaaaaaaaaggaatttcagacgttatttcaggcacgctgaaaaccatcatgggttttgtcatattgaccgccggcgccggtattatagcctatacgttaaccatctttagccagttatttgagcattctttccatattcagggcgtggtgcccaacactgatgccatggccgctctggcgcagaagaattacggcacggaaaccgccaccattatggtattgggcatgctgatcaatatcgccctggcgcgtctaacgccattaaagtacatctttctgaccggacatcatacgctttatatggctgcgatgctggcggttatcctgtctgtagggggcttgtcagggggatgggtggtggccatcggggcggttattctcggtgcgatgatggtcatctccccggctatcttgcagccgtttacccgtaaaataaccaacaccgacgatctggcgctcgggcattttggatctattggctacctgctgtccgcgctggtgggcaaaattattggtaaaggtagtccctcgattgaagagatcaaagtacctaagtcgctcaatttccttcgcgactcatcggtggccatctctctcaccatgatgattctgtttctggtgctggtgctcgttgcgggcaaatcctttgtcgaggagaccctgagcgctggtcagaactttattatcttcgccattattcagtccctcacgtttgctgcaggagtttatatcatcctcgccggggttcggatggtgattgcggagatcgtcccggcgtttaaagggattgcggacaaactggttaaagacgcgaagccggcgctggactgtccgacggtgtttcccttcgctccgaatgccgtcatcgtcggcttcctcgcaagctttgtcgcaggactggtcagtatgttcctctgcccgctgttcggcttgagcgtcatcgtcccgggcctggttccccactttttctgcggggccacagcgggggtttacggcaacattaccggcggacgtcgcggggcggtggtaggggcttttgctcacggtctgctcatttcgttcctgcctgccattctcttgcccatgatgggggatatgggactgggctccacaacctttggagacgcagactttggcgttgtcggcatcgtgctgggtcatatcatcgcaatgtttaactaactatttatcggaggtggtttatgagcgctaaattttcaccgtcactgatgtgcatggatttaacgcagttcaaagagcagatcacggcaatgaataaaaaagcggatttttaccatgttgatataatggatggcaattacgtccgcaatatcacactgtctcccttttttattgagaatctgaaaaaaattactactgtgcccattgatgttcatctgatggtgaatcatccggaagatatcattcccatgtgtctcgaggccggcgccgatatcatcagctttcatcccgagacggcgaataacaaaatattccgcctgctgaatcagatcaaggatgcgggcaaaaagtgcggggtggtgctgaacccggcgacaccggcagaaagcattgccgaatatgcgcatctgctggataaagtgacggtcatgtcggttgaccctggctatgccggacaaaagtttattcctgagtcgctgaacaagattagaaagctcatcaacatgcgcaaaaataatggctataactatctgacggaaattgatggctcttgcaatgagaaaaccttcggtcagattgctgaatccggggtagatgtctttatcgtcggcacatcgggtctgttttcgctccatgaggatgtcagccaggcgtgggacagaatgatcgagatcttccagcgggaaactgtcgctgcataacgggttatttctcttcgaaccacagtgtgtatttgaataagccttaaaagatctgcatcacgccagcgatgctggtttgttatttaacgaccactctatatgaatgcgggtgaattatggatatttcgacagtgcttaatgttaaaaacatcaagttaaatatgaccgccagaaccaaagaagaggtgatagaagaactcaccgatttacttatccaggatggcgccgtcaccaataaggaagactttattcgtgatgtctggttacgcgaggagctaggctctaccggttttgaaaaccatatcgctattccacatggtaaatcttccggtgtttcccgtaccgcattagccatcggacgcacgcaacatgccattccctgggagaccatggatggcagcgatgtccgctgtgttattttatttgcggtttgcctggtggatcaaaatgccacccatattcgcctgttggcacaagtgtctgggtcactggcggatgaagacattatcgctaaattacttgttgaatctgatccacataaaatcattgcgcttttcaattcagaaactgaaaacgccgatgcttaataccaacttgctaatatcgatttgtaatttattaaattaattaacggagaaacattatgaatattgtcggcgttaccgcctgcacggtggggattgcacatacctatattgcgcaaaagaaaattgaaactgcggctaaaaaagccggacataacgttaaaatcgagacgcaaggaaccatcggcattgagaacccgttaaccgctgatgagattgccgcagcagatattgtcctgcttgctgccgatgtcaaagtaacgggcgaggagagatttgccggcaagaaagtcgttaaagtcgcgacggaaacggcagtcaaatcccccaataagttgattgaaaaaatcagtgaaatagtcaattcataattttatttcggcctggcgactctacattaaagggcgtgacttatgtctctaaaacaaatatggcaagcagcaaaccctaaaggacatctgctgaccgctatctcgtttctgatccccattgtctgtggttctgggtttattatcgccatcggcatggggcttggcggaacggtgcaggacacgttaactccgggacaatttgatgtatggcaggcgatggccaccctgggcgccaaggcgcttgggctgttgccggtggtgatcgccgtgggaatatctggctcgattgccggcaaaccaggcatcgcgccaggatttgtcgtcgggctggcggcgaataccataagcgcaggctttatcggtgggatgattggtggctatattgcggggtatattgcgctggcgatcattaaaaacgtcaaggtgcctgactgggctcgcggtttgatgccaacgttgatcgtgcccttttttgcctccattatcagctgcctgattatggtctatatcatcggtacgcctatcggtatctttacggaagcgctgacatctttcctgagaagtatgggcacgtcatcgaatcttgtgttgggcgcagtgataggcgctctgtgtattgttgactttggcggcccgcttaataagacatgctttgccttcgttctcacgctgcaggcgcagggaataaatgagccgattaccgcgcttcagttagttaacaccgcaacgcctattggtttcggcctggctttcttcattgctaagcttctgcgtaagaacatctataacagtgaagaagtggaaaccttaaaatcggcggttccaatggggattgttaatatcgttgaaggctctatcccgatcgtcatgaacgatatcgtccgcggtatcgccgccgcggccatcggtggcgcgtgcggcggggcggtcaccatggtctatggtgcggatgcgacggttccttttggcggagtactgatgatccccacgatgtcacatccgatggcaggcatcatggccctgctggtgaatatcgttgttaccgccacggtctatgccgtcatcaaaaaagatatccctcgcgacgtgattgttgataatgattacgaagaagaggatatcgacctggatgatattaaagtgagctaacgtatcccagggttattttaaatcaacattaagctcttcctgtaagaacatcagcccatgactaagcattacttagtcatgggctactctttgcatctgtcatccccgaagaaaaatggagcagggtaagcagaagatcaggggaaataatcttgttgcaaaaatgtgaacccttcagtagccttgtctctttcggagacaggaaatgctcgtcactgattcacttcttgcttacaccctggctgctacactgcttaccctgacgccaggtcttgatactgctcttattctccgcacggcgactgctgaagggggacgcaaagccttgcatgccgcgttaggcatcgatctcgggtgctttatctggggcgcgctggtggcctttggtttaggtgcgctactggcggtttctgagttggcttataccttgttgaaatggtgcggagcgggctacctttgctggctgggcatccagttgcttctgcgcccgcgccagcaatttaacacccactcggccgaatcagattccacgagtaactggttcctgcgtgggatgctggggaatgtgcttaaccccaaaatgggcgtcttctacgtttcgtttttgccccagtttatccctgccgggcattcacccgtgagctggacctttctcctggtcaccatccatgtattgattgggacgctgtggtcattaacgctgattactgccactcgctatgccgccggcatcctgaaaaaaccagccgtggtgaaatggatggaccgaacgaccggctgcctgtttctgttgtttgccgcgaagctggccatgagtcggcggtaatctccggtttcgtcctcccggggggcaatgcccgctttcatccggtgtcgccttgccggaatacagactttcctgccataccatggcaaatttcctgcactttgacgctcattgattatactttgatggcagcttgtgctgcctcaagcagttgtcgcgatggtggatatcaaaaccaatatcccgaacattgggtcaacggggccgaggaacatgtgttcatgtaacagtcgtggaggtatggaaagatgggattattaaattttgtgaaagaagcgggcgagaaaatatgggatgccgtctccggcgacagtaaagaagatcgggccgataagctgaaaaaacatatcgatggacttaatctgcctggcgccgaaaaggtcaatattgatgttgcggaagatggcaccgcaacggtcactggtgatgtcgcttcgcaggaggataaggaaaaaattctggttgcggtcgggaatgtcactggcgtaggccaggtcagtgacggcgttaaggtgacgcaaagcggggcggaaagtcgtttttacacggtcaaatccggtgacactctgagcgcaatctcaaaagcgatgtatggctcggccaatgagtatcaacgcatttttgaagccaataaaccgatgctgacccatcccgacaaaatctatccgggtcaggtgctgattatcccggcgaagtaggccactcagcagcaacatcagtgatggcaggaaaacttgctttataccgctgtcggaagccgccgcggacatctattcctctatcaacgacaaaagagccagcaagctggctctttgttcccccgggttcaggcgcttactgtgcgtcagccagtgccagtcgggcctcttcctgctcggtgattttacgctgttgctcaagttccagcgcgccgcgatgagagaggtagcagaagagtatgcagcagacgatcccgcccatcagcagatagaacccgccgtgccagcccattttatcgaccattacgccgaacaggctggtgcctaacgatgcgccaaagatatagctcataaatccgcgcagacccacggctgaaccgacggcaaagctggggacgatttccatggtctggaccgaggccagaaactgcgggacataaataaggcagcccacaatcgccgcgaataccgtgaccatcagtagcgattcgcttttccagtagccgatcagacagatgaagattagcgtcatacagattatggctaacggcatccggcgccctttaaacagcttgtcggagagccagccggccagcagagtagacggaatcgccgcccactcaaaaaacaggaatgcgacgctcatttgttctttggaaaaatgtttcaccgtcagcaggtaaattggcagccagctgatcatgccgaaacgcaccatatagacaaacacatccacaaaggagacataccaggcgtttttgttacgcagtacgtaggtacagaagatctgaaatgcgctcatgttctccggcgctttctggccgtgtttggtcttcagcaccactttctcttccggcatcatctctgccagcgaaggcagaccttcctcgcgcggcgaacccttacccagcaccagtacgctaatggcgaataccaccgccacgcaggccggtacaatgtagctggcgctctgccagtgctcggtgccgagaatggcgaatgcggcgccgacgatcggggcgacaattccgccgccgacgttatgggaaatgttccagaacgcccctacgcggccacgctcacggcgcgggaaccagttcgcaatagtaataaaagaggggccgacccccataccctgaaacaggccgttcaggacaaccagcgcagcgaagacccagaatgcggtactgaatcctaacccgacgttgacgatggcgcacagcaccaggccacaggccataaagactttcgggctggctttatccgcgaggctgctcattacgcctttactgatcccgtaggcgatgagcatccagctgctgagcaaaccgatctgcgtggcgctgaggtctaactgttctttcagatagggcgtggataaggtgaagttattgcgcacgatatagtacgccaggtatcccagaaatacgcttagcagcgcctgcatacggtatcgaccataggttgcctgaattttctcagcaggaactttattcgccgacgggcctttttttaataatgataacatgtcgtcacctgtatttatattgatatgaacatcaggagtaattaccccgaagggtgaaataagcggctaaaaaattcaaatcgtcgaaatgagtcaaaattgactcaaaataatgcagggacgggttgtttttgacccatctggcatgagcgagattttgcgtaattaattttgcgctgattttatgtccggcttgtgcggacactaacaaattgcctaatcattatctggtaatctttcccgatattcccggacgcccgtttgactatttttccgctcgcggcgattaattcaccagatgtcataaacgggtaagttttgtctcaacgcggtttttacggtatttcaatatttatgaacgggatcacaaacatatttcttcgtggggtcgggataatgagcaaaatgttcgcgctgctgctgctgagcgcatggctgagaccctgtgcggcgcaaggcaatgagctggtgatggcgacgacattttctcccagcgccaccgtgtggattatcgatcgctggcagaaagagccggggtcggtgatgataaggacgctcaaccgcaccagcgcctcgctggaacagttgcttgatacggcaaatgccgaaaatgtcgatctgatcctgacttcgtcgccgatgctgctgcagcatcttcaggagcatcaaaaactggcgccgttcagcggtgcgccggcagtcagccaacatctggtgccggaatccattcgctccacctccgtggccgtggcgatctccgggttcggtttgctgatgaatcgctcagcgctgatgacccggcatctgcctgcgccagcggactgggatgacctgaccgatccccgttatcagggggcgctgctgatgagcagtccgtcgcgttcggataccaaccatctgatggtggagtcgctgctgcaacaaaaaggctggattaaaggatgggaaacgctgttgacgacggcgggaaacctcgtgaccatttcatcccgtagctttggggtggcagataagattaaaagcggcctgggcgtgactggtccggtgattgataattacgccaatctgctactgaacgatccgcacctggcttttacctatttccctcagtcggcggtttcgccgacctatgtcgcagtgcttaaaaacagccagcacgccagcgaagcgcggcggtttattcgctatctgttaagtccggagggccagacgatcctcgccgacgctaataccgggaagtatccggtaacaccgctggcgccaggcaatccacgggcggcgcagcaggcgatgctgatgaatcaaccgccattaaactatcgattgatcctcaaacgtcagcgtttggttcagcggatgtttgatacggcgattagctttcgtcttgcccagctcaaagacgcctggcgagcgctgcatagcgcggaggtccgtcttaagcgtccgctgcccgagatacgggcgctgctcacccgtgtcccggtggatccggccagcagcgaggatgaagcctggctggctcagttcgacaacaaaagttttgcggaacagcagatgatggagtggcagctctggtttctcaacaaccagcggcaggcgattactaaactggaagaactgaaatgacggacaggtccatgctgcaacgcctgcggcaaatcagtatcagtagcagtctgcgcggggcatttctgacgggggcgctgcttacgctgattgtcagcagcgtaagcctctattcctggcatgaacaaagttcgcagatccgctattcgctggatgagtattttccgcgcatccatgcggcttttctgattgaagggaatctcaacctggtggtcgatcagctcaatgaatttctgctggcgccaaataccacggtacgactgcagctgcgcaaccagattatccagcatctggacaaaatagaacggctaagtcaggggttgtcgccggcagaacgccagcagttgggggtgatattgcaggacagccgcgcgctgctggcggaactggatcgcgtgctctacaacatgtttctggttcgtgaaaaggtgggagagcttgcggcgcggatcgactggctgcacgatgatttcaccaccgagctgaattcgctggtgcaggattttacctggcaacagggaacgctgctcgatcagattgaagcccgacagggggatgcgaggcagtatctgaaacgcgcccgggaagtgcagaatgaacagcagcaggtctataccctggctcgtattgaaaatcagatcgttgacgacctgcgcgacaggctcaatgaactgaaatccgggaatgatgacggcatgctggtggagacgcatatccgctatcttgaaaacctgaaaaaaacggcggatgaaaatatccgtgcgctggatgactggccgagcaccattaccctgcgacaaacgattgatgagctgctggaaattggcatggtgaaaaataatatgccggataccatgcgcgactatgttagcgcgcaaaaagcgctcgtggaagccagccggtccagagaagcgacgctggggcgcttcagaacgctgctggaagcccagcttggcagcagtcaccagcagatgcagatgtttaatcagcgtatggcgcagattgtccgggtcagcggcgggttaatcctggtggcgaccttgctggcgctgctgctggcatgggggctaaaccattattttattcgctcgcggctggtgaaacgctttaccgcgctgaatcaggcggtggtgcagattggtctgggccggaccgaggcgaccattccggtttacgggcgcgacgagctgggacgtattgccggtttgcttcgtcataccctgggtcagcttaatgcgcaaaaacagcagctggaacaggagattggcgagcgaaaagcgattgaggccgatctgcgcgccacgcaggacgagctgatccagaccgctaaactggcggtggtggggcagacgatgaccaccctggcgcatgagattaatcagccgctgaacgcgctgtcgatgtatctttttacggcgggaagggcgatcgaacagggacaggcggagcaggcgcggacgacgttaagcaaagcagaagggctgatcaaccgcattgacgcgattatccgctccctgcgccagtttacccgccgcgcagaactggaaacgccgctgcatccggtcgatttgcgtcagacgtttaccgtggcgtgggaactgctggcgatgcgtcataagcctcagcaggggacgctggtgataccggatgacactgtctggatcctgggggacgaagtgcgcgtccatcaggtgctggtgaacgtgctgtccaatgccctcgacgcctgcccgcacgccgcgcaaatcaccgtgagctggcaaatccagggcggaaggctgtgcgtgttgattgccgataacggccctggctggcctgcggccttactcccttcgctgttaaagccgttcactaccagtaaaaccgtggggctcggaatagggctttcgatatgtgtttcgctgatgacgcaaatggaaggggcgttgcgcctggcgtcgacgtttacacgcagtgcctgcgtggtgctggaattcaatttgacggatgtaaaagatgttgagtaataactgttcgattctgctgattgacgatgatgccgatgtgctggatgcctatacgcagctgcttgagcaagcggggtatcatgtcagtgcctgtaataatccgtttgatgcgcgggagcaggtgccgaaggactggcccggcatcgttttaagcgatgtctgcatgcccggctgctccggtatcgatttaatgacgttgtttcatcaggatgacgatctgctgccgattctgcttatcaccggtcacggcgatgtgccgatggcggtggaggcggtgaaaaaaggggcctgggatttcctgcaaaagccgatcgatccgggcaagctgctcacgctggtggacgccgcgctgcgtcagaggcaatcggttatcgcccgtcgccagtattgtcagcaaaaattacaggttgagcttattggccgcagccaatggacggttcggtatcgccagcgccttcagcagctggcagaaacggatattgcggtatggctttacggcgagccgggaaccggccgcatgaccggcgcgcgttacctgcaccagttaggacggcacgctgaaggtccgtttatcgcctgcgagctgactccggctaacacccatacgcttaatgaactgatcgcccacgcccagggcgggacgctggtcttaagtcaccccgagcatctgactcacgagcaacagcatcagctggtacagctgcagagtcatgagaagcggccttttcgcctgattggtatcggtagcgcttcgctggtggagttagccgccagcagccagatagtggcggaactctattactgcttcgcgatgacgcaaattggctgccagcctctgtcaaagcgacctgatgatatcgagccgctgtttcatcactatttgcaaaaaacctgtcaacggctgaatcatcccgtcccggaggtggatgctggtctgttgaaggggatgatgcgccgggtgtggccaaataacgttcgcgaactggcgaacgccgccgagctgtttgcagtaggggtattaccactcgcagaaacggttaatccgctgatgcacattggcgagccgacgccgctggatcagcgggttgaggacgtcgaacggcagatcatcaccgaagcgctgaatatccaccagggacgtattaatgaggtggcggagtatctgctgataccgcgtaaaaaactttatctcagaatgaagaagtatggtctgaataaagagcactacaaaggggtttagggcatcttgtcagacgatggttgaaaattatgaggacagatacagattataaatgccttcaagtcagcagaggcgatttatgttattgtgactgcttaaatttccttaaaaggtgtgactgttgaacatgcgaatattgactgtagttgattatgatgaaatgtggccgactttatttgagaacgaacgtactctgttgcagatgacgcttggtaaagtgatatcccggattcatcatattggtagcacctcggtgcctggattatcagctaagccagtaatagatatattaatcgaagttgctaatcttgaagaactggacagtttgaatcaggcaatggagggtgtaggatatactgtgcgtggtgaaaacggcattttaaatcgtaggtactttacaaaaggtggaagtcagcgtagtcatcatatccatgcgtttaccaccggggatgctcaaatcataaaacacctggcattccgtgattaccttattaaacacaatgacgtagccattcagtacgctttaatgaaaaaaagcgcgatgttattatgtgaaaatgacagccaccgatacagcatttataaagcggatttcattcagaaacatcttcgtatggcgcttattgatgcgggtcacctgggctagccttcaaataaactacaacccatgttttttttgtaatttttcacagcgttacctcttgtttctccattattagcaaacagcacgccttgcagactccctgcggcttcctgcaactgagcattctgaataagcgacggggcgataaagccgataacgcatcgttcagtatggaggcactatttcacaaccccagcggcctgacctcctgtatgaactcaatcagaaggcgaagcccggtcggcaattgccggcggcttgaataatagatatgaaaaccttcctctagtggggaccattccgtaagcaccagacggagccgtccatccttgacatagggtgcaacaagaggctccggaaaatacatcaggccagccccgcccaatacggccaccagacccgtttcggcatgattgaccgtcactgagcctggcactgtcatttggtatgtttcgccgtctcgcgcaagttcccagcgataaacccgatcgtcaccgagacgattgctgatgcagcgatggtgtaataaatcatccggatgttcaggcgttccgtagcgttccaggtaatcaggggaggctgcgataacccagcgaatatcggcagataaacgccgggcaaccatgtcctccgggacggtgccaccatagcggatgccggcatcgaagcccgcatcagtcacgtcaaccatacggttgctggccacaatatcgatttcaatatcgggatagcgatccataaaagcgggcatgaccggcgcaagcaaaagatttgccgcttcaacggctgcattgatgcggatacgtccggtaggggtattgcgataccggttaagcgattcaagcgcgccttctatggtgtcgaaaggctgaagaacagactgaaccagttcctcaccagctgccgtaggggtgacgctcttggtcgtgcgattaagcaggcgaactccgagccgggtttccagtcccttcagggcatgactcagcgctgatgcactgacgcctaattcaattgccgcacggctgaagctgcgatgacgtgcaatcgccatgaaataaataagatcggcaacatcagctctgcttatttgcatacagaatagttttccttatgcggcgttaaaacccgaatgcgttgatgaagaaatgatatacaccttagaccgattagggctaatccattgctgaatttttttcacaagtccattcatgcacgtccactcactgtacacgttgtgcttcgttattcttgaaaatcatgcgctctggctggtaggccagggcggaacactcatctaacggagccgtttatgaactatacgcatcttggccgcaccggcctgaaagtcagccgcctttgtctcggaaccatgaattttggtgacgtcaccgacgagaagaccagcgcccgcattctggatgaggcgcttgaggcgggtatcaatttcattgatacagcagacgtgtatggcactgaacaatctcccgatatccagcaaggctcggggctgtccgaggaaattattggtcgctggcttcagcagggtggccgccgtgaacgcatcgttctggcgacaaaagtctatcagcctataggaccgggcccgaacgatcgccggctttctgcgtatcatattcgcaaagcctgcgaggacagtttgcgacggcttaagaccgaccatattgacgtctatcagatgcatcacatcgatcgtcatacgccgtgggaagagatctggcaggccatggaactgcttgttcagcagggaaaggttctttatatcggtagcagcaatttcgcaggctgggacattgcgactgcgcagtcagtcgccacggcccgtcatttcctgggcctggtcgccgagcaaagtctttataatctgacagcccgcaccattgagctggaggtcattcccgcatgccgccattttggcctggggttgatcccctggagcccgcttgccggagggctgcttggcggcgtactgaaaaagatggcaagcgggcgccgtgccaggcccgcgtttgcccgtctaatcgaacagtatcgtccgcagctggaagcctatgaaggattatgtgaggacctcggcgaaaccccctccgatgtggccctggcgtggctcctgcagaatcctgtcgttaccgctccactgattgggcctcgtacggtcgaacaactccagcaggcgcttcacgcaacgacagtcacgctatcagacgacaccatgagctgtctcgacgaaatctggcccggccccgggggagaagcgccccaggcttatgcctggtaatgaccaattaatgaatcctttcttcgttatagggagttccagtttatgagcaagatgatgcatgaccagccttctgctgccgtacccgcttcccgggaccggcgcaattttctgatcgccggcgccggtctggcgttggccgcaaccacccttggcaggagcggcgccgtgatggcgaaaccggctggtcaggacacgccgaacgccccttcggatgctgctcccgtccggaaggaaaccttaaccacgcgtaaactcggctcgctggaggtgtccagcatgggactcgggtgcctgccgatggtgggttattacggcggaggtccgcgcgatcgtaaagccatggtttcgcttatccgggcagccttcgaacaaggtatcacgttctttgatactgccgaggtctacggcccccatctcagtgaagaatttgtcggggaagcactggcccctgttcgcgatcgtgtggtgattgccaccaagttcggtttcggcgtggaggaggggaagcccacttcccttaacagccatcctgaccatatccgccgcgccgtagaaggctcgctaaagcgtctgaaaacggaccacatcgatcttctctatcagcatcgccccgatccgaatgtgccgatcgaggatgtggcggaaaccgtgaaggcgttgatccaggagggtaaagtgaaacactggggactgtcggaagcgagtgccaggacaattcgccgcgcacatgcggtactccctgtgactgcggtgcagagtgagtatgccatgtggtggcgggaaccggagacgcggatatttccaacgctcgaagagctgggtatcggtttcgtaccttactgcccgactgcccgcagcttccttgccggagcagtcaatccaagccagcggttcgacagcaccgatcggcggcataacctgccacgcttccagcccgatgccctggccaaaaacatggtgctgcttgaatttgcgcagtcgtgggcccgtcgcaaaaacaccactccggttcagttcgcgctggcctgggtgatggcgcagcggccctggattgtccctatcccgggtacgacgcaatatccgcacctgatagaaaacagcggcgcaccgcaagtccggttgacggacagtgagctacgcgaaatcgatgcggcgcttgccaaaatcccattgcagggcggccgcgccgatccgtttaccgaaagtcagtttgataaaagttaatacctgctgtcacagggagactgcaggtgaagtctccctctgtattattgccggggataaaccacatgaatggactaaatcataacgcgcttacatgcagtgccgtccccataccgccctgggagcgttctcttcagaccgtggaggcccagccgtacttcaacgtttcacaggcgtcgctcgtgctcgaagggatcgtgttcgatcggaacaataacctgctgtttgttgatgtggcgacggggcgcgtgtttaagctaaccccggagcggcagctttccattgtccttaaggagaattcattcggtgcttccggcctggcggtacacaaagatggacggatctttatcgcctcggtgggcgatatgcagcgaggttctgttcgggttatcgaacccaacggcacccgtgagcagatgattgttgcccctgatactggatttcttgtcaacgatctggtctttgataatcagggcggattttatttcactgacagccggggaaattcagccgatccacagggtggggtgttctacgttagtcccaatgtcgggtcaattcatgccatcctgcctggactcgcggtcgggaacggcatagcgattgaccccgccggctctcagatatgggccacagaacacgctaaaaacaggcttcatcgcgtaagactgtcagacgccaccacggtcgccccgtttggttcagttgttacctatcagttcaccgggccggcgccagacggggcccgtgtcgacagcgaaggcaatgtatatgtggccatctcaggccagggccgcgtcatggtcttcaaccacaacggactgcctattgggcaaattgtgctgcctgaccgcgacaaaggccgtaaccttaaatcgacaagcctggcgatccgccccgggcatcgcgagttgtttattgtcgctaacagcgggaccgaacctggtggagcgatgatttttcgatcgggcgcattcgcgccggcaccgtttcccttttcacatcagtgaccgggaatgagtggtctgggagacccggcaacgccgggccaggacagggtgttaatagttctggatcgctgaaggcggcgtgagggaaggcggcgtatccggaagcgggggaatgatcccgtcaacggggtgcggcagatagcgagcttccagttccgtgatttcggcatcgctaagtgaaaagtccagcacgctgatagccgtggaaagatgttctggtttcgttgcgccaatgatcggtgctgtgatgacggattttgataacagccaggcaattgcaacatgagctcttggcaccgcgtgcttttcggcaatgctggcaacaacatcaatcacgggcttatccagaagggctgcgttctcatacatttttaacgcaaaggcatcgttttgcgttcgtcgggacgtgacactccagtcgcgcgtgagcctgccgcgtgccatcggactccaggggatcaccccaacgccctggtcttcacacaggggcagcatctcgccctcttcttcccggtaaagcaggttgtattgcggttgcatcgtgataaatcgggtccaaccgttacgctcagcggtatgctgcatttttgcaaagcgccaggcttccatagaagatgcgccgatataacgcgcttttcctgctttaacgacgtcatgcagagcctccatggtctcttcaacaggcgtggagtagtcaaagcgatgaatctgaaagagatccacataatccatgcctaagcgcatcaggctatcgtcaatagactgaaaaatggccttgcgggaaagaaacccggtattgggtgagttgcgccacggaaagaaggtctttgtcgctacaacgatctcgtcgcgtctggccatctctctcagcgcttttcctgtaatttcttctgaactaccgcccgagtagatattcgcggtgtcaaaaaaattaatgccggcttcaagcgcctgacgaatgagcggtcgtgacgccttttcatccagggaccagggttgaggcaaacgttcaggttcgccataactcatacaaccgagacaaagacgggagactttcaacccgctacgacccagattcacatacttcattcggtgttccttcttttattgccagcaattatgtatgtgacagggtattgcactggtatgaagggaaccagcatgcgccattgaatggtgttatgagttttttcacaagtagacaacattctcatacgccagcctaggcccaaagtcggtatagcgttcgcggataatattgagtgcgtaccgggcaagaccatcaggcagctggttattgctgggttatccacgacggcggttaggcatactcagtgggcctgattgattgtaacgctagagaaggcgtcggcactggcgatcgggaatacccaggcgctgcgcggccatctgagtggtcagacgctggtcgacaacgtcatgaatgatttagagtcggttaacttcatccaaagtaaaaatgccggtgcatgatccgtcatcagaatcctttgattgggaaactatctttgaaagcagtgatcgctgtggtgagactgtagcgcggacatgtctatttggtcagagacggacatctcaagttagctactacaacatgtgtcaaagctcagtgaaaatgtctaatcactggctcattagaaatgtccatatgttgaaaaggccgctgcgaaaatccctcccgcagcggcctctttagcataacgtcattatgcgaaccaattatggtttgagtttatacttctgaccattaatgatttttttgattaactcgaatgcagcgggggaatatttatgaacaccttccttccccgttttcactagcacatgatagttattatctgaggatttaatattaaaaccagtttccttgtgtattctttctaatactttatggacgtaatgccaagatcccatatcaagtaattttgcaagttcagatatggtgtagggatagcttgcgttaagtgcttgcccattatttaactctgcaattccataaagtttcgctaacacgttatcttgctcagcaatgttcttaagcatttcaaaatcatatggaagctcttgttttacaagagattgagaggcaaatgtataggttctggctaatagcgccctgactaattttgggttaacactgatttctggcgtatttgacgatagggcatcataaatccaaccgaaatcattggcatagatcactttgattcggatgcttttattttcaccaacaccaatcaaaatctctttctggtgtgaacctgtaccttcacattctggactaaaggaaaccaaataaatattcggaatcaaagcgttattcggcgcaattatctcatcaatatcagacaggatggctttaatattctcatcattaatactatagccaatgaagaacaacggatgctcgacgaaatatgttaaaagttttgcactgatatactttttacgcttataaaactcaacataatcttcatttgttataatgatgctttctggttctttactactgccgtgaatcttcatgatttcaccgtatgtagtatagttaacagtcacaacattatggccaactatcggttggtagttatcaaatatcttttcaagcagatcgtcatagtttgttgtaataatggcatggggccttactttttttaacttttcaatttcttcagtgtacttcattgctgaaaaatcaaccgagtctgaaaggttattcaacaatgttgcaatctcatgcttgatataaatatctttagagctttttccattgaaatactgttcaggataacgagatgtccccacatcccaagcccactcagcgtatgactcagaaaaatcacttgctatcaatggtttattgtcatttcttgtttgactgtagtaaccatacgggcgagtgattaatgggcaagtttcagcgagatactttaacaggttttcccaatcaggagctttcaagtagcgttgagatacccctgcacccataaagagaattggctgtacctgtaaaccttcaagacatgatttgatatcttcaattatttctgtctgatattcagagaagtccatactttagcctttaggatgtgagatgctggagtagtaaatcgccgcggagcggttcggggttcggggttctgtgacactcgaattttacctcggttatataatatcattgaagttatttgcatttctcagaaatcttctctggctttgattgctatagccgaaagatagcgcacacatcgccgttggtcagttagtacgaggtttccgccaagttcaccttttaccaaagatggcttcagagcttccctgaagctttatcatggcttcaagtaggtcatcttcgttcagtgagcgctgagatttgttgatgctaggggcgtgccgtctgcgggaaggctcatcaccagaacaaggtaacgattgtgagcgattattttcccgttttctctggatctgacgggcaacatccaacacatggccaagtctcttgttatctacaatggcgacggtctcaacctcagaaagctggtcataggtggagtagggcagcagcacgccatttagtcgcagctccttatgtccgtcaggataatgccagacatcaatgtacttgccgatggctcttcgactgtattcgctgtcctcaatcagatagaggattttatcgtattgtacagtcagactttttgatacacgccggggctctcgccaagtaaattccgcatcaaggtcatcgtctagtgccagtggccggtgcgcgttaaaatcatgcaagggcgctttggcaaagcgtcggttgtaatccgcaatgtattcttctgcaaatccattggccgcttctatagtacagattcccctaagcctgagttccttaaccagccggtcctgaagggttagatgagcacgttccacacggccttttgcctgactggtttctgcgcacagcggtgtgatattgagggagcgcatggccctggcaaactgatacagggtcgaccccggttttcaaaccagtggtggtcacagccatcaatttgtatcagctcgccagtacaaggccgccggtaacgaggctgatgaattttaggtgcgcgctgtctgcgtgggatccagagtccggcttttatcatgagacgtcggatgctttctttgccaaggaccagaccgtgaacttcctccagtttttcccgcgccagcgtggggccaaaatcacggtattgctccctgattatactgagagcctgatctgtcagtgacgctggcaacagacggttaccagtgcggccacgactctggttgttcatgccaagcggtccgagttgacgatagcgtttcagcagtcggctgcaatgacgtggtgtaatgccgagcatctccgcagcttggccaggacgcagattgcgatcgatgacatcctgaaggattttgaggcggttgatttctttcacgttgaacatcccggcgtcatgtatagccatagaaaactcctcatcaggaaaagtgagtcgttgtctagacatacaggtctgagaactatagcctggacattcctatgagccacaaatagacattagcattgagcctctacaacatgagtgcgcataatgtatattatgttaaattgccgaatgagggaatctacgtcacatatcgcatccactcctctgtatcgctcctcttcacgtgactcggtaaaacgcgccttacatccccgtccatctgggcggggttttacggcccacctgatatttgataccgcctgaacttcgcgctagagaagattctcttcatccagagaaatcacctgaatgccggcattacgatacgcctgaacatcatcaggcagacgatccaccaccaccgtgtcaattcgatctgcggcggtaaattgggcaagcgaggtgttattcagcttgctgtagtcacagacaataattacctgactggcgtgttccaccatgcctcgtttcgtttctgccagcatgatatcggccacgcaggcgccgtgtttcagcgacagcgaattggtgcccataaatgctttatcgacgtttagcgtgtcgagaatggaacgtccgttgatcgccaccacgcagtggtatcccttcttaacgatccccccgagcagaatcgtttgaatcgagggactggcctcaagctcccgggcgatttggtaatcattggtaaccaccgtgacgttctgtctgtcacgaatattgcgcgcgatatgtagcgtcgtggtaccggtatccagcacgattatatcgccatcctcaaccagcgccgccgcgcgctggccgatccgctctttcgcgctgagattgacaatttcgcgatcgtccgacgcctgttcaaagcttgcccgggtacgaagaacggctccgccgtgggttcgggtcagcagcccctcctcttccagctggcggagatcggcacgaatggtggcgcccgatacattaaagacgtcacacatctcagaaacagcaactttgcgtttttccctgagaataccgagtaacttctcctgtctttcttctgcaaacattctgcctctctcttttttacggcacgttacggcttacctttgcgtatcagtcgggccccacgctgagcgcatccagcctgtcgtataaggcggcggattgccggtacagcgtatcaaaaagctcgctgcaggcgtggtaataatcccgcagacggggatccggtgagatcactttgtcgaactgcaccgtttgccgcacgccgctggcaaaatcggcgtacaaccctacgccaaccccggcgataataccgcatccggtgacgccattctcctgattacgcgtagataatatcggcagattgtacgccgcggctttgatttcaagccacagcgagctgcgcgcgccgccgccggaagcgatcatttgttgcggatactgcccgcacttctgcagctgccgaagattgcgccaggatgcaaaggccaccccttccagaactgcgcggaataaatgaccgcggcgatgcttgcgctgcaggccaaaaaactgtgcccgcgagttcgtgtgttcggccagacgttctcccgtcagatagggaagaaacagcagcccttctgcccccgccggcaccgccgccgcttccggtaaaagctgtggatgcgtaatctggttatcggcaagtgccagccgcgcccagcgaacggcatcgccgccggcgtcgaggatcgtaaatccgccccaggccgcgttggcaagatgaagattattaaccagcggatggtgtaacggccgcggcgacaccaccgtcatcagcgtcgacgtgccggttgaatcagacgccatccccggttcatacacacccgagcccagcagagaggccgccatatccgacgtcccggcaaccaccgggatacccgccggcaggcccgtcaggtcggctgcgcgctgcgtcacctggccgattatgtcgctggaaagtttaagctccgggagctgatcgacccgcagaccaaacgtttcgcaggcttgcgaagaccagctacgggtttcgctgtccatcaggaaatagcacgacgcttcgctataatcggtcgccatggcaccggtcagcatgaaattaatatagtccttcggcattaatactttggcgagctgcgaccagcgatccggatgattttcgcgccaccaggctaacttgaaagcgggccatgctgccgcaggcggattattcaaatgcgccagccacttttcccaaccttcgcgcgcgttaaaggcgtcaacttgcggctggctgcgcttatcattccacagcaacgccctatcctccaccagctcgccacggtcgtccagaaggacggtgccatgcatctgtccgcaagcaccaataaccgcaatttgcgctgccgtttcaggatagcggtaaagcacctcgcgtatacagtcgcaggcggcctgccaccataaagacggggcctgttctgaccaacctgcacgcggcgtggtttgctcatactctctttgcgcaaagccgatcatcgcgccgtcaatgcgcacaatagcggcgcgggtactgccagtgccaacatcaatcgtgagtattttatctttcatcactaactccggtgacgtcttaaggcgggccaccaggcccgcggtctctcagtttaatcggcgttcagctcgggaaaacgttccgggtgctgctccagttcagccagcaccttggttaccgcgccatggctcatgccaaagcggcgcacgccaagctggtacagcgcacgcaccgtggccagatcgcgaatgcccccggcgcctttgatatcgattcggcctttaagctggtcggcgatgatgctgactttttccaccgtggcgccggtgggcgcccagccggtagaggttttgacccacttcatccccacctctacggcaatttcgcacacgcgacgaatctgctcctcattaagatagtgcgtttcaaggatcactttggccggtaccggggcggcggcttccaccacgcggcgcaaatcttcgcgcacatagtcataatcgccggagagcactttgccgatattcacgaccatatccacttcccgagcgccgtcggcaatcagctgccgcacttcctgaaccttggtatcggtggtatgcccaccgccgggaaagccgaccggaccgccaatcatcacctctcccgtaccctgctgcggcagcaacgtactgagaaagcgcgtccagcaaggcagtacgtggacggaaataatgttgtatctggcagccagctcggcgcaggcgcgaacatccgcttcggtactggtggcctgaactgcgctcagatcaactaaacgtgcaaaacgacgggttgtttcattcatggtcttatcctgtcctttgtttttaattgctttcatttaatgctgatatttggcttaaatacatttaaaaacgcattaaatgaaaataacgtgatcaaattagcatttttttattttcatttgtttttaattagcagcaggaaataagcgttaaccttgcagagcaggcgtaatcgggcataaatgggcgcaaaagcaatcttgcatttatttttgtttgtttttgtttatgcctgaatcacgggcgaaatagcgcaaaccgctgacggaagtgaagcgaaatgcgtgcgctatcacagtgttcggctgcggatagcttgccttcgtgggacattcccgaggtctcaacgctctgcgcaagggaaaggtaatctgattatgtacttcaggagagagctatgttgccgctggaacgtcatcatttgattgttgaactgctgggccaacacggcgtcatgcgggtgaatgagattgcgcaagcgactcgggtctccagggaaacgattcgccgcgatctgagcgagctggaacgcaaagggatcttaacccgaagccacggtggagcgctggcggcggaaaatccgctgccggcgacccgggcggcggcatccgccctgccagttgaagatagccagggaagctttcagcacagaacgctgctgcacagcgaaggcaaaatgcgcgtggcccgtaaagcactgcagtttctccaaccgggacagaccattgtcctggacgggagtagcaccagctggtttttggcccggcagatgccggagatggcgttgacggtgattacgccctccattcgcatcttacaaactctgatgagccgacgctcgttgcatctcgtcgggctggggggcgatttctccccgaccgaagagtcgttcttcggggaaaccgcctcacgaacgctacgcgaatatgccattgatacgctctttttctcctgccaggggctggagcgcgatagcggcttgtatgcgggtacgcaagcccacgccgccctgctgaaacagatgctgctggccgcccgtcagactgtggctttggtcgacggcagcaagctggggcgaacaggcgtcgcgcgtatcggcggactgggcgagctggactgtctggtgactgaaaggtttgtcgatccgctgctggaaaaagagatgacctggcataacgtcagcctgcaaatcgcctgagtacgccgtcatgacgtgacggttaatacgcgcaatgtcgaaacgctgcttaccgcggcagggccagactttgcctgaattcagccaccaccggaataaatgaggccttatgcgttattacctttctccctcgctgatgtgtatggacatgatgaagctgacggaacagctgcgctttctaaacagcaaagccgacaggctgcatgtcgacatcatggacggccactatgtcaaaaatctggcgttgtcggccagctttgtggcgcagatccgtccctacacctcgcttcctatcgatgtccatctgatggtcgaagcgcccgcttcgtttataccggcgctgttagacgccggcgcagacgccttctcactgcatccggagaccatctgccgcgaagcgttccgggttatcaatatgcttcgtcaggcggggaaagaggtgggaatggtgctcaatcccgccacaccggttgagagcatccagcactatctgcatctgctcgataaggtgacggtgatgaccgtcgacccaggctatgccggtcagccgtttattcctgaaatgctcgccaaaattacgcagcttcatcagctcaaagagaccggcagcctccgcttcttgctggaagtcgatggctcctgtaaccgcaacacctaccgcgcgctgctgggcgccggcgcacagatattagtgatgggcagcagcggtttattccgcgctgatatgccgctcgagctggcctgggaaaccatgtcccgcgaactgtccgccgcgctgcactcccccgagctggtatagaggagcgaatgatgtcaggaaaagtctgtgtttttggttcattcaatttcgacatggtcgccagggtggatcgctttccggtaccaggtgagtcgttagtggcctgcggaagtatgaccagcgccggaggtaaaggggcgaaccaggccaccgccgcgctaaaagcgggagcaaatgtccactatatcggcaagattggcaatgacaccttcggccattttgcccgccgtcatctgaaaggcgtgggcttcaatgctgtgacgctgctggtcgccgaagagatccccaccggcaatgcgctgatttatgtcgccggtaacgatgccgaaaacatgattgccgtcgatcccggcgcgaatatgacggtgaccgatgatgaaatcgccggctgcattcccgctatcggctgcgcggatgtggttctggttcagctggagaacaatctttccgccattgaacaggtcgtagacgccggcaaacaagccggggccctggtgatgctcaatcccgcgccctggcagcccgttgagcgcgcccttcttagcaaagtggatttacttacaccgaacgccacggaggccgggttaatgaccggacgccgggttgacagtctggcggccgcggctgaggccgccgacgtgttgcatgctcagggcgcgcgcaacgtcattatcactctcggcgccagcggcgccctgctgagcgagcatggggtgaaatcccctattccctgctttccttcccacccccgcgaccccaccggtgcgggcgatgccttcaacggcgcgctggcggcgcggctggcctgcggggaaccgctacaggccgcagcccgattcgcggcggcctatgccgccgtcagtgtcgaaaaacaaggcgcctcatctttacctgagtacctggaggcacaggaacggcttctccgtgccgccgctgattatgaaatggcataaaccctactgtataaaaaacattaagaggatagctcaatgagtacgctaatcacggataaggtcgataacgcagcggtccaaaaagaaaaactggacaccagtgcgtatttaccccataccccctggctgcaatttttacttgtctgttgcctgtttgcgctatgggggatggcgggcaacctgaatgatattttgatcgcccagtttaaaaagggcttcgatttaacggatacccagacagcgctggtgcagtcgatttttttcctcggctacttttttgtcgccctgcccgcggcggcgctgattaagcgtttttcctataaagcggcgattattattgggctgtgcctgtacgccctcggctgcttcctgttcgttccggccgcacagatcatgacctacggcgcattcctcgcctgcctcggagtgatcgcctgcggactctcttttctggaaacgtcggcaaacacctactccagcctgctgggtccgattcaatcctccacccagcgtattaacttttcgcagatcttcaactcgctgggcgtgatctccggcgtattaattggccagctgatggtctttggcgaaaacgatccgagtcatgaacaactgctggcgatgcccgccgccgctgcagacgttgcacgccatcagatggttggtcaggtggtcgggccctatctgattatcggctccgtactggtggtgctggcgctggtgttcgtgtttattaaattcccgtcgtgcaagggcgcgcccgctcaacaacagcaactcccgacggaaagcatggggccaacgctgaaacgcctgtttgctatcccgcgctttcgcctcgggatcctgtcgcagtttttgtacgtcggcgcccaggttggcgtatggagcttcacgattcgctttgtgcagctcgtgcagcaaggcaccagcgagcactccgcgacttactggctgctggcttctctggtgatttacgccgtgggaaaaaccgtggccacctggttgatgaaccgtctgaatccggcgatgctgctcggaacgtttgccctggccgccaccgccctgttactgattgccgttttcagcggttcaatgctggcggtctatgcgctcattctggtcagcttctgtatggcgccatgctggccgacgaactttggtctggtgatcaaagggatggggaaagatacccagaccgcaggctcgatcgtggtgatgtcgattatcggcggggccgtaattcctctggtgatgggcattatctcggatatgaacggcggcaatatgcaaatcgcctttatcgctccgctcctgtgctttgtgtatgtcgctttctacggcttctggtgcgtgcgtaagggggtataacatgcgcgaacttatcaacacgattgctcatattggctatcaggtcagtgacttaacgcgttcgcttgccttctatgaaccgctgggctttcagcgccagcagcggtttagcaagccatcgccacagggcactattgaagttgcgttcctggaaatggcgggcgccgccctcgagctgtatcagcttcccgctggaacgccctttgacgcccctcgctgcggtatcgatcatctggcgctggaagtcagcgacctggatgcggtgcagcagcggctggcggcgctcggttatccgctcgatgaagggccgatagaagaagacaacgtgcgcttcctgcttattcgcggccccgatggcgaacggctcgagttcgatgcctgtaaacgctaagcggcagggctgaccccttcactcttttaggcccggttaacacgggtctaaaagatagcgtcctctggcattattcacgtcggtttgattcgcggatatctctcccccacccggtctctcctgcccattgtgcaatgttacaaaattgcttctgttttgttgattttctattgtgagccattcggcaatttcctctcctgaatttcccctgactactcctactcaatacgcgatatcaggagagacacatgaacagcacctccgccgacttccagaatctgtaccaggccctgagccacagcgccgcccgcagcccggatgccctggcgctggcgtttgaggatcggcgctatctgtaccgcgattttcatctgcgggtacagcgggcgatggcgcagcttgatcgcggctggtcgctgcgcaaaggcgaccgtattctgctggcctggggcaatcaccccgctttttgcgaagtcctttttgccgcgctgggtttgggcatcgaagtggtgccgttcagcaccaagcttaagcaggccgaaagcgaggcgctggtaggccatatcgctccccgggttgtcctgttcgatgcgaccgtgcaggactggctgaaaaacacccccgacgcgcgtgcggtttcactcagcgaatggcaggcgctctgccttcccgaaccgctgacccgcccgccggtcccggttaaccgcgacgatacggcggtgatgatgttcacctccggcaccaccggagagcctaaaggggcgattatcacccacaataacctgctctgcgcgattgacgcctatacgcaaaaactgaatctcaccgccgcggatagcaccattctggcggtgcctatctatcacatcaccggcctgtcggcgctgctggcgctgtttattagcctcggcgcgagcatctggctgcagcatcggttcaatgccccgcaggtgatcaccaccctgcgcgagcagaacattacctttctgcacggctcgcccaccatttttatccttctttgtcaggctgcgcgtgagcagagcgccagccatcccggcgattttccggcattgcgcacgattgcctgcggcgcgggccacctgagcgatggactgatcaaggagttaaaaaccctgttcccgcataccgcgattcagccgatctacggcctcaccgaaacgacctcgcctgcgacgatttttccgggcgacgtctggggcagcgataaatgtggcagttcaggtcaggcgatcccgggtctcgccattaccatccgcaacgatcgccagcagcccctccccgccgggcaaatcggccatatctggctaaaaggcgatgtggtgatccgcgaatactggcagcacagcgagcgacgcccgagctgcgatgcgcagggctggttttgtaccggcgatctgggctatctcgacgacgaaggctggctgtacatcaaagaccgcagcaaggacatgatcaatcgcggcggcgagaaaatttactcactggagctggaaaacattctctctacctatcggggagtacgggaagttgccgtcatcccgacccccagcccggtctacggcgaagagcccgtggcgtttatcgtgccggatggccagcatcacctgaccagcgaagagatcctcgactggctcaaggtcaaaatcgcccgctttaagctaccggcgcgcattattttcacccgtgctttaccgcgtacccacaacggcaaagtgagtaaacagcagctcaaaacgcgtctcgcagaatccatcatcacgctatcaacggaggataaaaagtgagcagcaaatttatcgacgcccatgaggcggcgcggtgggttgccagcggcgacaccgtctgcaccgtcgggatgacgcttatcggcgcggcggagtccattttaagcgccatcgaagcgcgctttctgaccgcgggcgaaccgcgtgacctgacgctactgcatgccgcggggcaaagcgatcgccagcgcggtatccagcactttgcccatccgggtatggtgacccgccttatcggttcgcactggggcctggcgccgcgctggatggcgatgatcaacaacaacgaagtggaagcctggtgcctgccgcaggggcagatcgttcatctctatagcgcgatggccgccggactgccggggcggctttctcccgtcggtctcggtacctttgtcgatccgcgcatagagggcggaaggatgaacgcccgcacccgcgaacgacccaatctgatcgagcacgtcacgtttcgcggcgacgaatatctgttttatccggctcttcctctggacgtggtcattgtgcgcggcacccatgctgatgaagacggcaacctcacgaccgatgaagaggtgatgaagctggaagtcctgcacgccgttctcgccgccagacgctacggggcgaaggtgctggcgcaggtgaaatatcgcgtagcgaaaggctcgctgcatccgaaaagcatcaccgttcccggcaacctgatcgacgccattgtggtatgcgaagagccgcagacggatcaccgccagacttcaagctgggccttcgacccagcgctgtgcggcgatatccagctgcccgccgcgcaaaatgcgccgctgccgctggacctgcgcaagcttatcgggcggattgcctgccgctatctgacccccggctgcgtcatcaatctcggcaccggtattcccaatgacgtgattggcgccatcattcacgaggaacagctcggcgagcaggtcaccatcaccgtcgagtcagggatctacggtgggcagcaggcgggtggcgtggattttggtatcggccgtaatctgagcgcgatgattagccaccaggatcaaatgctctactacaacggcgcaggggtcgacatcacctttatgggcgccggcgagatggacccgcacgggcacgtcaatgccacacggctcggcgcatcctgccccggcgcgggcggttttatcgatatcacccagaatgcccgccacgtcgtgttctgctcctcttttaccgccaaagggctggagatcgcctgtgaacacggggcgctgcatatctgccgcgaaggcgaggtgcgtaaattcgtcgccggggtaaaccagatttcttacaacggcgaactggcccgcaccaaaggacaaaccatgcattacgtcaccgaacgggcggttttcgaactgcgcccggaaggaccggtgctgacggaaatcgcccccggcatcgatcttgagcgcgacatcctggcgcatatggattttcatccggcgatcgccgcggatcttcaggttatggacagccgtttgttcaccccgccgccctgcggtctcgcggaacatctgtcccggaattcatcctctgactcataaggaacgttgctatgaaacttgccagtaaaaccgccattgtcaccggcgccgcacgcggtatcggctttggcattgctcaggtgcttgcgcgggaaggcgcgcgagtgattatcgccgatcgtgatgcacacggcgaagccgccgccgcttccctgcgcgaatcgggcgcacaggcgctgtttatcagctgcaatatcgctgaaaaaacgcaggtcgaagccctgttttcccaggccgaagaggcgtttggcccggtagacattctggtgaataacgccggaatcaaccgcgacgccatgctgcacaaattaacggaagcggactgggacacggttatcgacgttaacctgaaaggcactttcctctgtatgcagcaggccgctatccgcatgcgcgagcgcggtgcgggccgcattatcaatatcgcttccgccagttggcttggcaacgtcgggcaaaccaactattcggcgtcaaaagccggcgtggtgggaatgaccaaaaccgcctgccgcgaactggcgaaaaaaggtgtcacggtgaatgccatctgcccgggctttatcgataccgacatgacgcgcggcgtaccggaaaacgtctggcaaatcatgatcagcaaaatccccgcgggttacgccggcgaggcgaaagacgtcggcgagtgtgtgacgtttctggcgtccgatggcgcgcgctatatcaatggtgaagtgattaacgtcggcggcggcatggtgctgtaaggagaaaaacaatgacccaggctaatgatattgtgattgtcagcggcgtccgtaccgctattggcacgtttaacggcagtcttaaacatacccatcagcatgaccttggggccgccgtcattcgcgaagcgatcgcccgcgccgggattgcgccgcaggatatcgacgaaacgatcgtcggcaacgtcgggcaaatcgccgaaagcggttttatcgcccgcatctgccaactgcgcgcggggatcccgcaggagagcaccgcctattccgttaaccgccagtgtggttccggacttcaggccctggcggacggcatgatgcagctgcaaagcggccaggtcgaggtggtcgtcgcctgcggcactgaaaatatgacccagctgccctactacctgcgtaaagcgcgcgatggctatcgcatgggccatggcgagctggaagatggcctgatctccattctcacctggccggaaggcccttatcacaacggcatcaccgcggaaaacgtcgcgcaacgcttcggtattacccgcgaagcgatggacgattttgcctggtcgagccagcagaaggcgctgaaggcgatcgcggagggtcgctttcgcgagcagatcctggcccttggggggccggacggccaaacagcgacccgcccggttgcgaccgatgaacccccccgcgacccccccccggaaaagcccgccccgctccgcacggcgctcaaagccgaccgcggggggacgggggcccaccccccgggccttcccgccgcgcccggcggcc

SEQ ID NO: 163 - DNA, 46298 bp, Unknown
  source: /note="Description of Unknown: MKP2_2161_1 Mutant Bacteria sequence"
tcgtgtctgtttttgtgtgttgcggcgcgggcgcccgcccgagtccgctcttgccggctcgtcggcagcgtagggtgtgtataagagtcagatggatggccagccggttgcgctgcacggtcatcgctgcgcctgcggctgcacgctggtcagctctaacccagactgcggggttgatcagtgaggccggtaccggagtatcccccgtacggagacgcgcgaccgcctggtacggccaggtggctatcggcttcggccctgctggtcctgcttagcggcggggtcagcgctttacttgcctcgtcagaagggaaaagcgccctggccgccaccgggatcctgttggctctggtgctggcaggtaccggctggttgatccggctgctgtactaccgcatgagcgtgcataacgccaggttctatgaccaactggtggcatacgaacaacagcaatggtgggcggagcatcggcagccgatcgggttacaggaaggtctgttgctggggcccatgggcaaaacgaccactgactggctgcgggtgctaagccgtcaccagcgtccgccagaggaagagaacgagggcggcggcagggcgctgcgagcgccatacctttcagtttctgaggctatcgcccgcgaaaaacggctggcggaactactggtgatggaatggcaacgacagcgcagtgaaagaacgcttacgccgccgctgcgttgctactggcagggaacggagctcgcctggcaggcgtttcgtgcacagatgaccctcactgttgcgcagatgacactaccctcacgcccgtatgcctggcgtggggaggccagcctcgcggagatagcacacgctctggcggaagctgacccccatgacactgtgcttatcgccggatgtcaggtggttgtcgcccagacgggggcggtgcaacccgccggagagtctgcggtactgtggctcgccggacgagacggtccggtgcacctgaccaggggggaaatatattgcgcagaaaaaggggaggccctgactgctgtagccgctcgtgtgctggagcagaacgaactgagcggccccccggaagcctgtgcgctgttttttcagccggggctggaagcgctggcgcacagcggttgggatatcaacctgtatcgccaggatgcctgttggggagacatcggcgagatggaaggcttgaccgtcctgtcgctggcggcgatctacgccgcgcactaccaacaaccgtgtggctggctagcccgcgatcccttgaataccctcgcaattggaattgtaaaacctgatggacaacgtcaataaacctgcagctatctctgtggcggctacggttatcgtctgtattgctgcggtcacgcttctggtgctcctgggcgggctggcatggtggctatgggcgatggatcgtgccacgcagtgggaaacgctgcgcccgcttatcgccacgggctttattatctgggggatggcactcagcctgctggtactggggtttatggcctttcgactgctgataaaagataaggttaagccttcagcagcgcctgtgcggcaacccaccaggcccgccgggcgcgaagccctttatgccccgctgaaaaagcaccttcacgcacgttaccgcctgcgctggcggcgcaaagtccgcctgctgctggttaccggcgacgaggcagaaatcgaacaactggcgcctggtctgcgtcagcagcagtggcttgaaggtaaccgcactgtgctgatttacggcggtaacctgatcacagagcccgaccaagaaaaatacgccgcgctgcgcaagctgcgccgtggccgtcctctggacgggattgtgcgggtgatgccgtcgtctctgaccctgacgccgcagataagcgagagcgacctgcacgggctggaaaaaatcagcgaactgctgggctatgccgccccggtctggttatggaaactgtgcgacagtgagtggccgcaggctgaccgcgcggtgcaggcggtaggggttagcttcccgttgcgcgccactgaggaagatgtcgcccgtcagcttgcgcagatgttgcccacgctacgggagcaggggatgcaccagatcgcagcagatacccgccacgactttctgctgcgtctggggcagcagcttatcgacggggggatcgcgcaatggcgctggcagctggcgccgtggctgaccgcctcgcggcagcggcttgcgctgcgaggcctgatgtttagcctgccagagcctcgtaccgtagatccgtatcaggaggcggatacctcgcctgcgggccagcctcatctcctgacgctgcccgccacctggctggggatcgtcgatgactgccgccgtttacgcgggcatcacgtgggaatggcgtgggagcggggcctggcgtgcggtctgctggccatcctcggcctgtgggcggcgggactgctgctctcctttgccctcaattacagtcagattgcttcggtagcgggaaaagcccgcgacctggtggcccacccctccgtttttgactatcaactgacggccctccatgccctgcgcaatgaggccggccgtctcgtgcacgatgggcagaagggagcgccctggtatcggcgctttggtctggaccatcatcagcaactattaaacgccgtcctaccctggtacggtgtggcaaatcatcgcctgatacgtgacccggccaatgccgcgttgcagcaggcgctcagcgcgctggtcaactccgcccccaatagcgaccaacgagccaggctggcgaaaccgggctatgaccagctgaaagcctggctgatgatggctcgtccggataaagccgatggcgcattttttgcgcagaccatgaaaacggtccagccgacgcgaatggggatctcgaccggtctgtggcaaagtctggcgccggatttgtgggccttttatctctccctgctgcccgagcggccagagtggaagatcatcccggatgcgcaacgggtgagtcagagccgtcaggttctgttgcagcagctaggtcgccgcaatgccgaaagcaccttatatgagaacatgctcaaatccgtgcgtcgtaattttgccgatgtgtcgctggaagacatgaccagtggcaccgacgcgcgccgcctgtttaccaccgatgaagtggtcccggggatgtttacccgccaggcatgggaaggcggcattcagcaggccattgataaggcagccagctcgcgccgggaggaaatcgactgggtgctgagcgattcgcgcaaaacggtgtcgacagacctgtcgccggaggcgctgaaagcgcgtctgacccgacgctacttcaccgatttcgccggcagctggctgaattttctcaacagcctgcgactcaacccggcgaccaccattgccgatgttaccgaccagctcacgctgataagcgatgtccgccagtcgccgctgattgccctgatgaatacccttgcctggcaggggcaggcggggcaacaaagggaggggctgtcggacagccttattaaatcggccaaagatctggtgggcgggaaagacaagccggtcatcgaccagtcggcagccggcccgcaggggcctctggatgacacgttcggcccactgctccagctgatggggaaaaacacgggcagcaacgtcatgtcggccgatagcaccctgagcctgcaaacctatctgacccgtatcacccgcgtgcgcctgcgcctgcagcaggttgcgaatgcctccgatccgcaggaaatgatgcaggtcctggcgcagaccgtcttccaggggaaaagcgtcgacctgaccgacacgcaacagtacggtagcctgatttcggcaagccttggcgaagagtggagtggcttcggtaatactctgtttgtgcagccgctgactcaggcctgggaaaccgtgcttctgccgtcggcggccagtctgaatgataaatggcgccgctcggtggtcgccaactggcacaccgcctttgacggacgctttccgtttgccgccagcaaaagcgatgcctccctgccgatgctggctgagtttgtgcgcaaagacagcgggcgaatcgaacgttttctcacgacggagctgaacggtgtcctgcataaagaaggcagtcaatgggtgccggataaggtcaacagtcacggcctggtctttaatccggcctttctgcgcgcgatcaaccagctaagccagctgtccgacattcttttcaccgacggcagccaggggatcagctttgagttacaggccaggcctgccccggaggttgtcgagacacagctgacgatagacggccaaaagctgcgctatttcaatcaaatggccgactggcagactttccgctggccgggggagacgtataaacccggcactctgcttacctggaccaccgtcaatgcgggcacgcgcctgttcggtgactacagcggtacctggggttttattcgctggctggagcagggtaaacgccatccgctggatcgcagccagtggatgatgagcttctccgccccggatggccgcactctgcagtgggtattgcgctcccagcttgggagcggcccgctggcgcttctggcgctgcgcggattgaccctgccggatcagatttttactgtcgatgcggctgagagcgcacaggtcctgacgacgggggtagggaatagtgacatggatgagatggaattatgagtattttacaaaatttggttgccgccagtcagttggatgaaagcgtactgcgccagcaggcccggtcacgtcaggcgcagtggcagtcctggcttgcgccaatcagtgacgcccaaccaaccggggacgatccgggctatgacgatgattttcagcgtatccgcgatgaggtcaataagatctccggcgtcgataccgaactgatttgccagctggcagaaaaactgctgactcagacctgcaaggatctgcgcgtgatcaccttttacgtgtgggcgcgtctgcagcgggatggtgaaaccggtctggcggagggcgttacgctgctggcggcaatgcttgagcggtttggggctatgctccatccacagcgtgaacgtagctgtaaatcagcgctggaatggcttggcagtcgccggatgtcggacagcctgtctctttatccggaagtcgacatgaccactatgcaggtcattatcggggcgttattgctggcggaagccactttttccggcttggctgaagcatctcgccccgatctttccgggctatatcagatactggagaaccgcctggtgcaaagcggcggagcccacagtctggtgccgcagaccagccgcgaagaacacgatctgctaccccaacatacggacaccgcaccggtaatgcataccgtcacgtcaggtcgtgatttgctcgatcaggctaaggtgctggcgaaatatctgcgtgagtgtcccggcggatggctggcaggtcatcatctgatgaagagtgtgcgttgggatacgttaacggagttaccgccgctggatgcctccggccggacacggctattgcctcccaagcctgagagtaaagcccatcttaagcgtttgtatttacagaaaagctggtcggaactgctggagcatacggacacgctgttggcgcaaggcgtcaaccatctgtggctggatgtgcagtggtacgcctggcaggcgttgctgaaactggatgctgacagtgtacgggccgatatcctgtgccgggatatgaaagggctgctggctcgtctgccggggctggaaaccctggcgtttaacgatggtacgccattcgccgatgaagtgacgctcaactggcttaacgaacgtgtcctggatgagatggccggatggcaagatgagccggtaatggcggcgaccagcgctgatgaggtgctgtcgctggagccagaagtgctcacccgcgcggacgatgaaggtattgagtcggcgctgaactggttacaggcgcagccgggctataccaccagccgcaatcggtggctgatgcgcttactgatggcgcgggtcagcgagcagtacggaaaaaatgaaatggcgctgcatctgctggcggaactcgacagccgcgcccgggaaatgacgctcgaacaatggaagccggagcttatctttgaggtcaaagcccgccgactccggctgctcagaggcaaggccgggcgcagtgaggcagaaaaaaatcgcttgctgccagaaatggagtcattgcttgccgggctcatcgctctggatcctgctcgcgccgcggtgctgtgcgcataattcacgcatcattcacattgcactccctgcacctgcggttctctgcatatctgaaagctattactcatactggtgatttatggacgatttaaccttgcgttattacgacgctgaaatgcgctacctgctggaagcgggtgaagagtttgcccgcgctcatcctgagcaggcggcaatgctcaatctcgacaaagcgggcgctcgcgacccctttgtcgagcgtctgtttgaaggttttgccttcctgatgggccgcatgcgcgagaaactcgatgacgatctgcctgagctgaccgaaggcgtggtcagtctgctgtggccacattatttacgtaccattccctcgatgtcggtcgtggagttcacccccgactggtcggaaatgaaagagccgatgacgatggccaaaggctttgaagtgctttcccggccgatcggtgaaaagggcacgcgctgccggtacaccaccaccaaagcgatcgctctgcagccgttatccctggaacgcgtccagctggccaccgatacggatggccgttcggtgatcacgctgcgctttacctgcagccagctgacggactggcgccgggtcgatctcagtcatatcccgctgtactgcaacgccgatgcgccgctggcctgcgccatgcacgaggcctttaccctcaatgtggcccggatgtggctgcgcatccccgatgaggtggacagaaggccgctggacgggtatttcagcgcgctgggatttggcgaggatgacggcctctggcctgaagatggccgcagttttcgcggttaccagctgctgctggagtattttaccttccgcgaaaagttcatgttcatcgatctgcgcgggctggagacggtggtttttccggccggactggcgtggtttgaaatcgacgtcgtgctggcggaacgctgggaacatgacttccgcttcagcgaaaagcacctgcgcctgcactgcgtgccagtgatcaacctgtttccgctggagtccgatccgctgaccatcaattccctgcagaccgaatacccgctgcgcccgatgcgcgtgcaggacggccacaccgaaatttacaccgtcgattccgtgatctcctcacaccagcaggtttacgcgccgttctcaagttttcgccacaaaggcggcatgatgcgtcatgacgcggcggactattactatcatacccgggtgcgccgtggcccctccgggctgtacaacacctggcttatcgtcggcggagaagcctttgataatcataccgtaccggaagatgaaagcctgtcgctgaccctcaccggaaccaacggccagctgccgcgtcgcgcgctgcagagcaccgtgctcgatacggtgatgaaaaccacttccgccagtattgcagtgcggaacctctgcgcgccgacgctgccgtgctatccccccgcccaggaccgttttcactggcgggtgctgagccatctgggcagcagttttctttccctgatggataacgcggaggtcctgcgcggcaccctggcgctgtatgaatggaccgacagcgagatgaatcgtcggcgtctggaagccatcctcgacgtgaagcaccgcgcaacagagcgctttgcacagggccatctggtgcgcggcgtgcagattgaagtcaccctcgacagtcacggctttgccggacgtggcgatatatgcctgtttggcgagatgcttagccgcttcttcgcgctctacaccgacatctacttgttcaaccgcctgattatcattctgcaaccaaccggagaacgactggaatgggaagagaagcacagccgccgcattcccggctgaccccgcggctggaggccgacctgccgcggatcaatttttaccgcttctgccagcttctggaaaaacggcgtcccggccaaccgctgatggggggaaccagccatccggctgacgatccggtgcgtttttacccgcatccgggaatgggatttcccgccagcgaactgaaagccgtggaatacgatgaggccgatgacagcaggccgccggtcatccgcaccacctttatggggttgtacggtgtcgattcgccgctcccgacggcatatctcgatgatatcgcccagcacagggaagggcatgaagcgctgcagggcttactggatatcttcagccatcggatcatgacgcagttttaccgcatctggcggaaatactcctggcccgccacctttgagcccggcggcaccgatcgtctctcgcagtcgctactgggcctggcggggctgggcatccccggcacgacgcagcatatcgcctcgccggcgtcgcgctttctggcgctaaccggcgtgctgcgtcagccgggcaaaacccagcaggggatccaggcgctggtcaccctgctggccccggagaccaccgtcagggtgagcccgtacagcctgcgtccggtggcgatcagccagccgctggggttttacggcgatgacgacttcttcctggacggcaatacgccgctgggtgacgaagcgatggatgccagcagccagctcctcgttgcccttaccaccgacaatcccgcggaggcgcagggctggaagcctgacggcccgctgtttcgggactttctcatcctgctgcgggtatacctcggctggcgattccgggccaacatcaccctgaccgcgccgacccgactgctggctgtcccgccgcttggggacgagccgttctggctcggtatgaacggcgtgctgggcgtgggtgagggcgagagtgaggacgatattcctcagacctttaccaccgagctgggtacctatacgggcctgcagcctgccacctttctacaaggaaaccgacgtgttacgtataagtttgactaaaaccgcctgtctgctgcccctgcttgcgctttgcctgagcggatgcggactcacccagcgcgtctcggagggaacaaagtctgccttcaacgccgttttttataagaaaattaatacgctgcatctggactttaccgcgcgcgaagcgctcaacaccgatgccagagagaatcactcgctctctgaaccggtggtggtgcgcatctatcagcttaaagatcgccagacctttgaccggctggtttaccagcagctgctggaggagggggatattctgctcgccgccgatctcctcgccagtcgcgatgtggtgatcggtcccggaggggacgccagtctcaatatgccgctggaagcggaggcgacgttcgtggcggttgtcggcctgttccgccatccggacacacaaagaaatacctggaagcaggtgctggcgcgtgaggaattggatccggacaagccgcgcattttcaccgccgaacacaaccagctacggctcaggcctgaagcggcgaagtaacgtaaaaaaaaacaaacatttgcggcggggccatcgcgccagttcgccctcaatcttcgtaaccagcgaacgggcgataaccatcttgatccagccccagcggcttcaccacagcacagggagataacgtgacagcgagggaacgtttttttaagaaactgcagcaacagcaaaatccgcggcggacagcggccctcgacgggtcggccgccgcggatatcgccaggtttcgtcagcagatggcggagctggctcagcagataagtcagtggtttgatggaaccggtattgaggtggtgatttcgacccgccatctccacgacctgagtacccttggctacagcctcaacagcggcatctgccgctacgatatcccggccattcgtctgcaaaacggcgagcgcagcgtcaatatcgtgccgcagcagctgttggatggcgtggaaaaggggatcgtgaccctgagtcttgaggcgcccgacggcgcgggatcccgggaggtgttttatctgagcctggccccggaggagggctggatgatccgcaaggcgcaccagtccccggaagcgcggcttatgcttaccgaagatcgcttttttatggcggtcgacagcctggcctgaagatccctgacaggcgatgacgtccccgcggcggcggtgcaaagcgcgcatcgccgccctgaggtatcaggcgccaaacgctccgtcgatggtgtgcatggcgccagtgacaaacgatgcctccggaccggccagccacgccaccattcccgccacctcttccggacggccatggcgcttaatggccataaagctgtgcatcagctctttcatcgggccgttctccgggttggcgtcggtatcaattgggccgggctggacgacgttgaccgtgatgccgcgcgggccaaaatcccgcgccaggccgcgcgccagcccctgcagggccgatttgctgagcgcataggccgccattcccggcactggcatgcgatcgccattgaccgagccgatgacaataatacgcccgccttccggcatgcggcgcgccgcttcgacggaggcatggtagggggcatgaatattgatgcggaacaggcgatcgatggcatcgctgtcctgctcgagagcgtcaccgaaaagcgcgatcccggcattgaccactaacacgtccagcgggccgctgtcgcggaccaggcttatcaccgcatcgcgatcggcgctgtccgcctgcaccgccgtgctgccggtctctgccgccagccgctcggccgcttgcggcgaaccggaatagctaaacaccaccgacgcgccatcggcgacaaaacgcctgacgatcgccgcgccaattccccgactcccgcctaaaaccagcactgatttgttgtgaaacgctgtcatatcccgcacctcatgatattgtagtgatgattacaatatgctgcggctaaacaagctgtcaaggattaatatagtgaccactacaaaacaagggcgtactccgggacgtccccgccagtttgatgcggaacaggccattgaaacggcgcaacgcctcttccacgcgcgaggctacgacgcggtgagcgtggccgatctgacccaggctttcggcatcaaccccccgagcttttatgccgcttttggcagtaagctcgggctgtatacccgcgtcctgcagcgctacagccagaccggggccattcccatcgatgccctgctgcgagacgaccagccggtggcggcgtcgctcatcgccgtactgcaggaggcggctcgccgctatgtggccgatccggccgccgccggctgcctggtgctggagggggtacattgtcaggatgctgatgcccgggtggcggcaggcgaatggcatgctgcggcaagagccaaaatccagcagtatatcgcccgccatcgcccgcaggacgcgctgcgggtgactgactatatggatacgttgatgcttggcctgtcggcgaaagcgcgggaaggggatagtctgccgcgtcttctggagaccgtgcggctggcaggcctggcgctggagcgcatcctgccagcctgagtcgtcagatggtttgtccgcccgacacctcgatccgctgggcggtcacccagcggttatcgtcgcgtagcaggctggcgatcatcggcccaatatcctcgggaacgcccacccgtcccagcgccgtcatggcggcaaactgcgcgtttacctctgcgtcgtcccgcaccagcccaccgccaaaatcggtggcgatagcgccgggggcgatggtattgacggtgatgccgcgcccgcccagctcgcgggccatgtacacgctcagcatctccacagccgctttggcggcggcgtaggcggagaagccaggataggagacgcgggtcagcccggaggaaaagttaacgatccgcccgccgtctgccagcagcggcagcagggtttgtacgaggaaaaatacccccttaacgtggacgttaaacagcccgtcgaactgcgcttcgcgcgtttcggccagcggggcgaattcgccgtgccctgcgttattgatcaggtggtcgaaagtggcccgcccccagacgctggccagcgcgctgccgaggctgtcggcgaaggccgggaagctggcggtttgcgccatatccagcggcagggcgatggccttgcggcccagggcgcggatgtcggcgaccaccgcttccgcctgttcgagactgccgcggtaggtgacgatgacatccccaccctggcgggcgatatccagtgcggtctgacggccaaggccgcggttggcgccggtaataagtgcaatcttagtcatgttcggtcctctctggtatgtggagtccttacaataggagaggctcaccgggccgggttgcccaatccttgttattttttgcccatttctctccgttcactcccttttgccgggaaatagcgcatactcaggctttaaaacttgcctgaaaggatcttatgcgcgacgctctgttcgatctctgccgccggtttgccgatgctcatgtcgatagcagcggggtggcagttaccccggttcccggtattactctggtgcgggccctgcatcctggtgacctgcaggcggctatcgccaggccgctggtggccatgctgctccaggggcgtaagagcgtgaccaccggcctggcaagctttgactatggtccgggcgaggcgatggtgatcgccgcggatgttcccactaccagccagatcaccgaggccagtcagcgttttccctattacgcgctggtgctggagctggacctggctatcctgcgcgagctgcaggaggccgggccgtcagggccggatgaggcgccccgcgttggtatcgaaccgatgaacgccgatgtgacggatgccgcttaccggctggcaaggctgtttgatcaaccgggggcgctggcggtgctgggggaaggtctgcggcgggagctgcattactggctgttgcagagtgtccatgggccggccatccgggcgctgggcgccgtagacagccattcggcgcggatccgccgggcggtggcgatgctgcgccgggattttatgcagccagtcagcgtcgacgcgctggccgacgccgccgggatgagcgtctctgtctttcaccgtcatttccgcgccatgaccacgctgtcgccgctgcagtttcagaagcagttacgcctgatccacgcccgccgcctgatgctggcggaagggatgagtattgcacaggctgccggggaggtgggctatatcagcgtgtcgcagttcacccgggaatacgctcgcctgtatggcgcgccgccgggccgcgatcgtcgacgggaaaaaatgagcgcctgacctggcgcgcgggctgccggcagctcatccctgagcctgacgccggtggtttagtccgcgattttcgccgtgatatgcgctttgttgcccattcgcgcttcagtgatgcgataggtagtcacgccctcgcgggcggcatgctggcggattttgctctccgcgtggtccagggtatcgccggtggcggtgatggttctggcatttgccgccaggggcagcagacaactcaatacgatcagtggaattaacttgttcatcgtcattctgtcctgtgagagaaaatcagcgcgcggtctgcagccagccggcaatgtcctgggtcggcagctggtggcgggcattccaggtgtcgcccatcggccaccacacgccatccccccgggcgaaggcggcgcgatagcgcagcatggcgtcatccgggtttgtccgcagctgctccagcagggcgggcagggtgtggacggctttgctgaacgtctgctgcgttacgcgctccacggtatccgccaactgtcggtaagaggtcgtttcgccggcaacaaacaccacctcgttgacgatccgcggctgatgcagataaatcgccgtggtcaggcggccaatatccgccggtgaggtgacggtcacctgggtatcccagctgccaagggcgtgaagggttcggttggataaattcactacatcgaagtctggttcgaagagaaagctggtaaacatcccggtggagacaatgacccactccgtggcccgctgcgcgcgcagcaggggccggacatcgtactgctcgtcccagaccggctgaccgctgcctttgcctaccacatcgtaattgacgccaaactgccagggaaaatagcggggtaccccggccgccagcaccgcgcgggtaattttcagctgtgtccccggaccggcgacaaaccccatgcagttaatcacggtggtgaatccgcgaaactgatcggccagcgtctccatggcgctaccggcgatgtcgacggcgaggaaggtggctccggcgtcggccagcgcctgatggtttgccgaccgcagctggccggcttcatcccaggccgccggcgagacgatgaccgagaccgtgccctggcgctcgattaccgcaggcaccagcgcatcgagaacggcggcgcccagttgtcccgctcccagcaccaataccttttccgcatgattaaaattatcagttttcattttaactccttgctcagttaagccttgtgttgacgggctacaggctcagtgtagggggacggtcgacattcgataagtacagcgtttcgggttagactgttcgtaatattgggataatgagcgccggggggggtaacgaaatggataaactggatgccatgcaggtctatgttgcggtcgtggatgcccacagcttcgcccgcgcggcggaggtgctcgggcagccgcgctccacggtatcgcgggtggtgaaggagctggaagcctggctcggggcgcagcttctccagcgcaccacccgcaagctcagcgtgacggcggagggtcgccggtattatgaggagtgtaaaaggctgctggccgagatggcggcgatggaagcctcctttcccgggcgctcggctcagcccgccgggcggttcaaggtagggatgccgcaatcccttgcccgccactgcattctgccgaggatcggcgagtttttgcagcagtatcccgacctggagctgatcctctgctcaagcgacaacgtggaagatattattcaggagggattcgactgcgtgatccgtaccgggcggatcgaagattccaccaccctggtggcgcgtcctctggcccgctaccgctggatggtcctcgcctcgccggcctggctcgcggcccacggccggccgcagagcatcgacgaactgcaccagcatcgggcggtgggctacctgaatcaccgtaccgggcggaccatcgactggcttttctccctcgatgaaggcgactacgcgatccgcatgcgggagacgctggtggtcgacgataccgatgcctacattcaggccggcattcaggggctgggcctgatccgcgtcgccagctatctggcgcaaccttatctgcagagcggggcgctggtcgcctgtctggagcaggccgcttctgatcttcccttgtcgctggtctatccgcaaaaccgctatctgccgccggcggtgcgcgcgttttatgactggagcaggcgcgtgctgcaacccccgcacagcgaggcctgatgccggggcatcggcccggttattggccgcgcatggcctgttttaacttcgtcaccagccagttcagcgccggatcctgcgcccgccgtttgtgccgcaaaatgcacagcgtaaattccggatacgctaccggcggagcgtccgcgcgcagcgcatactgcgcctgccagcgctgcgccagcccctgcgggacggtggcgaacagcggcagggtggtcagcagcaggggaaaggtggagaaattctgcgtggcaaagcgcacgcgccgcgcgagtccctggctggcgagctggcggtcaatttcaccgtggccggtttcgcgataggccaccatcacgtgttcccaggcgacaaagtcgctcaccgacagcggcccgcggcaggggatctgctgcggcgaccacagggtggtgactcccatggtcatcactggctcgctgaccacctccccgcggctctgtttgttgacagacaccgcgacatcaatgcgctcctcctccagcaactggcgaacctggaaggggtcggcggctatcgactgcagtgacactccgggcgcctcctgcatcagcccgggtaacagcgggggcatcagccagtgttcgctccagtcgctgaggccgatgcgaaaaagctgctgcgcgcgcgccgggacgaactctccggcgccaaacatcgccgaatgaaggttttccatcagcggctgcaggtcggtcatcagcgcttgcgcccgcggcgtcggcagcatgcctctggcgctgcgcacgaacagcgggtcgtcaaacatctcgcgcagccgtttcagcgccccgctgatagccggctggccaagatgcagtacctctgcggtgcgggtgacgctcccttcgcggtacagcaccatcaagactgtcaacagattcagatcgatacgactaaaatcattttcaatgattttgttcattatgataatcaatttgaatgtgggttatcccggcagcatagtgaatatcaccccgataaatcaaccagcgcaatgcgcgcggagggagtgatgcaaacttaccagacaggcgatagcctgattttcaaagtgccggagcgcgagatttccctgcagccggcagcgctctatccagaggcgttcccggtagcggaggcggaggccgttattcagccgattgcgctgtcaatccacagctgggtggtgcagaccccccacgatctgattgttatcgataccgccaccggcaatggtcgggagcgcggcggcaatccgctctatcatcaacttaacacgccgtatctggagaatctccgcgccgcgggggtgaacccggaggacgtgaccctggtgctactgactcacctgcataccgaccatgtcggatggaataccgtctggcaggacgatcgctgggtgccgctgtttcccaacgcccgctatctgtgctcggcaaaagagctgtcgcgggtgaaaaacagcgaacgctaccgggcgctgtggcttgacagcctgctgccggtgattgaggccggccagctggagaccgtcgatgtggcgacccggccgcgggtcggcggacggatcgactttattcccacccccggccacagtccggaccatgccgcgctggtcctcgccgccggagatgactacgcctgtttctccggcgatcttctgcattccccgatccagtttgcccatccgcagtggaattcagcgttctgcggcgatccccggcaggcggaagtctcgcgacgggagatgatggcgtggggggcaagccatcatgctcaatggttcaccgggcattttgccgggccttcctgcggctggctggagaaggataagcaaggtgactatcgctggcgagaggccgggaaacaggctgcagataagggagaagagtgatgaataatgcgcaaagcgtgttggtctttggcgccaccggtcagcagggcggctcggtggcgcgggcgctgctgcaccgcggctggcgggttcgggcgctggtcagggatcctttctccgccggggccgctgcgctggcggcgcggggagccgagctggtcgtgggaacctttgaagaccgggcggcaatgcggtcggcgatggccggggtcgacggcgtcttcagcgtccagcccagttcgccgggagggacggtgaccgatgagcaggaggtacgctacgggataaccatcgccgatctcgccgtcgagtgcggggtgaagcatctggtgtacagctccggcagcgcgacgggggagacgccgaccggcgtagcgcattatgacaccaaagcggaaattgaacggcatattcgccgcctgccgctggcggcgaccatcgtgcggcccgccacctttatggagctgctggtgatgcctggttttggccttgatgaaggtcgttttcaattttttatgttgccggaggggagaatgcaggtgctggcggtggaggatatcggccatcttgtcgcggcggtttttgccgcgccggcgcggtttgccggcaagacgttcgagatcgccagcgacagcgtgaccggtcgtcagctggaggtgttattctccgcggcggcgggacggccgatcccctattcgcgattttccgacgaggtgctggccgccagtccttttctgcacaagctgaccgggctggtggacgacgggcggctggccgggcacgccgacctcgacgccctgcgccagctgcacccgcagctgtacaccttcgccggctggctggcaggccccggccgtcccgccttcgagcgggcgctgaccagcggggctcgctgggcgtttgatcgttaaaggctggtgttctggttacccgccaggcgcgctgtctcgtcggtgaccggccgccgctagccggcagtcaggatcgcgtcggccagcaccgctaaaatccgctctgcgcgcggggcatgggacggttgctcccgcagccaggcaagcgcggcgatcagatcgaacagctcctctccgctgagatctggccgtgccagcccggcctgctgcgcgcgggtaagcagcgacgtaccggcggcgcgcagggcaacgcaggcgctgtgcagggcggactcaggattgtcgatggcgctcatcagcggggcgatgatcccgcgatgctgatgggtaaacgccacgctctcggccagccactccagcagcgccgcggcaggatcggcggcgagcagaagcgactcagcccgggcggttagcgccgcaaagcggctgcggagcagggcttccagcaggctgtcgcggttgggaaagtggcgatagagggttcccattccgacgcccgcccggcgggcgatatcgcgcagcgacgcctcggcgccctgctccacaaagacgtcccgggccacctcgatcaacaggtcataattttttctggcatcagctctcattggcgttccttgacaatcggagcactgctccatatattcggaacagtgctccgttaaatataacgcatttccatatgaggagaaagcgatgtcgacgcagatgatgaaggctgttcaacagcactcctttggcgggccggaagtcctgagctatgaggatgcgcccatgccggtcctgcaggccggtgaagtactggtacaggtgcacgcggtgggcgtgaacccgccggacagctatctgcgcgatggctatcaacagctgcccccggagtggcggcccgaggtccgctttcccttgatcctcgggaccgatctctccggggtggtggtggcgcgggcggatgacgtccgggaggtggcggtcggcgacgaagtgtatgctatggcgcgttttcccgaaggggcggcagggggcagccgcgcttacgccgagtacgttagcgtgccggtcagcgacctcgctcgcaaacccctaaccctgagccatcagcaggccgccgcggtgccgatgtcgctcctcaccgcctggcagttcatgatcgatcccgggcatgaggtggcgaatccgctgcagccggggccgcatcggccggtgccgctggcgggtaaacgcgtcctggtcaacggtgcggcagggggagtcggtcatttcgccgtgcagctggcaaagtggcagggcgccgaggtgattgccgtcgccgcgggccgccatgaagcctttttacgtcagctcggcgccgatagcgttatcgactatacaaccaccgcagtggaagagacggtgcgtgacctggacctggttattgatgcgccgggcgggccggccagcggccgttttttgcgtaccctgcaacccggcggcgcgctgtacccgatctttccgctcggctttgccggggcggaagaggcgcgacagcgcggagtgacggtctccaccacccaggtacgctccagcggcgcgcagctcgcccggcttgccgacctgctggacgtcggggtcatccaggttgcaattgacagcgttttccccattgcgcaggcgcagatggcgcatgagcgagcagcgcaggggcatcttgagggcaaaatcgtgctgtcggtgatggactcgtcagccgggtaatccccgacggccagggttgcgtttttgcttctccctgcggcggactaaaacagcgccagccgggcaagacggtccagcgcgttgctcagcgcctcgtcccctgcggtcaggctgatgcgaataaatccttctccccctgcgccaaaacccgtgcccggcgccaccagaatatgcgcttcctgcagcagcaggcgggcaaactcctgcgaacggtagccgggcggcacgccgagccagaggaagaaagtgccttgtgcgtcacgcgccggccagcgcagcgcagccagtcgacgcagaacccactcccgacgttgatgatagaccgccgtcagctgcgcaatccgttcggccggcaggttgagcgcggcgatcgccgcatcctgaatcgcgccaaacaccgtactgtagctatgggtgtgcagctttttaaacgcccggataatcgaggcgttgccgaccgcgaagccgaagcgccagccggccatattaaaggtcttggaaaaagtataggtttccactccccatgctttggcgtcgggctgggagaagaggctcagcggcgcatcgctggccgcgctgccgatggccgcataggcaaaatcatggaggatcggcacctggtgacgacgagcaaactgcagcgcgctggcgaacagcgccggcgtggcgagggcgccggttggattatgcggatagttaagcaccaccagcccggccttgtcagcgacttcccggggaagatcgttaaaattcggcaggaaatggttctccgccctgagcggcaggccataaaacgccgcctgggactgcagcgccgccgagcggtaaatcggatagcagggatcggtggagatgaggtattgcccggggctgagcagcgcccgcgggatgccgcctataccgatatgcgacccctgaaacacggcgacttcgctgtgcggatcgagttccacatcatactgccggcgatagaaccgggcgatcgcctcgcggacctgtggtttgccccagaacgacgggtagccatggttttcacgacgatgaatagcgctctgcagcgagtcaatcacttccggcggggtgggttgatccggactgccgctggaaagatcgatcagcggcagcgcttcggtgttgacctccgcggccagtttttccagcaggctgaacagattctcttccagggcgtccaccagcggcgaagcagtaaaatcaggcataacattcccggtttaaatcacgaataattaaccatctttaagggatttatagcggctggctaaataacaatatacgcaaaagattcttgtttttaagatatgtcggtatagcaaaagttaatgaggaattagcaaaaggaaattcggcgttctggcttacaacccacagtcggctgtgatttaatcgttcaatatcgccaaccctccaggaaaataccttatgaacaagtcagttgcgcgcgggatcgctctcgccctgttgtcggccacctctttttatgccgccgccgacgctcatcttatccgcgtcggctttaaccccgggccgtataaagaacaatttgagaaaggcgtcgcgccctatttattgagtaaagggtataaaatcgaatataaggatttcagcgacggtattcaggtgaatgacgcggtagcccgcggcgatatcgaagcgaatattatgcagcatccggtatatctgaaagcaattaatgagcggctggggatcgataacgtgggcattgtgcaggtccccacgccgccgatggggctgtatggtgggaaactgaccaccctggggaccccggcggcgggcaccgtcgtgtcggtaccaaaccagccgtcaaatgaatatcgcgcggtactggtgctggagagccttggctgggtgaaaattaaaccagacagcgatccggccactttttcgcagcgtaacatcgtagataatccttacaaaattgtcctaaaagagatggataatgcccagcaggttcgcgctctgccggacgtcgactatggcctgattcagggcaattttgccgtctccagcggtatgtccctgacctcggcattaaagctggaagcagccaccagccattttattaatgtcgtgaccgtcgccggtaaaaatcagaaggcgcagtttgccaaagatattatcgatggctaccactcggccgagttcaaaaaatatattctcagccatccgcagtatgatggttacctgctgcctgactatttaaaatgaataacgcgatgatagaatttcgccacgtcagtaaaagcttttccaggaaaggacatccggttctggccttgcaggatattaatctcagcattgagcgaggcgatatttttggcattattggctacagcggggcaggaaaaagcaccttattacggctgattaatcgtctggaaacgcctggcgagggcgaggtactgttaaacggcgagccgctacaggcctgcagcggccagcgcctgcaggccatcaaaaaagatatcggcatgatctttcagaattttaatctgctgaattcgaaaaccgttttccataacatcgccatcccgctgattttacaggggcgcgacaaggcctttatccaggcgcgggtggcggaactgctggcgttcgtcgatctgagcgacaaaatccacagctaccctaatgagctgtcgggcggacaaaagcagcgggtcggtattgcccgggcgctggccaccaacccgtcggtccttctgtgcgatgaagccacctcggcgctcgacccccacactacggtgcagatcttactgcttttgcaggagattaatcgtcggtatggcatcaccatcgtattgatcacccatgagatgtcggtgatccagaaaatctgtcacaaggtggcggtgatgcaggcgggccgtatcgttgaacagggggcggtttttgatctctttgctcagccgcagcatccggtcactgccagtttcgtgcagtcggtggtgcacgaccgcctgccgcagcgggtggcgtcgttcctgcagcgcgataacggcgcccgggctttacgcctcgaatttgtcggcgcgacggcgcagcagccgattattaaccacctgatccgcgagtatgctgtcgaggtgaatatcctgtttgccagcatgtctgaagttcagggccggattctgggatttatgattgtgcagcttctcggcgagcctgacgaaaccgaacgcgccatcacccatctggtcgatgcaggagtgaaaatcacccatgtttgatcttattgataccgccatcaccggcgatcagtttctgctggcgctgcatgacacgctgattatggtcgccgtctcgctgggctttggcgcgctgatcggcgtcccgctggggattgtgctggtggtttgccgtcccggcggcatcgtggccaacccggtggtgcatcaggcgctgaatccgctgattaacgtgctgcgctcgctgccgtttatcattttgctgattgtgatcctgccctttaccagactgctggtgggcaccactatcggcaccgcgggagccatcgtgccgctgatcgtctttgtcgccccctacattgcccgattagtggagagctcgttgctggaggtggatgaggggatcctcgaggccgcggacgccatgggcgcaaccccgctgcagactgtctggcactttatgctgccggaggcggcggcatcgctgattctggccctcaccacggcgaccatcggtctgctcggcgccaccgccatggcgggtacagtgggcggcggggggatcggggatctggctattacctatggctatcagcgcttcgacgctttcgccaccctcactaccgccctggtgctgattgcgattgtccagcttatccagacgctggggacccgcctggctcgccggctgcgccgtgaataactgccaattcgcaccgggatccgcgcaataaaggtaaggcgatctccaacgctctccagaatggcagggcgatattaatgcggcgtaaagaaattctgagaatatatataatggattatataatcacgatgtatgctaattgcttatatcaatctgaaaataactaaaggagagggggtgacacgctttttgattgatcttgccaacggctttgttactatccgggcggcattcgattttatttaataatgtctgataatggaatagcaaaatacataatggagtatgaaatgaagcatgttcacaagctggcctggataggcctgttcgtcaatattattatctgttttgtcgcgcgaaatttattacttgatgaaggacagctgaacttccatagtcgggcggacggcgtatggtcctggctggtgctggccctgtttattgccgtggtggttcaggcgatcagcataatgctgtcaggccgctacccttatctggccatcgtcctggcgtttattggcggcatcgtgatggtgcccgccagcgtgatctttctggtgggtagtctgttcagcttgcaaacgcggattaacgccggatttacgccctggcgatcaaccacggcagtgggcgaggctgataaccagcagctattaacctttaatgcctcaggcttttatccccaaggggcgctggcgctcatcgccgggatcattattttaatgattggcatgggtataggcggagtatttattgccgccggtattgttgcgctgtgcaatggctatcgtctgcaaaatcgggtggtgattggcgtgagcggcgagtcgatgatatttacgccggggctctatgccgatacctacgttattcccttgcgggatgttgccgtagttgaacgcagcaataatgatgcgaaagtccgactgctgatccgttccagcggcagaagcttcacgttgcgtaaaaaactgctcgccggcgataaggttaatgacgccttcgccgccattctggcaaaactgactaccgtttaatgctggcagaatagagaagccgccaggcggcgcgaggcgtcctggcggtgaaaggtggagttagcctgcgcggctaccgcaccagcttgtctcttacgaacagcactgcctgttaatccacgttagtaaaataatcgcgcgcggcggtctcgacgcgtttcgcatccagcccggtcttctcagtgatctgttcgataaacgatttaaatttttcgctcatcacgttacccccttcccagtgggcgacgtaaaatttgcactgatagcgataaaaatggagagtggtatctcctaacgtgtaatacatgcgcttctcctgtccggtagtacggttgccgcgtccacagcgtcagcaacctctttctcattacgatcgatctgcattctatcctcctcccaattggctgaaatttccagcggtgctttgcgccatggagcaggataaagcaatgttaatctgcggatagatagtgattttttctaatgtggagcaaaagtagcggttacctgcgggccgcgcaggtaaccggagaacagggcggattagcgcagcgtgttgcgctcgtcgtcggacaggtccagggtctgcaccataccactttcagcagagcgcaccgccgcttccagaacggccatcaccgccagcgcttccaccggcggcaccggattggcgatctggcccttcagcgcatcgcggatcagcatatagtactggcgctgatcgccctgcggggtagcctgcgcgtgggcctgcagcgaggcatcatagataaccagcgggtcgtcatcctggccccagccggcgctgcccggtaccacgcccgccagcagctggctctcctgttggtcggcccgcgctttgataacgctacctttatcgccgtgcacggtgaagcgcgacgagccgcccgcgaccagcatgctgcagtgcaggatcactttatgcgccgggtagtttaataccacatgcgcccagtcgttgatctccgcgccgtcgcgcagggtggctatgttaccttgcaccgactgcggcaaaccaaatagctgcagcgcctggtcgatcaggtgcggccccaggtcgaaccacaagccgctgcccgggacgttctgctcgcgccagcggacgcggacttccgggcggaagcggtcgaaatgcgactcgaagtgtttcaccgcgccgagggtgccttgctcaatcacctgacggatcccgagatagtcgctgtcccagcggcggttatggaagacggaaagcagacgctgtttctcctccgccagggcgatcagctcccgggcctcctgcatatcgagggtaaagggcttatccaccaccacatgtttgccggcgttcagcgccaggcgggccagcggggcgtgcgtggcgttaggggaggcgatgaccaccaggtcaacgtccggatgctggaccgcagcttccggggaggcgatcaccgtgacgtccggcaggtcgcgtttgaccttctcttcatcgcgggaagcgacgaacgccaggttcagccccggcaccgaacggataagcggcgcgtggaaggtcttaccgacgaatccgtagccaatcagggcgatatttatcgtgttgttactcatcaggttctccacgttgttaagcgtcagcaatatgtacagagagggcggggtcatcccccagctcagcccagggacgatcaagaaaaagatggtgaatgtcgctgagtccggccacccgccacggttcgcagcggttgagtttggtatggtccgccaccagccagtgctcggcgctggcggccagcatggcgcgtttaacgtcggcatcagcttcctggctggcgctcagccccagcccggcatggagcgcgcaggtgccgagaatggcgatatcggcccggtagcgggtgaccagcgacagggtggcgctgccggcgaacagccgttgtttactatcccactggccgccaagcaggatcagctggatatcggcacggtcgctgaacagctgagcgatatccagagaagccgtgatcacggtcaacggccctttcagctgggctgccaccgccagcagcgtgcttccggcgtcgagaaacagcgtcgagccagagggaatgcgcgcggccacctgctgacccaggcgctgcttggtctgggtgagaagagcgtttctgccctggcgcgtcatggccgggacgttaagggcgatggccccgccgtggcttttctgcagcacgccctgttgttccaggtcgctcagatcgcggcgaatggtatcggccgacacctgcagatctgcaaccagttcgctgatgctcagctgaccggtttcgctaagcctgtcgagaatatgtttttgcctggcgagcttatgcatggccattgactccgcaaattaacgcaataaacagcataatacagcaagaagttgcaaaataaacggcaaaacgtcgctctgtatgtgttgaatcgtgaagaacttgatttcactaagttttaacgttaaatgaggggagcgccgcgaccggggcgaaagcgcttttcaatgaagcgactaggcctgtatttccgggtcattaaaagcaagaatgcgcgctttcgcgtaccttatagagaaggcgcgtaatttagcagatatggattaacggaggttgagtggacgcgattaaaggctcggagttgcagataccggacgcgatcttcgcgtgggtgctcgacgggcaggggggcgttaagccgctcgccgatgacgatattatcgacaaagacaagccttgctggctgcatctcaactatacccatagcgacagcgccgactggctggcggccaccccgttgctgcccaataacgtacgcgatgccctggcgggagagagcacccggccgcgggtgacgcggatcggtgacggggcgctgatcaccctgcgctgtatcaacggcagtaccgatgagcggcccgaccagctggtggcgatgcgcctgtatatggatgagcggctgatcgtctccactcgtcagcgcaaagtcctggcgctggacgatgtgctgggcgacctgaaggaaggtaatggcccgacggacggcggcagctggctggtggaggtctgcgatgcgttgaccgatcatgccagcgagtttatcgaacaactgcacgatcgcattatcgacctggaagacgacctgctcgatcagcaggtgccgccgcgcggatttctcgcgctgctgcgtaagcagctgattgtgatgcgccgctatatggcgccgcagcgcgacgtttatgcccggctggccagcgagcggctgccgtggatgagtgacgatcagcggcggcgaatgcaggatatcgccgagcggctggggcgcggtctggatgagatcgacagctgtatcgcgcggacggcgatcatgagcgacgagatcgcccagattatgcaggagtcgctggcgcggcggacctataccatgtcattgatggcgatggtgtttctacccagcacctttttaaccggcctgttcggtgtcaacctcggcgggatccctggcaacagctggcatctggggtttagccttttctgcttgatgttagtcgttgtcatcggtggtgttgcgtggtggttacatcgcagtaaatggctgtaaagaatcgccttttagcggctgtagtgccgggaaaacccggcaatgtttgagcgaaatcaataaaccatctacccattcagggcaatatctctctcgcaggtgaatgcaacgtcaagcgatgggcgttgcgctccatattgtcttacttccttttttgaattactgcatagcacaattgattcgtacgacgccggctttgttgagtcggctttttttttgcgctctccggaccagcttctacccttactaggacacccgacggtttctggccgttgacgcttgcgggtacgcccgtatcactctccgggaggcctctatgtattacgcttcagggctgacagcccagtctatccctatctcgcccgagccgaacgatccggctcctttacccgacccacgaccgcgtccgcagccccagcccgatccgccgcctgacgaagagccgattaaattgtcgcatcaggcgcggagatctgcgaggatacgcgcctgcagattgtctgccttttaatacgagaatacattgtgaccgctttttctaccctgactgttttacctgccgcccaattagccaaccttaacgagctgggttatctgtcgatgaccccggttcaggccgccgccctgccggcgatcctcgcggggaaagatgtgcgcgtgcaggcaaaaaccggcagcggaaaaacggccgcatttgggctgggtctgctgcagcatatcgatccggcgcgcttcgagacccagtcgctggtgttatgcccgacccgcgagctggccgatcaggtcgccggcgagctgcgccgcctggcgcgctgcctgccgaacatcaagattctgatgctctgcggcgggcagccctttggcgcccagcgagattccctgcagcatgccccgcatattatcgtcgccaccccgggccgtctgctcgatcatctgcagaagggaacggtctcccttgacgcgctgcagaccctggtgatggacgaagcggaccgcatgctcgatatgggctttagcgatgccattgatgaggtgatccgcttcgcaccggctgaccggcagacgctgctgttttctgctacctggccggcggcaatcgcggcgatcagcggccgggtgcagcgcaatccgcagacaattgagatcgacactgtcgacgcgctcccggcgattgagcagcagttctttgaagtttcccgccacggtaagattgccctgctgcagcgcctgctcagccagcatcagcccgcatcctgcgtggtgttctgcaataccaaacgcgattgccaggcggtctgcgatgcgctcaacgccgccgggcagagcgccttgtcgctgcatggtgaccttgagcagcgcgatcgcgatcagacgctggtgcgcttcgctaacggcagcgtccgggttctggtggcgaccgacgtcgctgcccgcggtctggacatcaaatccctggcgctggtggtgaatttcgagctggcctgggatccggaggtgcatgttcaccgcatcggccgtaccgcccgcgccggtgaacaagggctggccatcagcttctgtgcgccggaagaggcgcagcgcgccactattctggccgacatgctgcagctttccctgaactggctgccggcgccgacgggcaacaccatcgcgccgctgacggcggagatggcgacgctgtgtatcgacggcgggaaaaaggcgaaaatgcgcccgggagatgtgctgggagccctgaccggggatatgggctttgatggtgccgatatcggcaaaattaccgtccaccctgcccacgtctatgtggcgatccgccagaatatggcgcagaaggcgtataagcagttacaaaatggcaagatcaaaggtaaatcctgccgcgtacgactgctgaagtaagggcaggagagtgcgtctcaggcggctgcctgagacgcgtgagggttatttcacttccactacgttcagacgcagctcatcgagacgggcgtcttcttcttccggctgccagccggcgggctgcaggggaatatcttcccggtcaaacgccagatcgccaccatccaccacctctgagccgtgggtgatgcctttaaaatcaaacagattgacgtcgctcaggtgcgaaggcaccacgttctgcatcgcgctgaacatggtttcaatgcgcccaggataacgcttgtcccagtcgcggagcatatcggcgatcacctggcgctgcaggtttggctgcgaaccgcacaggttgcacggaataatcgggaagcctttggcctgggagaagcgctcgatgtccttttcgcggcagtaggccagcgggcggatgacgatgtgtttgccgtcgtcgctcatcagcttcggcggcatccctttcattttgccgccgtagaacatattcaaaaacagcgtctgcaggatatcgtcgcgatgatggccgagggcgatcttggtcgccccgagctcggtggcggtacgatagaggatgccgcgacgcaggcgagagcacagcgagcaggtggtttttccttccgggatcttctctttgacgatgccgtaggtgttctcttcgacaatcttgtattcaacccccagctgctccagatacgccggcagaatatgctccgggaaccctggctgcttctgatcgaggttcaccgccaccagcgagaaggagatgggcgcgcttttctgcagattgcgcaggatctccagcatggtatagctgtccttgccgcctgaaagacaaaccataatgcggtcgccctcttcaatcatattgaagtcggcaatcgcctcaccgacgttgcggcgcagacgtttctgcagcttatcgatgttgtacttttcttttttactgatttcttggttttgcagcatgtaatagtggctcaattcatagtgtggcatcagaagagcacgcattctgccagccgctgaacaacgtggcgctggcgcgtagcaattattgaggtttgacaggcaaccgtggcgtgtatggtacggattcaggggcggaatgtcagcatctttccggcactttcggcagcgagcagccaggcgggggcggctgatgcggaaataaaaagcccgccgggcggcgggctgcggcgttagcggaccaccagtaccgagcactcggcgtgacgaaccaccgcggcggcgttggagcccagcagataagttgtaatatccggtcggtgcgaagcgatgatcaccaggtcggctggcagcgacttggccagcgcaaggattttatcttttggcgatccttccgcgacgtgaaaatgcatccggtcttccgggatggagaactgcttcgcgatctctttcaattgcgtttcagaaccctcacgcagctcgtccatgccgggaagctcagcggtataggccattcccagtgaggcataatagggcagagaagggatcacggtgaggaaatgcacctcggcgtcgtcaatccgcgcttccgattcaacgtgactgataatgcgttcagtaaattctttatcagagatatcgatagggacaagaatcattctgctcataaaacctcctgtttaagtatcccttcatattgtacggtattagggcacgttttgtatcatgaccgcagtcacactttgacattaacgtagcttgcgttcgggaaattttcctttgatcaccccgtcataataccggccttttgacaccacctgtaaaaaatcatgaaaaatacgcggtgggaccccggtatattgtaatggcggctggtgatagaaatagatttccagtgtggcggaggcgtcatcgtaggcgacggagataattcgggaagatttaaccggatggtggtgcatgatggacgtcctcgggcaagcactgactggccatgactatatcattaaacggacggctattttagtccgcgagatatagcgttttgttttatctgcagcgaggcgggtgggggaaagcccgccggaaccggcgggcaggcgcatcagaactggtaaaccaggcccagggcgacgatgttatcggtagagataccgttgtcttcgtagaatttgtcgttaccatccagcaggttgattttgtaatcaacataggtggacatattacggttgaagtaataggtcgcgccaacgtccatatatttgaccagatctttatcggcatagcggccgttattgtacagatctttgcctttggactgcaggtaggagatggccggacgcaggccgaagtcgaactgatactgcgcggtgacttcgaagttttgcgttttattggccacgccgtcattgccgtacggggtcatattgcgggtttcagagtacatggtcgccaggtagatatcgttggcgtcgtacttcaggccggcggtccaggcttccgctttatcgccgcgcgcgttggtctgggtcatctgatcgttagtacggtcagacgaggtgtaagctgccgccgcgctgatgcccatgccgaagtcgtaggaagtagagaggccgaaaccatcgccattgtcgaagcgaacatcgctgtcgctgctgcggttattggtgccgacgttcatatcctgcgcgttctggccttcgtttttgccctgatactgcagggcgaagttcagaccctccaccagaccgaagaaatcgctgttgcggtaggttgcgacgccgttggcgcggcctgccataaagttatccgcataggtgtaggagtcgccgccgaactccggcagcatatcggtccagccttcaacgtcgtacagcacgccgtagttacgaccgtagtcgaaggagccgtaatcgcccactttgataccggcgaatgccagacgggtccacgcctgatcgctggaggtctcggtgttgttggcctgaacgttatattcccactggccatagccggtaagcatatcgttgatctgggtttcgcctttaaagccaaaacgtaaataagtttgatcgccgtcttttttcgagtcgctggagaaataatgcagaccatctaccttgccatagagatctaatttattcccgtctttattataaatttccgccgcatgcgcggcaccggcggctaataaagccggaataacgagggccagtacttttcttttcatgaagaaattcctttaactgtttttatgttttaacttccgggtgggaagtgaactcatgctaaaggagcggtctgagatccggtaagactcaattgttacgatataagtaaaatctaaaataaataataccaatgaaatggtgataattatgctgaatgcatttatagataatatacaaaataaaaattatacatgcccgggctaatcacgtattatttgcgcgttatatgcctttattgtcatgccaataatttattgttgccgtctcattctgcggaatgatgttgtttatcggtaaaacgacaagcccgaacgttgtgttcgggctttttttatggacagaggtgacggggcggttaaccttcgcttggcgatttctccgctttgccagccagctgggcgaggaagtcatagcgcttctgcagatcggcggcggcgtctttccatagctgctccgccacttcaggctgctgggcgttcaggcggcggaaacgttgctcattaagcagcgtctcggccagcgcgtctgatggcggacgggaatctagcgccagcgggatcttgccttcgtctgcccgacgcgggtcgaagcggtagagcggccagaagccggtggcggtcagctgacgcatctggtcgtggctgagcgccagatcgtagccatgctcttcgcaagggctataggcgatgatcagcgatggccccggataggcttccgcttcctgaatcgctttgaccgtctggttcagctgcgcgcccagcgaaatttgcgccacataaacatgaccgtacatcatcatgctgacgcccagatctttacgcgccttgcgtttgccatgctcgccaaacttagtcactgctcccagcggggtggcttttgacgcctgcccgccggtgttggagtaacactgggtgtccagcaccagaatattgacgttttccgtcaggctcagtacatggtccaggccgccgaagccgatatcgtaagcccagccgtcgccgccgatcagccagacggatttctccaccagcgcgtcggcatcggtcagcagctcttcagctcccgccacgccggccagcgcctgacgcagggccgccacctgttcgcggcgaacttccggcgtcgcctcggcgtgcagcgccgcgttcagctctgccggcagtttgtcggcgaattcgctcagcaggcgcatcacgcgctggcgatgctggtcgacggtcaagcggaagccgagcccgaattcggcgttatcctcaaacagcgagttggcccacgccgggccgcggccgttggcgtcggtagtgtacggtgtcgagggcaggttgccgccgtaaatggaggagcagccggtggcattggcaatcagcattcggtcgccgtagagctgggtcagcagtttgatatacggcgtttcgccacagcccgagcaggcgccggagtattcaaacagcgggctaatcagctgcgaggtgcgaatatcaatgcgctcaagtttgctgcggtcgatttccggcaggttgaggaagtactcgtaattgaccttctcctcttccacatgctccaggcgggacatcatattgatggccttgatctccgggttctggcggtcttttgccgggcacacttcgacgcacaggttgcagccggtgcagtcttccggggcgacctgcagaacgtatttctgcccgcgcatatcgcgggatttcacatccagcgaatgcaggctggcaggggcgttctccatctcttccggggcgaccactttggcgcggatcgccgagtgcgggcaggcggcgacgcagtggttgcactgagtacacagcgcttccttccagatggggatctcttcggcgatgttgcgtttctcccagcgggtggtgcccatgggccaggtgccgtccggcggcagggcagagaccggcagcgcatcgccgagcccggccagcatcgcggcggtgaccgttttgacgaaatccggcgcggcgtcggagaccaccggcgggcggttcggactgctggcgttcaccggctggagcggtacttccgccagtgattcacgggccagggccagcgcctgccagttgcgctccaccagctcctgacctttactgctgtagcttttggcgatggctgcctgcagttccgccagcgcgctatcacccggcaggatctgggttaaatggaaaaaggccatctgcatcacggtattaatgcgcgccccgaggctgcattcgcgggcgatctttgccgcgttgaccacgtaaaaacgcgcttttttctgattcagggtggcctggacttcctggggcaggcgggaccagacctcatcggcgctgtacggcgtgttgagcaggaaaatgccgccgggcttcagccgctcggccatctggtatttatcgataaactgcagctggtggcagccgacgaaatcagcctgcgaaatcagatacgatgaacgaatcggtttttcgctgacccgcagatgcgagacggtgaggccgcccgctttcttcgagtcatagacaaaatagccctgggagaaccatggggtcgagttgccgatgattttgatgttgtttttggtggctgacacgctgccgtcgctgccgaggccgtagaacagggcctcgagcttggcctctgccggcagggtattttcgcccaacggcagcgacaggttggtcacgtcatcatagatcccgacggtaaagcgcggcttcggctgggcggcctgcagttcactgaatatcgccagcacgcattccggaccaaactccttggaggagagaccgtagcggccgccgatagtgcgcggtagcgtctcgcgctcgccgcggttaaaggcttccgccagggcggtcatcacgtcgaggtaaagcggttcggcaagcgcgccgggttctttggtgcgatccagtacggcaaccgcgcgggcgctttccggcagcgccgccagcaggtgggcggcggagaacgggcgatagaggcggacttttagcacgccgactttctcgccgcgactcagcaactcatcgaccacctcttcgcaggtgccgatggccgagcccataatgacgatcacgcgctctgcctgcgggtggccgtaaaactcaaacggtttgtactgacggccggtggcggcagcgaaatcgtccatcgctttctcgacatggtcatacaccgcgtcgtaccacggattggtggcctcccgggactggaagtaagtgtcggggttggccgaggttccgcggatcaccgggtgttccggattgagcgcgcgctggcgatgctcagcgatcttatcctgcggcagcagggcgcgaatggtgtcatccgccagcggggcgattttgttgatttcgtgcgaagtacggaaaccatcaaagaaatgaataaacggcacccggctttgcagggtggcgatatgcgagatcagcgcgaaatcctgcgcttcctggacgctgctggcgcacagcatggcgcacccggtctggcggacggccatgacatcggaatggtcgccgaagatcgacaacgcatgggtagcgacagtgcgggcggcgacgtgcagcacaaacggcatcagctggccggccagtttgtacagcgtggggatcatcagcagcaggccctgcgatgaggtaaaggaggtggagagggcgccggtctgcagcgcgccatgtacggcgccaatggcgcccgcctccgactgcatttcgaccacgcggggaacatcgccccagacgtttttcagcccattgccggcccaggcgtcagcctgttccgccatcgttgaactgggcgtgatcgggtagatggcgataacttcactggtgcgaaacgcgacggaagcgaccgcgccattaccatcaatcgtaatcatatgaagacacccttacattgcgcaaaagaatggacgcgtgaaaccgcgacgcgccctgtaattatataaggggtagtttagcaaaccgctgaccccgccatttttgcatttgtgtcctcaatgcgccgggtacccgtgaccagatcaatattttgcgtggttcgcggagaaaatggctgcctgccgggagaggaaccacctgcgccgggcgacatggccgaggcagatcaagctttcggcgaaaatttgctagaaaatgttaatgaggcgcataaatacgtacttcccctctcgacgccgcccgccacgctgcctattattctggggtttgcttttttaagacgtttctgaggggagagagaatgcgagctgcgatgttagtaggatgtgcggcgctgttgctgtccgcgtgcagtagtgaacccgttcagcaggccacggcggcgcacgtcacgccgggaatgcgggcggcgatgagcgacgccggtcaggccaactgcgccatgataggcggctcgttatcggtggctcgtcagctcgatggttcggcgattggcatgtgcgcgctgccgaacggcaaacgctgcagcgagcaggcgctggcgggcggcagctgcggctactaacagcggccccgtcgcggggcagcgtcagcggcacatcaacgccggctagtgcatcaggtcggcgagcttatagaccagcgtctggtcggcggtcgccagcgtcaactggttttccgtcagatcgacctgcgcaccctcgcgcagcatcttgtcgatcgtcgcatccagggtattgagctgggcgtcgtggcacagcatccgggtcatcgccagcgatttgcccttccgctcgccgtccgacactttaccttccccgctaaagccgttgcacatattgccggatacatacatcttgccggtaatagccatcttctcaccgaagctcagctccagcggccggtcgctggcgttgaccgcctggccgttgacgctggtcagcacgaaacgatgatgctgcagctgttccgcaccggtggacactttactgttatagacacagccggacagcagcatacctgccgccagaagcgccgcaaatttgttcattttcactccaaaacattcacataactaataaaaccaagccagtgtaacggtatcgcagcagggatctgtgggggttatctgaatgtgctccccccgggagaggagcacaaaagggaaaggcgtcagacgatggcgttcggacaggtttcgccgttggcgacctgctgcaggttacccagagtggtctccgaaatgctgatcagcgcctcggcggtgaggaacgcctggtggccggtaaacagcacgttatggcaggcggagaggcggcggaagacatcgtcctggatcacgtcgttggatttgtcttcaaagaacagatcgcgttcgttctcataaacgtccagccccagcgcgccaattttctggtgcttcagggcgtcgatggccgcctgggagtcgatcagggcgccgcggctggtgttgatcaccatcaccccgtctttcatctgatcgaaggcttcgcgattgagcaggtggtagttttcgtcggtcagcggacagtgcagggagatcacgttcgattccttgtacagcgtggcgaggtcaacatattctacccccagctccagcgcggcggcgcttgggtacgggtcgaacgccagcaggcgcatgccgaagcctttaaggatccgcaacatcgctacgccaattttcccggtgccgatcaccccggcggttttgccgtacatggtgaagccggtgaggccttcgagggagaaattggcatcgcgggtacgctggtaagcgcggtggatgcggcggttgagcgacatcatcataccgatcgcatgctcagcgaccgcttccggagagtaagctggaacgcgcacgacgcgcaggccaagctcctttgccgcctcaaggtcgacgttgttaaacccggcgcagcgcagggcgatatatttcaccccgtgggccttcagctcttccagcaccgggcggctgccgtcgtcattgacgaagatacataccgcttcgcaaccgttggcggttttggcagtcttcgctgtcagcaggaaatcgaagaattccagttcaaagccgtatgcatcattaacgtgctgcaggtactttttatcgtactgcttcgtactataaaccgcgattttcataagacttttctccagtgattataccgtcacggtagcatatttaaaataatcgtacaattattaaaaaatagtttaatgagagggtgctaatcctaattctagagcatatcgcggacttgcggaatctctttgaaagacagtgtttttcaccacaaactgaggctgaaagcgccgggggcgagcagcagaagcggccacagcagaccggagctgacgttagccagctgaaacgaccacagcggcagactgctggcgccgctaacgaagggcagcgtagccctcaggggagagagaaagcggctgaaaaagatagcccacgagccatagcgctgaaagaagaggcggctgcgggccagacgctcggcggtcagccagcgtagatgggtgaggcgatgacggtagcgaatgcccagccgccacgatagccagaatccgccgatggcgccgaggctggcgctggaccacattaacaggaaatgtccgaggctggcggaagcgaatgtccccagcagcagcaggccggaggtgccggggattgccagcgagaccaatgcgcaggatttagtgaaggtaagcagaaaaacaatcagcaatacccatggatagtggtcctgtgcgctctctatgagcgagataattaacgacaccgcctctcccgcaagctattcccgtctggctggagtgtggcaggggcgacttaaacaacagttaaatgataatggccgaacgtcgcgccgcgagtccggctggcaactatgctttaacaggccgtaaactttcactcactggtcgaacgtgtcacaatggacgcctttcagcttttacttatgttgaatcaggatattaactgcccatgaagggtaaatataaagccgccatcgcgctggtgttagttctggtgttattgccgctaaccctgctgttgacgctaacccactgggtgccgacgctggcgggcatctggctgcccgtgggcacgcgtatctctttgcaggagagcccgcgcctgacgcggtcggccctgctgatccccgatctgcgttatctggtgggcgactgtgaaatcgcccgggtgaccgatgcccgtctctcgcgtcccagccgctggcggctgcatattggccagctggagatcaacagcgcctgcctgagcaaactgcctgccagcgatccctctcccggttcaccgcgcacgcttgccgaatggcaatcgatgttgccctatagctggttaaccgttgacaatctgcggctctcgccgtgggagaaatggcaggggcggctggtaatgtcattaacgcctgcgcagcaggatatcggctttgccgggaaggaactgagtctgcaggcgcgcctgcgcggccaggcgctcaccgtcagccagttcagcgcccggctgactgacgatcagccgccggtgaagctggtggggaccttccatctgccgctggtgccggatggtctgccggtcgacggccagatgcagggcaccttcgaattcccccagactgcggaatggatcgatgctgagctcgagtggcagcacaatcgcggccagctgctggtcaccccgcggggtgaggtagagcctattctggacctgccgtgggagatcactccggagcggatcaccatcagcgacggccgctggcgcacccgttacgaggcgtatccgctgcgcgggcgggtggcgctgtcggtgggtaactggcagcagggcaccgaacagatgatcgtcagcggtcgcctgaatgttctcaccgaggggcatgccgggaagggcaatgcggtactgaatattggtccgggcaagctgagcatggataacagcgatctgccgctgcggctcaccggcgaggccaagctgggggagatgatactatacgcggcgctgccggctcagctcagcgggccgctgatcagcccgcagctggcttttcaccccggtgcgttgctgcgctcgcgcgggcgggtgatcgacgcgctgaatattgacgaaatccgctggccgctggccggggttaaggtcactcagcagggcgtcgatggccgcctgcaggcgatccttcgcgcccatgagcagcagatgggcgactttacgctgcatctggacggtcaggcgagcgattttctgcccgacagcggccgctggcagtggcgctactggggcgagggacattttaccccgatgcaggcgcgctgggatgtgaagggcagcggggagtggcgcgacaatgctattaccctgagcagcctctccaccggcttcgataagcttgagtacggcacaatgcgggtcagcaccccgcgtctgaccctcgagcagccgatccgctggctgcgcgatgctgagcatccgcggttgaccggcgcgctgtcgctggacgccgccaaaaccaccttctccggcggcagctatctcccggcctcaacgctgaaattcgctctcgacggtcgggacccaacgtggttccagttcaccggcgccctgcatgccgaggctatcggtccggtgcgtctgtccgggcgctgggatggcgaacggctgcgcggccaggcgtggtggccaaaacagtcgctaacggtgttccagccgctggtgccgccggactggaagatgaacctgcgcgaaggcagtctctacgcgcaggtggccttctcggcggcagccgggcagggatttgaggcgggcggccatggcgtcctgaagggcggcagcgcctggatgccggataaccagatcaacggcgtcgatttcgtcctgccgttccgcttcagcgacggtcactggcagctgggcatccgccgcccggtctccctgcgcattggcgaaatcgtcaaccaggtcaccgcgcgtaatctgacggcggacctgcagggcacctggccgtggagcgaggccaatccgctgcagctcagcgacgtcagcgtcgatctgttaggcgggaaactgacgttgctgcagctgcgtatgccgcagcgcgacccggcgttgatccgcctgcagcatatctccagcagcgaactgaccagcgccgtcaaggtgaaacagttcgccatgtccggcgcggtgagcggcgcgctgccgctgtggctggagaataatcaatggatcatccacgacggctggctgcgcaatgacggaccgatgaccctgcggctggataaagacaccgccgatgcgctggtggcggataacgtctccgccggggcggcgattaactggctgcgctatatggaaatctcccgctcgtggacgcagattaacctcgataatctgggcgtgttgacgcttaaggccagcatcaacggcaccagccgggtggaagggaaaagtagtaccgtgcatttaaactacgctcatgaagagaatattttcgacctgtggcgcagtttgcgcttcggcgacaatttacaggcgtggctcgagcagaatgctacgctgcccgtacggcgctgtacggacggtaagacatgtaaggaacctaaatgaagaagctgttactggccatggtggcgtcgatgctgctcgccggctgtacgccgcgcatcgaaatcgcggcgtcgaaagagcccatcaccatcaatatgaatgtcaaaattgagcatgagatccatatcaaggtcgataaggatgtggaaaacctgctcaaatcccgcagcgatttgttctgaggcgacgatgagaaaacgactgttaaccgcggcgctgacgctggctttactctgcgcgcccgcgctggcgttgaccctgagcgaagcgcgccagcagggacgagtgggggagacgctgaacggctatctcgcgccgctgcgtcaggataaagagacgctggcgctggtaaagcagattaacgccgcgcgcagcgaaagctaccagcagctggcggatgacaacaatctgccggtggatgaagtggcgaaaatggctgggcagaagctggtggcccgcgcgcagcccggggagtacgtccagggattgaacggccagtggctgcgcaaataattagcgacagcgcttgcggtattcccccggggtgacgccaaagcgctgcttaaaggcggtggagaaatggctgtggtcgctgaagccccagcggtagccgatccccgccagcttttcatcgtcatggacattctgtaacgcctgggcacacagatccaaccgccggttcttaatatactgcgccaccaccagcccctggtcggcaaacagccggtacaggctgcgtaccgacatgcccgtctcgctggccagccactccggacgcagatgctccgactgaatggacgcatcgattaacgcaataatcttctgaaactgcttttcccgccgggaaggggcaggatcgcgctgatgcagcaccgggcgcaacaggcaggcgatcgcctccagcgcggcttcgctctcgctggcggagagcgtcgtgccgcccatgctttccagcagcagtcgctggctgagctggaccattggcagagatttgtccagccggcaggcggtagtgatgtcccctgtgggcgccacccgctggcgcggcagcagcagcgaggcctgacgcgaggtctgctgccagacaatcgagcaggggcgggcggcgtcgattaacgtgatatcgcctgccgccagcgtcacctggcgatcgtcctgttcgatgatggcttcgccggcgagctgaaacacggtatagaaccaggcgtcgttatcgcgttttatctcattgcgcgtgcggtagagattgacgccggcggcggtgacggtactgaccttgaggctgccggcgtagcgggcgtcaatctcgccgtggaaactctccttcagcggccgggcggcgaaatggccgcagacctgattgatcgtcgccagccagcgctgatatgccagccccccctctgccgtggtcatcattcgcccttctcctgtaataacaatgtttccgcattgttgcatttgtgtcgcctcaggcaagggcgcgatggcgggtatatgaaagaactattacccgcggcacatttctgcgagggcagacgacggaattgcggcgactgtcacagcggcgcaaacgaatgtcacagagaaaaaagcgccaaccgccaaccagacatagactgaaagcactatccgcgatgaataaggaaagggtatgtccacctcacagatagcgctgcttgcccgcgtccagcagtttttagaccgtcagcatggcctgtatatcgacggcgccccctgcgccgcgcagagcgaaaaccggttaaccgtctgggatccggccaccgggcaggcgattgccaccaccgccgacgccagcccggcggatgtcgaccgggcggtgatgtccgcctggcgcgcttttgtcgatcgccgctgggccgggcgcaccccggctgaccgtgaacgcatcctgctgcgttttgccgatctggtggagcagcacggcgaagagctggcgcaactggaaaccctcgagcaggggaaatccattgccatctcccgcgcctttgaggtcggctgcaccctgaactggatgcgctacaccgcggggctgaccaccaagatcagcggccggacgctggacgtttcgatcccgttcccgcaaggggcgcgttaccaggcgtggaccaaaaaagagccggtcggggtggtggcgggcatcgtcccgtggaatttcccgctgatgatcggcatgtggaaggtcatgccggccctggcggcgggctgttcgatcgtcatcaaaccctcggaaaccaccccgctgaccctgctgcgggtggcggagctggcgacccaggcgggcattcctgacggggtgttcaacgtggtcaccggcagcggcgccggctgcggcgcggcgctgaccgcccatccgcaggtggcgaaggttagcttaaccggctagacggagaccgggaaaaaaatttcccgcgtagctgcccaccgcccgggccgcgcgcacatggcgatgggggacaaaaagcggccgattgtgacacagcaagccgaccccaaagggcgcagtgagggagggctcagcggaagcatcctgaggccgggagaggacgggtcagagagcgcgaggagctaagtcgccgcgccagagatg

SEQ ID NO: 164 - DNA, 45981 bp, Unknown
  source: /note="Description of Unknown: MKP2_2161_1 Mutant Bacteria sequence"
cttctcgcgcggagggggtctgctgatggttgctctgctctcgcactccgtctccattgtctttttcgttttttttgtgttacgtgcaggcgcacctgcgaaacactccccagtccgcccggcggcagcgcaagagggggataagtgcgggacagcatcagcccgtgtcccgcctgaccggcgcggatggcgccctccgcagagaaggtggcgatccagatacgctccgccaactgcggcgccggcggatagagacggttgtccgggtggctcagcgtgtcgccgcgccaggcgctatggatcaggtgcagatggtcggcaaacgccgccccgcgctgctcgctggtcaggccgaagggcagaaacgaggttggcgtgccgccggagccaaaacccacctccagacgtccgtcggtgagtaaatccagtaccgccgcgtcttcggcgacgcgcagcggattttccatcggcaaggtgataatcgccgtaccgaggcggatccggtcggtctgcgccgcgacgtgggcgagaaacaccagcggcgaaggcaggccgccttcctgttcatgaaaatggtgctgggcaatccatgcgctgtcgaagcccaaacgctccgcgtggcggatctgttcggccgccagccggtagcgcgtttgcgcggagccctgatcgagcagacgggtaaaaaaaccgaggcgtttaggcattatgcgttctccgtgtgggcctgtgctaagcggggggaaacctggggaatggcggcgatcagttcgcgggtgtaggcctgctgcggggcggcgaacaggcagtttacgtcgccatgctccaccacctggccggcgcgcagaaccgtgacgctgtcggcgatccgcctgaccgtcgccagatcgtgggtaatgaacaggtagctcagacccagctgctgctgtagctgctgcagcagggcgaggatctgcgcctgaacggtgacgtcgagcgccgaagtcgcttcgtcaaggaccagtatcgccggctcgaggatcagcgcccgggcaatcgccacccgctggcgctggccgccggaaagctcccgcggcgtacgcgacagcagctcgggggccagggccacccgggcggcaacgctctccacacgctggcgacgcgtcgccgcgctgaggcgctcaaagttttttaacggctcttcgataatcgcaaacagcgtctggcgcgggtcgagcgaagcgaaggggttctggtagacaaactggatcttgcgccgcagctgacgctgtgcctcgcggctgagatgcccggcgtcgataccgtcgatgatgacctgtccggcgtcggcgcgctcaaagcccagcaggatccgcgccagggtggttttcccggagccggattcgcccaccagcgcatgggtgctgccgcgtctgacctcaaagctgacgctgtcgagcgcctgcagcgcctgtttgcccagcgagaagcgtttgctgatcccctccacgcgaatggccggcgtggccagcggccggtgacgcgccgccgttagcctcaacggcgcatcctgcaggtcgtggagcagctggcgggtgtaaggatgctgcggacgctggacaatcgtctcggtggcgccttgttcctgaatctctccctggcgaaacaccatgatccggtcggcgcgttcggcggccagcgccagatcgtgggtgacaaacagcacggcggtacccgactcgcgacgcaggatatcgagcaggtcgagaatgcgcttctgcaccgtgacgtcgagggcgctggtgggctcgtcggcaataatcagatccggttgcagggcaatggcgatggctatcagcacccgctgtttcatcccgccagacagctgatgcggatactggtcaaaacgctgttccaggtggctgagaccgactttagcgagcaggttaagaacctgctgtcggcgctcagcggcggagagggactgatgcagccgcaggatctcttccacctgctgaccaatggtttttaccgggttgagcgaattaccgggatcctgcgggaccaggctgatgctcactccgcgcaggcggttcaggcgtttatccgaccagtcgctaatcacttcgccattgaggacaatccgcccggcatcccggcgggcattatccgccagcaggccgataatggcctgcgcggtggtggttttccccgagccggattctccgacgaaggccagcatttcgccgcgctggatggaaaagctgatgttgtgcaccacctcgcgccattcgccccgcgagcggtagctgatgcgtagatcttcaacggacagaacggtcatgggcgtgctccactccactggcggctaagacgattggcggcaaggaccacggcgaccacggcgaggccggggaaggtggtcagccaccaggcggttgacaggtaattgcgaccttcggcgatcagtagtccccactccgggaccggcggcggagtgccgtagccgaggaagctgagggtggccagggccaacatcgcctgaccgaactgcagcgtcgcgaaagcaagcaccgcagtgagcgagttgggcagaatatggcgccagaagacggcgaaaaaagtgccgccgctgccccgggccgcctcgacgtaatcgctgtggcgcacgcgtaccacttctgctcgcgccaggcgcgcgaagctggcgatagccgcgatgccaaccgccaccgccgcatttaccgtgccgaaacccagcagaataatcaccgtgagctgcagcagcagggaggggatggccagcaggacatcgaccaggcgcatgatggtggattccacgcgtccggccagcgccccggcgagggtgccaagggcggtacccaccaccaggccgatggcgacggcgatcagcgccgccgacagggaatgcaccgcgccgtaaaccacccgcgtccacaggtcgcgccccagctggtcggtacccagccagtagtgcgcctgcggcgccaggcgctgagcgccggggatcccctccagcgggttagcggaggtaaaccactgtggggcaatggccattaacagggcggcgatcatcaccgcccacgccagccacaggccaggctgcaggcgcactctacgccactccgggcggcggcgaaccgcgatggtatagtcgaccaggctcatttcgcacctccggtctgtaaatggagtcggggatccagtcgcggcatgaccaggtcgaccagcaggttgatcaggacgaaaccgagggcggagatcatcaccaccgcctgtagtacggcgatatcctggttattgaccgcctgctgggtcagctggccgaggccgctgcggccgaagacggtctcggtgatcagcgccccggcaatcagttcgccgagcagcagcccggcaatattcagcgccggcagcagggcattccccatcacatggcgccagaggacgcccgtttcgctcatgcccttggcgcgggcgaccgcgacgaagggctgaaccgccacctgatccatgctgcgcatcaggatctgcgccagcggggcggagatgggcagcgcgacggcgataaccggtaaaatcagtccttccagtgggccggggttgattaccgggatccagcgcaactgaaacgagaagagctggatcagggcgatacccaaccaaaaggtaggtagagagataaacagcaccggtagcgactgcagaaaattgctcagccagcgcagccccggcagccgcgaggcgaaagcgagggcgaacgccagcgccaccgccagcaggaaggccggcagcgcgaggcttaaggtatccggcaggttgctggcaatcagactgctgaccgccagacccgcctgcagggaatagccgaagtcgccgtgcagcatcgccagcagcgtgtgcaggtactggcgccacagcgggctatcggcgccgtaggccagccgcatctccgcaatttgcgccgggctcaggccgaggtccgggttctgaaacttgatcagcaccgcatcccccggcaggacctgcagcaggaaaaaggtgagggtaaaggccgcccacaggaccagcagcccctggccgaatcgtcgcagaagataagcgctcataaccggcctcttagtgcttgtccagccacgcgccgtagaacgacggacgaccgacggcctcgaagctgacgcctttgacccacggcgcgccggcgaacacctgcggctcttcgaaaatagggatcacataggcgttatcgatcagatagcgctgggcgtcaccggttaactgcaagcgctgctgcggctctaccgccgcggagatgccggtcagcaggtcattgagcttatcatcgcggaagcgctgcactttatcgctggagccgcctttctgcagcagcgcatcgcggttgttggggaagaacatacttttcaccacatccgggtcggcgcggcccacttctgagacggtgagcggggttttctgcgggtcgaggttatccagcgtacggctaccggcatccccggctttgaccgtcaacgccacacccacctggcgccactgctgggcgatcagctgcagcacttccttattttgcggctgcggcagcgactcatagacggtcagcgccagccgctgaccgtctttgctgcgaataccgtcggcggcgggcttccagccggcgtcatccagcaactgccgggctttggcctggtcgaaggtgagtttatcgctgagattgacatagccggcggcagagctggccagcacggaggtggcttgcgggtagttagcggagaacagcgtctccaccacctgcctggcgttggtagcatggagcagggcctgacgcacccgcaggtcggcgaccagtgggttatccgggcggaagctcaggctgtcgttgaccccgcgggtaggggcagcgtagatcttaaatccctgatcggtagcctgcttttcatcgtaggcctgcacctggcgaataaagcccgcctgacctgccagcagcgcgccgatacgcacgctgtcttccggcgtcacaatataggtgatgccgtcgaggttagcgggcccctgctgggcaatgtttttcggcccccactggtaatccttgcgcgccaccagcgtcagctcgcggcctggtttttcatcctgcacgacgaaggggccggagccgataatatgtcgggcatcgcccagctcttcaaaattacgctgcagggtgctgagagataccagaccggagccgatggtggcggttccctgcaggaagcccggcgacggcttgttgaagtagaattttaccgtcagcgggtcgatcacttcgctgcgctggtagttattgatgacctctgagacgggcaggcgatgggctttatctcccagaccataggtatcgaagtttttggcgacggcggcggcgtccagcggtgtgccatctgagaaagtgacccctttgcgcaggtggaaggtgtactcggttttatcggcattgctggtccagctctcggcgatccacggctcaatctccagcgtttttggattctgccaggtgagcttgtcggttatctgattgagaatcccgccattcgggtaaaagccgccggcgggcggatagagattggtgtgcggttgctgctccagataaattaaggtgccgcctttaaccggcgtgtcggcggcccagacggaaaaggcgccggtgagaaacagcgcggccagcgcgggcaggcgaaaatgacgatgcatggtgaattcctttgttatctattgtgttgccatcatcgggcgcggctaaaaacaaaggaaccaaggaattgcgctaagcatttgcggaaattgcatttacttcccgggttgggaagcgagaggacgtgccagggggatcgcctctcccggacgggagaggcgcgggtgattagctacgcagatcgataaccatacggccgcggatctgaccttgctccatctctttgaagatagcgttgatatcttccagcggacgcagggtgactttcggcaccactttgccttcggcggcaaactggaaggcttccaccagatcctgacgggtgccgaccagcgaaccgaccacctcgatgccgtccagtaccagacgcggaatatcgaggctcatcgcctccggcggcaggcccaccgcaaccacgcggccaccggcgcgaacggcatccaccgccgagttaaaggccgctttagccaccgcggttactaccgcagcgtgggcgccgccggttttttcctgaatcactttcgccgcatcttcattgcgggagttgatggtcaggtcggcgcccatcgaggccgccagctccagctgtccgtcgttgacgtcgatagcgatcactttggcgttaaagacatttttcgcatactgcagcgcgaggttacccagcccgccgaggccgtagatggcgatccactggcccggtttgatgtgggagaccttgaccgctttgtaggtggtgacgcccgcgcaggtgatgctgctggcggcggcggagtcgaggccgtccggaacttttaccgcgtagttggcggtgacgatgcactcttccgccatgccgccatcgacggtatagccggcgtttttcaccgagcggcagagcgtctcgttgccgctgttacagtaatcgcagtggccgcagccttcgaagaaccacgccacgctggcgcggtcgcccggcttcagggaggtgacgcccgggccgactttttgtaccaccccgatcccttcatggccgagaatgacgccggttttatcgccaaaatcgccgtttttcacgtgcaggtcagtatgacacacgccgcagcattccattttcaacagcgcttcgccgttttccagcgggcgcagcgttttttccgtgacgttaacctgatggtcgtgggtaacaacagctgccttcatgcctgtctccttgtgggggaattgattaacttaattaatgcaatagtacccaataaggattagacgctgagtggtaaaatacaaggcgcttagtacagaatgtggctttttgctacagagatagcacaaaattcagacaatatcgctatatttggtaggtaataatattgacgctgaatggtcatgtttttgtcatcactcgaatctattgttttgcgcatcaatttcttataacaacagagtgatacaacaatgcatctggtaaaaaccatcctcaccgccggtctgcttttgtccgccgccgcccaggcccacaatgtgctggaatttccccagccggaaaacaacccggaagaattttacgccgtcactgagatcccgacgggcgggatcattaagtacgaaaccgatgctaaaacggggtttatcgtcgccgaccgctttcagtcgatgccggtggcctacccggcgaactacggctcgctgacccagtcgctggccggggatggcgacccgctggacgtggtgttttatacccgcgcgccgatggccccgggcacgctgattaagctgcgggcaattggtgtgctgaagatgatagacggcggtgagaaagacgacaaaatcatcgccgtaccggccagtaaaattgacccgacctacgacgacatcaagaccatctccgatctgccgaaaatagaacagcagcggctggaggccttcttccgggtctataaagaactgccggaggggcgtaaaaaggtcgagctggccggctttaatgacgccgcggccgcgaagcaggagatcaaatcggcctgggaggcctggaaggcgaagaactcgcaataatattcatcgcgggcgctgtccggcgcccgcggcattcgctttcacgatccctatggcggcaaaatcacacgtcacacgtcacacgtcacacgacaacgcttatcccaccatattgcatcttgacgcaggatgaaggcgatggttgtattgtacaaccatttcattttctggacccgccgccatgcctgatacccccttaatccaacagattcgtaccgcctcgcggttaatggtgcgcgagctgggctttatgagcaccacgctggccgccacccattattcaccttcggcggtgcacaccctgcttgaggtatcgatgaggggggagatgacggccgcgcagctggtcacgttgctgggactggaaaaatcaagcgtcagccggatggtctctcgtctgctggcggctggtgagctggaggagcgtccttgcgcggaggatgcgcgcgcgaaatcactcgccctgacggcaaaggggcacgatacggtggcgaaaattaacgcctggggtacccgtcaggtggtgaaggcgttagaccatctggatgagacgcagcagcaaactgtcgccactggactggcggcctatgcccgggcgctggcgcagtgtcgggatagcgcgctcgcggatacggctccgcaaatttcgctgatgaccggctaccagccggggatgatcggccggatagcccagatgcacggggagtattacgcccgtcatcatgactttggcgctttttttgaaggcaaggtcgccagcggcgtagcggaatttgccacccggctctcctccccggccaaccagatctggctggcgatccgcgaagggaaaatcgtcggctcgctggctatcgatggcgaggacctcggccagcaggaggcgcatttgcgctggttcattctcgatgagagctgccggggaaccggcattggcaggcggctcctcagcgaggcgatggctttctgcgatagtcgccagtttagcgcggtgcagctgtggacctttaaagggctggacgcggcccgcaaactgtatgaatcctttggcttcacgttaatccgcgaatggcagggggagcagtggggaaaggtaatgaccgagcagcagtttacccggtccggaaacaccggctaagggcgtggcgccttagccggtggggggacatggagattacgtcagttggttaagcaggcggtcaatctcctcttgccactgtgcctgcagtgacggcttttgatgttttggcttgcgggccatgtcgtcagccagccactgctccaggtcaatcagccgcgccagcagcgcctcctcatcatcgtcagccccggcgggtgtactctgcaaagcgagccgactgtccggggcgggcgccacggcctgcagacgggcatagacctcctccaggctgtgccactccgttagcccggcgctgtcaatcagccagaagcggttacagctttcgctaatcagctggcggtcatgactgaccagcagcacgccgccggggtaatcgcgcagcgtctgcgccagcgccgctttaccctccatatcaagatggttggtgggttcatccagcagcagcagactgtagcgcgccagcgacaggccaacgaacagcagccgcgatcgctcgccgccgctgagggtgctgaccttctggctatgtctcgcccagccaaacccggcggcgatcagcgcccgtttacgggtgtccgccgacggggcaaacggcgtcagggcctcgagcaggctggcctcgtccggcaactgcgccagcgtctggtcatagtagccggggtgcaaccggggatgcaggcgcagccccgggagaggcgatgcgttgttcatctgctgccacagcaggcgcagcagggacgatttgccgccgccattacgtcccatgatggccacgcgatcgccgctgcgcaggcgcgccacgccggtggtgaagagggatggctgacccggcgcgggcgagacgggaagggtgtccatctccaaaaggcggtcggccggcagggcgtccccctgtaacaccaggcgccacggcgggccgacgctgagctcggtctgctcgtctttcagacgggcgacctgcttctccatctgtttggctttgcgggcgagatcttcattgtcatagacccgaccccaggtggccagccgccgggcgctggcgctgacccggtcgatctctttttgctccgccttatgacgtaacgcggcgctttcatcctgctcctgcagtgcctgacgggcagcgctgcagggcaaggcgaagcaatgtagcgtctggtcacggaggatccaactcgcattagttacagcacccagtaaggtgttgtcgtgtgacaccagtacgaagctcccctgccaggtttgcaggaagctttccagccacagcagggtgggcagatcgagatggttgccaggctcatccaacaagagcagatcaggctggcggatcagcgcccgggccagcagcagacgcgtgtgctggccgccgctcagggtggcggtctgctgctccatcaccgccggggtaaagcccatctgcgccagcaggcgttcggccagccagcgctgcgcttcccgtacatcagcgggtaatggggccagcaccgcctgcagcagcgactgcgtatgcagcgcctccggcagatgctgttcaacgcgggccatcagacactgaccggcaagcgagacgctgcccgaggtgggcgcgagggtgccgtccagcacctgcagcagggtgcttttgccgcaaccgttatggccgatgagaccgatccggtcgcctttcttcagggtgaaggagagggagttaaacagcggcccaaaagccgtctccacgtggagcgcatgggcagttagtaatgtactcatagtcaacttactcaagagttacaggcatgcaaatgcctcgtcaaaactcgctgacgataacccggtaagccggagagaagggattgcgtgaagggtcttcgctcaagccatagttatcgcagcacgataccgataacgcttgagctggcgcaattgcctaaggcatgtgaaacaataaacatttcacaatacagcatggggggcctccttttttattcagtaagtggatgggtgatggcagtgtagtggggaaagggaaagcgcgccagtgacaaaactggcaggggccgatacccaccagttttcgtgttcagtgccattaccggcgagatattgttggcgcaaaaggctagtgtgtttgctaaaacgtaatgggaaaccagcgggcgtggtcgcgggtatattccgtcatcgcctggggatcctttatcgcctggcagggagcctcgagaatattcggatacgaatccggataccaatcctcttcggtcgttaaggtaaaaaagcgagactcccggtgggtttcacaggtataggcgtttttaatattgtcgactttgcgatatcccctgggatcacgatattcgatatacacgttgtactcagagcgggtaccccgccacgcgccaggctccggtttctgccagcgtatcgtctggtagtagcgctcccgctcgccgtagcgatagacaggggtttccccgccgggaatcacgtcgggtctcaggaagaaaaacagcaaacccgccagcaggagtaacaccgatgggagagtgtgggtcagcagccgcggcgcccgacggttaaccagcagcagccacagcagcggcgggatcgtgctgacgataaaagcaaagaggattttcgccggcgtatagagttcatgcacagagacctcgccggctttcgccgcgtaaaacgcctgcttatcgccgaaataccagtactcaccgtgaaaggcgctgatggcgctcaccagcaacagtccgctaaacagccccagccagaggcgtaatatcggctgcaaaaccattttttgctggctcatttacggctcctgatggttttagtgacaagcagctcgtcttcagagaccgtatccagatcggcaatctgactacactggttggcaaggacctgcggatcgccgttcgggaaccagccctcattgaatgacagggtgtaaaactgggtatgccgctgcacttcacagcgccaggcgcggcgaagattgtttctgtcgataagccagcggggatctttcgcttcaacaaaggtttcatattttgattgcttagcggaatgactacctgaccgggttttcatccagaatatggacgcataataggtattgtgtttaccgtactgaacactggcatcccgacccggggtgacctccgggtggaggaaaataaatatcccggcggcaatcagtaccatcagcggtaatataggatgctgtatcggccgccaggggattttacgtaccgccagtagccagaccagggtaataataaacacgtagagcagagcgaagaaaaatttactcggttcatagatgacgacatccaccagatcgccagtggcgggctgatactgttccgcccgcggggtgagcatccacatatcaccgctgaagaggcacattccggtgatgatggcgataccgccgataagaaacaagacaatacggatcagaatcgcattcgctttattcgcgccaggggttaattttagcatttcacattccgttgtgagggggtgagaaacaactattttgcacagcggagggcgcgcggcaaatgctatccgttttatattcttacgatgaatgaatatgggcgaaaaaaacgtttctgtggcgggaggtattattctgacgttattaataaccgggccgatatgtcgacccggtgacagtgattaaatcgaggtgcggcgataattgcgatattccggtaaccagaaattatcgctgatcgcttgcagcagcgcttcggcggaggttttcaccgccacgccttgctcctgggccaccttgccgaccgcgaaggcaattgcccgtgagacggtctggatatccttcagctccggcagcaccggaccttcgccgttgttgaccagcggcgagtgctgcgccagggtttcgctggcagccatcagcatctcgtcggtgacccgcgacgcgccggaggcgatcacccccagtccaatacccgggaagatataggagttattgcactgggcgatgggatactgcttgcctttcacggtaaccggggagaatgggctgccggtggcgaccagcgcctcgccgtcggtccagctcaggatattctgcggcgtcgcttccacccgtgaggttgggttggagagcggcatcacgatcggccgcgggcagtgcttgtgcatctcgcggataatctcttccgtgaacagtcccggctgacccgagacgccgatcaggatgttcggcttcacgttgcgcactacgtccagcagggacagcgcctcgctggtggtatcccagctctgcagctgctcacgcttttgcaccagcttgttctggaacggtagcagattaggcatgccgtcggttaacaggccgaagcggtcaaccataaacacgcgctggcgggcctcttcttcactgagtccttcgcggacgatctgggcgataatctgttcagcgataccgcagccggccgaacccgcgccgagaaagacgattttttgctcgctcagctggcttccggcgccgcggctggcggcgatcagcgtcccgacggtcaccgccgcggtgccctgaatatcgtcgttaaacgagcagatttcattgcggtagcggttgagcagcggcatggcgttcttttgcgcaaaatcttcaaactgcagcagcacgtccggccagcgggccttaatcgcctggatcacgtcgtcaacgaactgatagtactcgtcgtcggtaatgcgtggatggcgccagcccatatacagcggatcgtcgagcagctgctggttgtttgttccgacgtccagcacgataggcagggtgtaagccgggctgatgccgccgcaggtggtgtacagcgacagtttaccgatcgggatccccattccgccgatcccctggtcgccgaggccgagaatgcgctcgccatcggtgaccacaatcactttcacgttgtggttcgggacgttttgcaggatgtcgtcaaggttatggcgattctggtaggagataaagacgccgcgggcgcgacgatagatctcggagaaccgttcgcaggccgcgcctaccgtcggggtatagataaccggcatcatctcttcaaggtggttgccgatcaggcgataaaacagggtttcgttggtgtcctggatgttacgcagataaatatgtttgtcgatttcagttttgaatccctgatactggatccagccgcgttccgcttgctcttcgatagtttcaaccacttccggcagcaggccgagcagattgaaattgctgcgctcttccatactgaaggcgcttcccttgttgagcagggggaattcaagcagaacgggacccgcgtaggggatgtacagggaacggtttttcttatgggtaaattgcatcgcactaactccttgatcatgaccacagtcccggcgcggcgataagcgaagggcgggtggaaagcagcgggcagagtatagagcagaaggtcttcaagcgggtaaacaagcagtcaattgccataaaaaaacaccatcctggcaacaggacggtgttgtttattatcactcaggctgaaaattaaccaccgcggcgtttgcggccggtagcatggatgtggttgatggtggtttcttcatcgccttccagcaccacttttttctgccgggaaagcttatagttcagaccgagaagatgacgtgcctgatggttcgatttcattctgactcctttatcctgttctggtttcaagggcaaacccggtaatgaccggatgaaatgtaacccaaagtcggccgcgcgttttttgtgcggccacaggtagggtggtccattttctcggtaatagcaaccctgggtagccagattaagaacagtcctccttgcgcgccgcaggggtcaccacttcatctcaccggtattaactttggcgcttaactccagcgagctggtctccgccaggcccggccactgtgcctccatcgccttgatcaccccggccgaatccgaatgcgtcttcagcgcctgctcgaactgctggagataagtttttgtaaagcgcaccgcgctgtctccctccggcggggtgccgagataatggcccgggatcacccgctgcgggtgcagggcgatcatctggtccagcgtattacgccattgctgacgactggccggcgtctgggtgtcggcggtccagagatgcataccccacgccacgccggtgccgccgaggatcgttttgttcgcccggatccagacgaacgccgcgtagtcatgcggctgcatgatggtcactttctcgccatcgatggtaaagctgttggcctccagcgcctgcgggacatacacctgcgtcggcgcgccgtctttcatttgcgggccccagtacgccagtttggccgctttggtggctgcaatatgtttgacgacctccggcgtggcgaccacctccgcctgcgggaaggcttttaccagcggctcaagaccaaaatagaaatccggatcgccagaggtgatcacaatccgcgatagcggtttgccgtttttcttgatcatctccaccagcttttccccatctttgacgctgaactgcgcgtcgaaaagtaccgcttcatgcggaccggaaacgagggtcgagttgacggcaaaaagtcctttttcctgcgggttgtaagtttgcagcgtcagaggcgccgcgaagaccgcgccgctgaacagggcggtagcaacagcaagggcagataatttcatgatttattctcagtaacaggtgaatgcgttccattgtacggatttcgctatttgatagaattcctgaaacaagagatgctgagtttcataaaacgtgcagatcagggggagtgatggacagggtgattgctgcgcaggtgtatctgcgcatctgcgagctgggaagtcttagcgccgcggcgcgggcgctggggatgtcgcgcccgatggtgagccgctatctggaacaaatggagagctgggccggcgcccggctgatccatcgctcaacccggcggctgacgctgaccccggccggggagaaggtattgctcaagacccgcggtttgacgcggatcgccgatgaaatcgccggcgagcgtcagcgggccgatcccagcggcacactgcgcgtcgcctgcgcgcactttaccgccatgcagctgatctctccgctgctgccggactttctcgcccgctatccactgctgggcctggagctggatatcaataaccatccggtcagcctgatcggcgagcgtatcgacgtggccattcgcattaccgacaacccggaggcgggggccatcgctcgtcgcctcggagtgtgccgttcgctgctctgcgccgcgccgcgctggatgcgccagcatggcccgttgacgacgcccgacgatctgcaacgacataactgcctgctatacagccatttcgccagccagcactggcagttcagcgatgcgcaggggcgggaagcgtcggtggcggtgaacggtaatctgagcgcagggatatcttcattgctgctggaggcggcggttgccgggtgcggcattgcgatgcttcccgaactggaggcccggggcgcgattgccagcggcacgctggaggtggtgcttccggagtggacgccgaaggcgttgagcgtttacggcatctatctttcccgcgactaccaacctcacggattaccgctatttcttgatgcgctgcagaggcgtctgggagaggagactggccacggctgagtcttggcgcttcgcgccccgacagcaccggcggaaggcaattccgccggtaggctgacgttgagctttattcgttgccccactgattaaggaaattagcgatatcgtcaatgcggtcttcgttaatggccgcctcgcgggccatttctcgctgcgcctcttcgtcaatctcttcgttattagttaaccgcgcaatcagcagttggaaatagcgcgccagcgcatcgcgttcttcatcctttaccggcgcagccgcttcggtctcgtattcgtccacgatgtcataaaatttcagggggatgtcattactcatctgtcgtcctcaggggtggcgtcggggccagggttagcgcacagcggcgggcggacatcatagcatgcggccagagtaacggagtggaggaaagaaaaaattgccgcaaccgggaggcgaggggccagtatatagccgcaagggttggccgggaaaataccggcgcgcgctggcgcgcgtcggtatgccgggaggcttagaccacaccatccccgccgtcagagcaccacacctgtccggaggtatatgagcaggcatcggatgccagggtgacatacagcggggcgatctctaccggttgtcccgggcgccccatcggcgtgtctttgccaaactgtttcaccttctcgtccggctggccgccgctggattgcagcaccgtccagtaagggccaggcgctacggcgttcacgcgaatgcctcgtttcgccacctgtttagccagcgatttagtgaagatcgcgagacaggctttggtctgcgcataatcgagcaggatcgggctgggtttatacgcctgcaccgaggtggtattgataatcgcgcttccggcctggaggtgaggcagtgcggcgcgggtgatccagaacggcgcgtagacgttggttttaaaggtagcgtcgaaatcttcggtagtgagttcctcaagggtttcacagtattgctgacgcccggcgttattaaccaggatgctcagacctcccagctgttccaccgcgtcggccaccagcgactggcagaaggattcggagcgaatatcacccgggagggcgaccgcggtgcgcccttcggctttgatcagggcgataacttcatccgcatccttttgctcttcgggcagatagtttatcgcgacgtcggcgccttcgcgggcaaaggcgatcgccaccgcacggccaataccggagtcgccgccggtaattaacgctttcttaccggccagtcgcccggagccggtgtagctggtttcaccgtggtccggggatggctccatttccgcatccagacccggcggggtttgttcttgctccgggaactccggacgtggagccgtctcttctggcaacatggaggtgggtaacttcttcattggcggtttttcatcttgcatagtcatctccttcagacagaacgggccagctctaagaataggtcagcttctcctggcgacagaccctggatgactcgcaacatcgcagtcaatggccaaccgtaggcgtaacggtatgccttaaccgactgatccttggcgtatttcgggggatagcgttgcgttattattgctgacgttaaattaggattattccatccttaatcaagggccaagggctattttcgtaacgcgcatgatctttttctcaagttacgatgaaggtgctgcctgaataaacgatgaagatgttcattcgcaaaccatgtcctataaggtgatacctctttgggggtaatatttctgggtattgtgttccgcgagataaagaaatatttattcattaaatcgtttgcatttttttacaaacggccgttggacgtttctgttttacccgccggtgaacataacctacgtcaaataaaggagttgtgtgaggtatattttatcttaccgcttcgttagtaaagctttattttgtcagtgcgcggatgggtatctgaaattaatttgactcctgcaggcattcctctagtgttagatatcgagggcgatgatttgtaacagggtcattttccatttaccaaccgatattgatcaaaccaaaggtgaaaattatggcagagcatagaggcggttcaggtaattttgcagaagatcgtgagaaagcatccgaagccgggcgtaaaggcggacagcacagcggcgggaactttaaaaatgatcctgaacgtgcatccgaagccggtaagaagggtggtaagaacagtcatggcggcggccgtaaatccggtgacagctagcgactgatgagctgtgacgccgacaaatcggcgttgagacaaaacctgtgggccagatggtccgcaggtttctgcatattcagggtttatttatctataacgacattcattatccgcgatgtggggaaactaaaaggtgaggaggaagtcgccgcatcactagcaattaaagacggccgcagcggcaataaatttgccggacggtaaagacagaaaataacggaacgggacaatacgcaacgctgttttcttttttatgcttaggcaaaagaaagacattttcagcgtaaggtttagcgcctgacgcagcggtcagagcgtcgataaaatggtcgctcaatattgttcggtcctaaggtaataaaatgaagttgacgccagtgtttattaagcgctgtcatcttgtcgccgccgttatgtgggtgggtctggcgataccctcgttaatctggtggaaagacagcgtactgtgggtcattctcatcagtatttatgccaatattgttggccatttatccggatatagcgcagcgcgagctgaccaggcggcggaagagagtgaagattccacgtcaaaataaaaggttaatgatcagaggtgtatatgacggatatcgaaaattatcacaactggcttcgcgatgcgcatgccatggaaaaacaggctgagtcgctgctggtggccaccatcagacgcctcgataatgaaccgcagttacgcacccgccttgaacaacatctctatgaaacccgacggcaattgtccgccctgcaggatatcatcgcccgcaaccatatttcccgctccgcgctgaaggatgcgatgagccgggtggcggcgttaggacagaccattggcatcatgctgcccggtgatgaggttattaaagtgattatcactgcctacgtttttgcccattttgaggtcgcctgctataccgctttattaacggcggcgaaaagagtaggcgaccacagcgcgatgcatacactggagggtatcctggctgaagagagaggaatggctgattggctgctccattatctgccagcgctgaccgggcaatatcttatggataccgatatgcctggcgttgaggccgggcattaagccgccggagaacgctatggtcaaacggcaaaccatcgcgctcctcgccgccgaggaacaggttccgctggtattaaccgccaggcagcaggcgctggtggacgcggtagcgaacaggatgctaccagcggaacgcaatcccgtatcgcctgtcggcaaaccgcgcgcgaaggccagggcggggtccggatcgcgctgaggcggctgacagggacgggcagaacgcgaggtgagagtgatgcaacgggaagagtggtttcacagagcggtcatctatcaggttgacagttcgctcttttatgatgccaatggcgatggttttggcgatctcgcgggcattcgccaaaagctacactacattcgcagcctcggagcgacggtgctctggctgactccgttctatctcactcctctgcaggatgatggctatgatatcagcgatcatctgcagcccgatccgcggttcggcactatcgctgacgtgattgagctgattgcccgcgcccgcgagctgggactgcgggtgatcgttgagctggtgatccagcacacctccgcgcagcacccgtggttccaggcggcgcgacgcgatccccggtcgccgtggcggccgtattatctgtgggccgatcggccgccggaaaacgacgatcctcccatgtttcccggcgttgaggagagcgtctggcgctgggacgaacaggctgggcaatattatcgccacatgttttatcaccacgagcccgacctgaatctcgcccatccgccggtgatcgctgaaatcgaaaacattatcaccttctggctgcaggctggggtgtctggctttcgtctcgatgccgcgtcacatctggtcaagcaggccggaaagggcgacgagacgcgcggctacccgctgctgacccatctccggcaggttgtacagcgcctcaatcccgatgcgatactcctgggtgaagtggacgtcgcggtagaagattaccgtcattatttcggccagggcgatcggctgcagatggtgcttaatttctggcttaacaaatacctctacctcagcctggcgcagcagcgcgccgcgccggtggtgaaggccctgcaggcgatggtgaccccgccggacgggtgctgcttcgtcaactggctgcgcaaccatgatgaactggatcttgaggggattggcgagcgcaacaagcgccaggttatccgcacctttgcccctgataaatcgatgtccgtttaccagcgcggcgtacgccgaagactggcgccgatgctggacggcgatacccgacgcatagcgttagcccatgctatcctgctggcgctgcccggcgtgccggtgatgcgctatggcgacgagattggcatgggtgacgatctctccttaccggagcgctacgcggtcagaacgccgatgcagtggtcggccgcggccaacggcggcttttcccgggcggcgcgggatgatttgccggtaaaaccggtggccagcgggcggttccgctaccaacggatcaatgtagaaacggcgctgcgccatcccaggtcgctgctgcatcgggtacgcaatatggtattggcgcgcacggaatatactgaaccgggatccctcccttttactctccttaccctaaagcccgacgcggtgctgggcttactctatcgcagcgaatcgcgggaggtactgatgctggccaactgcagccagcaggcggtagaggtcctgctcccgccgctggccgagggctactggagcccaattctggaagataagctctatcaggatgggctgcacggcgggaaagatgcgcggctggcactctccgggtatggttaccgttggttcagccgcagcctgagttagcgccgttttccggaacgacggaacaacgcccgcagcgccatcgtcgccaccgctaccccgacgccggcggcgactttacccgggagatcggcgctgatggtgactgctttacgccgtgcgccatcgttaaaggggccgtggcccggatgattgccgcgcaccggcgtgaacaggtcgtcctgttggtctgacgactttggctgaccggtaaactgtccctcccacgcttttttcaccatcagccgatcgagcaggcgagggaagaagacctggccgaggatcgactggatggtgctttttccgacccacagctcgttgaccgggcgctggatgacgctgtaaatagcctcggcggcgacttccggctgatagaccgggggcaccggctgcatggcctgatccattttgtttcgcgcccagccaaactgggcggtgttcatccccggcagttgcaccatggtcaactggatgtggcttttctcatgcatcagttcggttcgcacggcatcggtaaagccgcggatcgccgctttcgctccgcagtaagccgactgcagtgggattgaacgccaggccagcgccgagccggcctgaataatcaccccccgatcccgggggatcatgacctccagcgccgcgcgggtgccgttcacgtacccgagataggtcacctccgtcacccggcgaaactcctcctcgctcatctgacgaaagggcgccagcacggtggtcatggcgttgttgatcccgacgtcgattgccccgagggtggtttccacctcggcggcggcgcgctgcagcgccccggcatcgacgacatcggcgctaatagccagcgttttaatgccaaaccgttcacaggcctgtcgcgtctcctgtaaacccgtttcgtctcgggcgatcagcgccacgtgatatccagcgcgggcgaaacgcagcgcggtagctttgcccgctcccgcggttccaccggtaataaccatcacagacatagtgacctcattatgttttggctttcacaatattgactgtacggatcggttaattatttctcaccaatggcaatgacgaggtgggaaatatcctggaataagcgcaatgtgaatcaggcggcatctcctggttagtttcggcagatcctgcatacttcggcgaaggcgttctataatttgtaggatccctgacaaccagcgaggaggaaaaatgttaatgttgaacgttgttaacggtgaaaaagaagaggatgacgccactcgcgctccggaatcaggtgataaacaaccggagcgtgataaatagcgaagccgatactattcctgctcaggaataatggatatctggccgttacgctcgagaatagcgaatttgatcgctttcaattcataaatgccatggtgctgcctggccgccagcaggatatcatcgacagagatattgacgagcttaatcttctcgtcgatgacagcaccattttccaccacgataaccggcgtaccatcgagaaaattttctgcctgagcaaattttttcttaatatagccgaacaaaatatcaatactaaccagggtaacgatagtcagcatcgacccggtaaccgaatagtctgtgctgagcatcgcctgctgggtggcttcgctgataatcagcaacagtatcaggtcaaagttggttaattgcatcagggttcttctgccggcaatcttaaaaataatcaacaggatcagatagattgctgcggctctaaggaccatttccatagcgactcctacggatagacaaactgctgccaggttacagaatagcgatcgttaactaccgcctgcagagagatattaccggccgtttttggggtaacggctaaccacacagatatcggtgaaggggggttcgaccgctgatagacgagatgtaatttcccgtcggcgctatacattttatccggctgcggacggatatcaccgatctggtagcgggttaataacggggcggcgaagctgataatggtgtcgctggccgtatccggtttaatctgaatattaaactcggtttcactcatcagcctggcatagcgctgataatcgacgcttaattcgcctccactggtttcccggtgtgcttcactgaaataaccggaggaccacaggccgcttaacgcggtaagaatgatgagactcaaaacaattatcccatagcggcggaagcgatattcaaagcgtaaggagcgttcattctcatcgacgataggacaaggctgttgattcttaatcattaatattttccccgcgtttcgtttcgccaggagcgtaacgataaggacattcttatattagacgatatcagaacaattgactttgtaaaaatggccagcctcagccaggctttattctcatcgtcagcaaaaaacggaggcatgatgaaaaaactagcattggccatggcctgtctgtttgccgtaggtgtcgcgcaggcggacgataagggagggtttactcaggatgccgcgccgccgccgccgcacaaactcgatgacggctatcgcggcgtcgaggatggccggatcatgaccgttgagcaggcgaaaaccatgcacgatggcgcgaccgtttcgctgcgcggcaatctgctcaagcggcagggagatgaccgttatcagtttcgtgataaaagcggcaccatcaccgttattatcccggtcgccgcgtttaacgaacaacacgtagagccagacgatctggtcaatatcaacggcagtctggatcgcaaaatgacgccgccggtcgtgcgaatcgatcgtctgctcaagcagtcgcctaagtaagcggagcacgtcgatatgagcaccttttctcactcgcaagacgaagagcgcggtaagcaacctgcccgtgaggcgcccggagagcagggcgaagttccgcgtaaacgggacgacagcaaggatgacaaatccgatccctggcatccgcaggatggccgatagcgtcaccctgcctcaccaacgacacgaaaaccaggggaacgtgggggccagaggctgcaaaaagacgcagcttcggcatcacgcactatactttttgttcgacatcactacaggaggaatcaaatggcgattcataagaaagggctagcgcactgggaaggcgacctgaagcatggcaaaggcaccgtgtcgacagaaagcggggcgctgagccagcagccctacggatttaacacccgttttgagggggtgaagggcaccaaccctgaggagctgatcggcgctgcacatgccgcctgcttttcgatggccctgtcgctgatgctcagcgaagagggatataccgcaacgtccattgacactaccgcagtggtcaccctcaataaaaccgacggcggctttgcgattaccgatatcgcgctgcaaagccagatcgtcctgccggacgtgtctccggcggcgttcgatgagatcatccagaaagcgaaagcaggctgcccggtatcgcaggtgctgaaggccaacattaccctcgattaccagctgaatccgtaagccgtcgtgcccgcgtgctgcgggcactctttccgcaatatctctcccaatgctgtccaacagtggtatcttttgtcctttagttgcacgtaagggataccatcatgatcggcattcgccggatgatcgaggcgcaggtgctcggcctgaccggcatggcgctaaaagagatcgactttgaacgacccaaaggagagccggggctgtttggtccccagtcggccatctggcaggtgcacggcgattttacctcgatgctctgcggcggcattagcgcgctgttgctgcagatgctgcatcctctggcgctggccggcgtctgggatcactctcgttttcgcgaggatattttgggtcgcctgcgccgcaccagccagtttatttctgccaccacttttgccactacccccgacgccgaacggctaatcgccaaagtacaggggatccatcagcggatcgccggggtggataaggacggaaccccgtatcaggcgagcgacccggcgctgttaacctgggtgcacgtcgccgagtgcagttgctttatggcctcccacctgcgctacaagcggacggtggtcagtcccgagcgccaggaggactattttcgtgagtcggcggaaatcgcccggcggctgggggctcgggatatccctcagacaccgcaggaggtggcggactatctcgaggcgatgcgcccgcgactgcgctgcgacgaacgtacccgggaggtagctcaggtgctgctctccacccgtctgccggggcggatgagccagccggtcggccgggtgatgatgaacgcaggaattgaccttttgccggaatgggcgcaggagatgctgggattgtcgctcacgccgctgcagcggcgcacgacgcgcctgatggtgcatggcgtggcccgcgtactgcgcgcctcggtacgcaacggcgcctggcattgcgccatgcgccggatgacggaggcgtgattcagttcgcttggcccaggtgaccggcaatcagcgcctgcagactgccatccgcccgccactcgctaagcgcgtcgtttaccgcgtgaaaacggtccacgtccgcccgggcgacgcagatggcctgctggatctcggtaaaattatccgccagtacccgcaccccggcgtgctgacgggctgtcgcctccagcggctggcggatgccggcgaccatatccccttcaccggcgaggaaggcgtcgattgcctcctgcgaagagggaaggcgatgcaggctggcgtgctgcagatggcgggttagccatagatcgtatgcggcgttttgtccgacgttaatggtggttgccgggcgatccatgtcggccacgctctggcagggcgaatcaacgcagaccagcgcggtgccctggatggtgatatagggcgaggtaaagcgcagggtggcttcccgcgccggatcgatggccagaaaggcaatatcccagtgctcgccaccggcgtcagccaccactttacccgcggcaggatagggaacgaattcggcgctgacgccccagcgcgtcgccagccgatggctgagctcgacggtgatgcccgcgggctttcctgtctccccgagatgggccaggaccgcattgcccagattaatggcgaaacgcagccgggatggtttgttatgtgacatcgctgactcctgtggtggctaagctaaagtggcccgacctgtggccacccttcaaaagatagttcataggcgcaaggttgcagcgttccaacggcacatacagtaaatagtcattaccgaccgccgcgatatcgttaaacggcaaggcaatggcttttatattgttaagcataaactcagtttgtcagtttattcttcccgctcacaaagggagagaaataatgacacaacataattttgaaaatgataataaatatcatgagcgttcggtgcaggcgcgaaagagtacccttgttagcgtggtggttaatattttcctttctgccttacaggtagtcgtgggaatattttccggctctcagggattaattgccgacggaatgcactctttttccgatctggtcgccgatggcgtggtattgatggcgaataaaaagagccgtcgaccgtctgaccacgatcaccactatggccactggcgctatgagaacggcgcctccctaatcatcggcgcgatgctgctgctcgtcgggggtggcatgctatggtccgcggcgggccatctcgcgcaaccgcaaactattccgccggtgcacagcgcggcgctgtggatggcgctggtggcgctggccgtcaaggaggggctgtttcgctatatgctggcggccgccaggcggctgaattcgtcgctgcttatcgccaatgcctggcatgcccgctctgacgccgcatcctccctggtggtggccctggggattatcggtaatctggccgggttcgcctggttcgacccgctcgccgcgctggcggtggggctgctgattgcgcgcatgggctatcgtttcgccgtcagcgcgctgcatgatttaatggaccgtgcggttgatgaagagatgcagcaggcgatcgccgatacgctgcgaactacgccgggcgtggcgggcctccacgatctgaaaacccgtaaggcgggggatctggtgctggtggatgtccatctcgaggtggctggcgagatgtcggtagccgaagggcatcagattgcccgtcacgcgcgggagcgggtgctggcgcagcatccggtgcttaatgtgatggtgcatctcgatccctgcgaagcgcaggggttgacgaaagcggtctgatacacccggtagcctaagcggaaaaatgaattggctcagcggttattttttcttctgagccattattgctggcgcattgattgcctgaaatataaaaaaggcccatactaaaaacgccattaccatcgctaaataatggcgcagatctgcccatcgcagttaacgataaaataaaccaatcggctcatagataatctctattctgtattcagagataatgaccagagcggtaattcaggaagtcagacaatgatcattcggccagaacaacactggtttcttcgcctatttgactggcacggctccgtgctgtcgaaaatcatctttcgcctgctgctaaatgtgctgatgtcgatcatcgccattatcagctatcaatggtacgaacagttggggatccacttaaccgtggcgccgttcagcctgctggggattgcgattgcgattttcctcggctttcgcaacagcgccagctacagccgcttcgtcgaggcgcgcaatctgtgggggacggtgcttatcgccgaacgcacgctggtgcgtcagctgcgcaatatcctgccggcggaacacgatgcccatcgccgcatcgtcagctatctggtggcctttagctggagcctgaagcaccagctgcgcaaaaccgatccgacggctgacctgcggcggttgctaccggaggagagggtgacggagatcctcgccagctcaatgcccaccaaccggatcctgctgctggccggcaacgaaattggccagctgcgggaggcgggcaagctcagcgacatcacttacgggctgatggacaacaaactcgacgagctggcgcacgtgctgggcggttgtgaaaggctggccaccaccccggtgcctttcgcctataccctgatcctgcagcgtaccgtctacctgttctgtacgctgctgccgttcgccctggtcggcgatctgcactacatgacgccgtttgtctcggtctttatctcttacacctttttatcgtgggattcgctggcggaagagctggaagatccgttcggcaccgcagccaatgacctgccgctgaacgcgatgtgcaataccatcgagcgcaatctgctcgacatgaccggtcagcatccgctgccggagacgctgcgtccggatcgttacttcaatctgacctgagcctggcccaccgggcggtttcgctgcccggtcatcactttccgtagcaatttatccgtcacagcaccgcggtgaaaaccgcaaaatttgcaaataagttaaatttaacacctgatagataacatcaattatacagaattgtggtgtatgttattattcagttaacaaacgcagtacctacgctttcccatcgtactatccttgagaaacagcattcttttcaggtgacgccatgcgattcacgcttcgtcgccggggttgttgtacgcctttttcggctagcgacagccagaacagagcagcaggagtaaagagatgaccaataaaagacgcgcggttcccggtgttcacccctatgacggtccggcaggcgggtggggcgcgttgaaggccacggccatcgccgtgcgcacccagatggatgcctttgaggcgcccgccacgctgctgcgtaccaaccagccggacggttttgactgcccgggctgcgcctggccggataaagaacataaatcgaccttccagttttgcgaaaacggcgccaaagccgtgacctgggaggcgaccaccaaacgggtgacgcccgcattcctcgcggcaaataccgtatcttccctgctggcaaaaagcgattttgaactggagggctacggccgcttaacccatcctttggtttacgaccgggacagcgataccctgcgcccggtggcgtgggagcaagccttcgcccgtatcggcgagatcctccgcggcctgcagccggatgaggttgaattctacacctctggccgagcctccaacgaagcggcgtggctgttccagctgtttgcccgcgagtatggcactaacaacttccccgattgctccaacatgtgtcatgaatccaccagcgtgggcctgccacagtcgatcggcattggtaaaggcaccgtctccctcgacgattttgaccagaccgagctggtgatctccatcggccataatccgggcaccaaccacccgcggatgatgggcaccctgcatgagctatcccgccgcggcgtgccgattatcgttttcaatccgctgcgtgaacgggcgctggagcgttttgccgatccgcagaacgtaatggagatggcgacccggcgctcgacgccgatcgcctcgacctactaccaggtacgggccggcggcgacgcggcggcgttgaaagggatcgccaaagcgctgctgcagctggaggaggagcagggcaatgtgctcgaccacgcgtttattgcccaacatacccagggattcaccgccttcgccgatgacctccacgccacccgctggcaggacatcgaacaggagtctggcctgacgcgcgaatccctgacccaggttgcggcggcttacgccaaatccagggccaccatcgtcacctacggtatgggcatcacccagcataacaaaggcacctccaacgtgcgtctgattgccgacctgctgctgatgcgcggcaatatcggcaagccgggggccgggatctgtcctttgcgcggtcactcgaacgtccagggtaaccgcactgtcgggattagcgaaaaaccctccgcggctttcctcgacagcctgcagcgggtgatggggattacgccgccgcggcatcatggccacgatgcggtaaaagccctggaggccatgatcgccggcgaagccaaagcgctgatctgccttgggggcaacttcgccgtggcgatgccggaccacgaacgcgccttcccggcgatgcgcggccttgagctcagcgttcacgtcggcaccaagctcaaccgctcacatctcctgacggcgaaagagacctttattctgccgtgtctgggccgcaccgagcttgacctgcaggccagcggccggcagtcgatcaccgtcgaggattcgatgtcgatggtgcatgcttcgtcgggcaagcttaagcccgcctcgccgatgctgcgctcggagccggcgattgtcgccggtctggcgaaggccaccttgccggccagcaaagtggactggcagtacctcgtggaagactacgatcgcattcgcgatctgatcgaacagaccattcctgggttcgaggattataaccagcgcattcgccatcctggaggcttccgcatgccgctgccgccgaccgagcgcatctggcctaccgccaccggtaaagccatgttctcggtatttaaaggggtgcatgagaacgtggtggtggagggtgaggacgtgatgcgcctggtgacgctgcgcagtcatgaccagtacaacaccaccatctacgcgatggatgaccgctaccgtggcgtctttggccgccgcgacgtgctgtttatgaacgagcaggatatggccgcccagggtctggagcatggcgatcgggtggatatccataccgcgctgccgggaagcgcgctgacgctggaagatatcacggtggtggcctacggcattgcaccgggcaccgtcggcgcctattatccggaagccaacgtgctggtgccgctgaactatctcgatgaagagagcggcaccccttcgtataagtcggttcccgttcgcctgacgctgcgctcgaaagagatccgtccactggccggcgggcgctaaaaaggtatagcgcagagcggcgtcgcgccgccctgcgccccgcagcacctcgtggtgtcctcgcttgaatttatcgctagcgaaactaacattctggtaacctgtgcgcggccccgggggtgaacggcggggttcaaacgggaaagagaatggatattaagcaactcaagtatttgatcgcgctcgatcagacgcgccattttggccaggcggcggcggcctgtcatattacccagccgacgctctctatgcgcattcgtaacctggaagaggagctgaacctgacgctgatccagcgcggccaacgctttgaggggtttaccccggagggagagcggatcctggcctgggcgcgggcggtgctggccgctcatgacggcctggcggcagaggcggccatctgtcgcgggcagatggtcggccagctgcgggtcggtatggtgccgctggcgagcctcaatccgatgcagttgattaaacccctggcggagaaatatccggcgctgcagttcagcctgttgtcgatgacctcggagcagattatcgatggcgtcagccgtaatcagctggatctggggatctgttatctgcagcatctggatgaaggtcagttcaagattgctcgcttgccgcaaacccggatgggactgctgcacgataaacgccatttcgacttcagcgccgggacgccgggatgggagacgctggcgacgctgcccctcggctttctgaccaaggggatgtattaccgggaatcgattgaaatcagctttaaggccaaagggctaacgccaaggtatgtctttgaaagtgattcgacgtttcagattatccaggcggtgcaggcggggatctgctgcgccattatgccgcttaacaacggcctcgaagcgctaagcgataatcttgaaattctgccgatcgccgaaacccatgttgattcacagctggcgctgattatgcgccagcaggaaccagtctcgaccctggcggaaaaatgcttcgccgaggcgcaggggatatttggctgaggccgggccgccgacctggcggcttgtcactaaaatgcctaaacgcccctctgatgggagagtgtcaatatagccccggtgatgctggaccgttggtaaaagcggtattgcggcgccgcttaatgctgtccagaagttacaagccttaatgacaattttttatccctcctgcagtacacatcacaaatattaactatggcaacagccgtcatttaagttaacaacaaccgatatgtattactccctaatgatatattaggctgacttcctggttagattatgatgcattaatgtcatgccggcatatgaattcttaaatgaatatgtctgaaaactaataatattacggactgtttacatgtcatctcataccaacattgtacaagaaaaggctttgcaactgatgcaaagtattggtcaaaatacctaccttaagtcaatcatgagcggtatgatgctcatattgccagtaacgatcatgagttctgtggcgactttggttaaagtgtttccgtttgctccatatcaggattttttgttacgacacaacttaactcgcttctttgatatcccgattaccttcacgaataattttttagccgtgattgtcgctttctccgttgcctatacgctagcgaaaaatttcgatgttgatggcttcatgtcaggcctgatttcaatgatctctttctttattttaacgccgtatgatctcggtgaaatagggccgttagggcaatcattttcaatccctggccaatggctggggcccatggggctgtttaccgccattctggtggcgataatttcaacacgaatattcgtggcgataactcgcaaggggttgattatcaaaatgccagaaaatgtccctgaatttatctccaaatcgttctcttcattgattccaggaatcgccatcctgacgctgtttacaattatctccgcagtcattaccagcgttggttatgggagcattcacgaaattatttataaattaatccaggttccgctaacatcacttggatccggaatctggtcactcatctttgttgctgttgttgcgcaattgctatggttttttgggctgcatggccacgctatcaccctcggtatcgtagcgccgatctggtttgccatggatgcccagcagcttgctgcgtatgctgcaggcgtcgacttacccaacatcaccggctttgcgttctttatgacttatggcgctgctggagatttattgccgctggctataatgctcgcttttttcgcgaagagcgcacgctataaaacgctcggtaagatcgccttgccgccagctatcttcaccattggcgaaccgatggcttatggcgtgccgctggtaatgaattttactctggcgattccttatatttttatcaatggcatcatgctcggcattgcatggtatctaacggtcattggcgtattgcctcgcgtcgctggggtgagtaccccggccggcatgccgatcattatttctggttttatgcaggggagctggaaaattgccgctttccaatttataggactttttgcgcgatttgcaggatggtatttcttcttcaagactgccgatcttgtcgcttgccgggaagaaaatcagacggataccatttgaatgctccttaaaaaaatgccagcaacgccaatttagccatggtgggaaagatgttaagtatcaattaccaaacggaaaacattattgtcgatcatctgccaattatggtgtgctggtctaccaattatcctcaaaagtcattttcgataaaagtgtataaaggtgccgaactggtatctcttatcgcaagagagggtaataatacaattgtcactctcgatgcaatatcgttacaaagctttacttcttataccatagaagtccttacccacggtgacaatggtgagaacaacgtttttagaaacagtttcacaaccagtaatcttggccatttttctggccgctgggtgagcggtgggtatcacttcactaatgatattcattactatcgcggtaaacgtaatgtggtgatgagaaaaacaatttatctcgacgaagacctcctcgatgcctatatcagtattgttggtcttggtttttataaattgtatatcaacggtaaagaggtcacacgcggtgagctcaatactgactggacaaattatgctaaaattatttattatgatacttacaatataaagccgtttattaatcagccgaaaaatgaagtcattgttgagctagccgatggctggtttaatccagcaccgcttaaattatttggtaaatataacctgagagagaccttaaccatcggtgaaccacaggtcatcgctgacatttatatgaggtttgcagatcgcgaaatgatcatcggtagtgatgccgactggcaatattgcgaaggcgcttataccttcaataatatctatttgggcgagcgcctggatatgaaactgtttcgcggagacaacaccaccgatttgctgatgcctgactggaaaaatgtggtgctgagcaacgggcctgaaggccgtctggtctcgagctttattccgaaaattaaccatacgttgtccctcggggcagagcatatccacgtcgtagacgaagagacattcattattgatttcggtgccatcgtcaccggatttatcgatttatccattaccgcgtctgagaatcaacgtgtggaactgctctatagcgaagacgttgatgaaaactacgaactaaacactgactccacccttgcgggatttgtcggcaaacaggttactgaaggtgtgattattgacggcggaattggagcaccggcgagggcggaacagaaggatgcctttgaatgccgcagtgggaagaatcattttatcaatgcctttacctgtcattcgtttcgctatgtgcagttaagcggtattaatattgaacaattaaacaacgttcaggcgctttcagtacatactgtactaagggaaaacgggggcttttactgctcagatccttacataaataagctctttgaggttgctaaaagaaccaaactgaataacattcattcggtcttcggggattgtgcccgcgaacgttttgcctatggcggagacattgtcgcgttggcccggtcgcaagtgtatcagtttgactctgccgctatgtataagaaaactatctttgattttatcaatgatattcgtccctgtggtggtgtgacggaaactgcgccatttatgggaattaagactaatggagtcggcggggaaacgggccccctgggctggcaactggtattaccttatttgatagccattcactatcgacattatggcaatgtcaatctgctggccgaaagcttgccatttcttgagaagcagatcctctccctggaaatgcgcgactttgatgacctggtgacctgctgcctgggtgactggggaagccgcgttcatgatatgcgtaattacaaaaatggctcgccagctctccatttcaccagtgcttgtttctattattatcatttgttaattatcgcaaaaatatgtgatgatcttggctttaaagaaaaatggctaaaatatattggcaaggccaataaaattagagagaaaattttatcactctataagaatacggatggcagctttgccgatcgcagtcagaccagctttgtttttgcaatctacttcgatttgtgtgatgatatcgagagttcattgaatgcattgatcgatctcatcaaaaaagagcaaaatgttatcacttgtgggatttttggccaaagttttgcctatgaaatatttcatcgctatggtcataatgaattaatccttgaatggttaagagtcgaagccggattcaagaaaatgcttaaaaatgatgccagcacattgaaggaatttttcggtgataacctgaatggttcgaataatcatgcgatgttcagttcttattccagttggctgtttcaggctttgggcggcattaccgtcgctgaggaggcggttggtgctgatgttattttaatcagtccatcctttactgacacgattaactttgtggattgctggcatcaaaccatcagagggcgtattgagtgtcgctggcggcgctataaaaaaggcatagaattagtcatcaaagtgccatttaacctcaaaaaatgcactcttaaattaccaaaagtgtatcaacttaataaacaattacctgcgccgatagactgtgatacctatcatcacttttatgacattaccgatgcaggtgagataaaagtactattgtaatgatagtgcatacccaaacgttcgctccagttaggtacttttatgttacaccatgatattcatgaaaagctactggcttataccgatagagaactcgaactgcttcgcgctaactatcaactgtgtcataaattcaaaagccatatggagcgaaggtttttcaaagacaactacatccatattgaaaagcagacccgatttactaaaattccgttgcattctcatggctttatcgagcttatttatatatatcagggtaaaatgcatcagaagattaatgaagaaagtctcactttaggtaagggggagatcctgcttatcaaccagtttgccagacacgaaattgaagccgcagggcagaatgatattatcatcaattttattattaagaccgaatttttcggtcgactcatgtccctttttgacgaaaataacatcatttcccgttttatcctttcagcaattaatggcagaaaaaaacatggagagcatattcactttaaagtgggagaaatcgacgcaattcaaaacattatgcatgtcatcattagcgagatctacagtaataaccacttaaaagagatacgcgtcaatttcctggtgggactgttgatgaccgaactgctctcgaatgtgcaagccagcgattaccatatcaacggcagttacaatgaatcacttgccatggccgtgttgagatatattgataccgattataaaactgccagcctgaaagagatctcctgtcgtttaaatcagccgaattataaggtgagtaaactgataaaagacttcactggtaagaactttagcgatttgttggttgaaaaacgcctggatgtgttgatccatctccttaagcatactaatcactctattattgatgttattaatatgacgggttatgaaaacgcctcgcattgttataaggtatttaaagagaaatataatatgagtattaaggagtatcgtgacctgaactcctgaatagtaaattggctcacagcgttcatgctattgcatgtttttgtaataagtaaaatcggcaacaaccgatatataaaaaggcaagctgggttataacacgggtggcattctttaaataaaatcagataagcaataaaaataataattttatttattttatatctcttacccgatggagtctgaagaatgaaccccagaattattatttcaggtgttatctcatgttttctgcctgcgaccttatgccatgcggccaatctaagcgacgacggcagcttccagttaaatggatatggcatggtggctggagattttcagagcgaactaaaccgtcccaaaaacatgtcgttgcataccgatcccaccgggcctaatcaggatcctcgtggcaaaatgggcgatttgggaaacagtttctggcacgattactggacatcgctggctattactaaaaaatggcaggggctggcttctcccgagcaatgggctgattacacctatgaaatggtgggttacggcgataaaacggtagaaacggcacagaattatgggcgctttggtgggctctcttttcttcccgaaggcgcaaacatttgggctgggcgtcgttacctcgatcaacgtattaatatcttcgcttacaataccaaagaagtacatattgattccggcctcggttataacagtaagaattttgatctgaacgttggtaccgaccagatcgactggtccagcgataccgcgccgcaggcgatagaaggctcgcggcgcatcgttgatatggcttatcgtatcgatcagacagagctgggtatgacctatgttaaagaaattgatgacccattgggcactggcaagcagaaagcaattagtttttccgcgaaatacagcatgccgtctttttggggagtggcaaagggacaatcgacagtcaaattacagtatggtaaaggggttattgctccttatctgaacaccagtcgtattaccgtccttagcgaagagggcgattgttcaatgcgtttttccaccgacggaaacttgacgttatttgatgattttgccgtctcgccggctttcatctatgaatataccaagcgtgaaaaaactgctgaccgaaccacctttatacctgatacaggttattcagggggggacatgacctatggttccgcaaatgaaaccgggatctttaccggcgtaaacgttaaacaaaatattcatcaccaaaatctctccatgttgtatgaagtcatggtgaataacactatcaataaaaatggcgtcgaaggtgccagcggcgtcggctacaaaattgccgccggcccggccctgcaactggatgttttaccgtatgtcgcgccgattctcagtttgacggttacctacgcaggcggggacaaagaggtcacgttattgccggaagactcggagtggcgagtcgggtatcgaatggaagtctggttctgaatcattactacatcactacaggatattaccctatgaacaaacacgtcgctgctatgctgacgatgcttattattccgtctgcttttgcacaaacacctttaacagacagcaaaactatcgttattaaacccagcgctctggccgtcgagatggtgcctgatattgcctattcatttacgcaaaatatcatgggacgaccgctccagttaacgatggatttgctcaagccttatgctgataaaccgttacctgcagtagtatttattaccggcggcggctttcttgatgcgcccaaatcaaaatttatcggtcagcgggtcgatattgcccgggccggttacgtcgtcgccagcattacctatcgggtcgtacccaatgtgactttcccgggcatggttgaagatgcgaaaacggcggtcagatttttacgcgccaatgctgaaaaattaggcatcgatcccaaccatatcgctgtgatgggcgagtcggcgggtgggtatttagccgccatggtgggtaccaccagcggccataaggaattcgaccagggagagtattcaaatcaaagcagcgatgtgcaggcggtggttgatctctatggcctgtccgatctgacgaaagtcggggctgacttttccgcggacattcaaaaagcgcatcagtcaccggccataccagaggcgatgctggttaatggtattccctggcaaggcggtggcgcgatctccgcctatcccgaaaaggcgaaacgggctaatcccatcacctggatttcgaataaaacgccgccttttctgctaatgaacggcgatgccgacaatgtggtttcacccagccagtcaacgcttttacacgaggcgctggtagcgaaaaaaataccgtccacccattacgtggtgaaaggggcggatcacgcaggtttgatgtggtatcagcctgaagtatcaaaaattattattaattttttagaccaaaatctcaaagataagcatcaataatacgttacaggaacagataaataagatgaaaaaaatatttttgtgctgcgctgccggcatgtcaacgagcatggtaatgaataaaatgaaacaagcggccgcggcgcaaggcattgctgtcgatattattgctgtttcaatggatgattttgatcgcacgttaccaaattacgattgctgtcttttagggccgcagattaaatataaattcgaagaatttaacaaaaaggccgctgcggtgggtaagagagtcgccgttatcgatagcatggattacggcatgatgcgtggcgataaaattcttgctgcggcgctggcgctgctggatgaaccttcactcaacaagtagggaaaccgtatggatatggaagcaaccgtcatggaactcatcattaacgccggtgagtcccgcagtctggcgatgcaggcgctgcaagccgccagaaaaggagtgtggcaggacgttgataggctgatgcaggacgccgcagattccgcaaaacgcgcgcatgatgtacaaaccatgcttattggtatggatgagggctgtggcaaagtaccggttaatcttattctggtacatgcccaggatcatataatgacctctatgctcgcgcgggagttgatcgcggagcttattgaggttcagcgccagctgcaacatcgcaactgataaaatatgtcgccgccggcaccctcggcggcgaccgccatcagatattctccagacgaatgccccgcgttctcgggccgaagatccccaccgacagcatcaccatcagcatactgacgacgataaagctaattactcccggcgtgccggcgtattgcagaataatgccgatcagaatgctggtcaccgcggtcgagagccggctgaacgagtagcagaagccgacggcgcgggcgcgaatatgggtcgggaagacctcggcctggtaggcgtggtagctgatggtcagccaggcgttggaccaggtgatcataaacccgcagatcaccagcagaatcgggctgttttgcagagcgaacagggtgccgaagataacggtcatcagcgcggagaggacaatctgccacttgttttcaaagcgatgcacgaagcgggtgcagaacagacagcccagcggataggcgagggtgataaagaaggcgtacagcaggctatgggtgatgctggcgccctgaccggagagcagcgccggcagccagttgccaaagccgaagaaaccgatcgcctggaagaagttcatcaccatcagcatcagggtgcgctgccgatactgcggcgcccagatttcgcggaaggtgccgcgtttgacgacgctctgtgccgcatgcgcatgctttggcgacggcgtcaggccgcagcgggcttccatctcacacatcaccgtatgcgcgtcatcatgcctccctttgctttccagccagcgggctgactccggtagctttttacggataaaccagatcgccagcgagaacagtgcgccaaagatgatcacccagcgccagccgctgaggccgaacagggtggtcggcaccagcatccaggacatcagcgccaccgccggaaccgagaggaactggatgaagaaggcaaaggcaaaggctttattgcgcagatgggttggcacccattcgctgaggtaagtatcaatggtcaccagctcaatgccgaggccgatccccaccagaaagcggaagaagatcaccccttccgcgctactctgcgtcgccatcagcagcgaaaaaagaccgtaccaggcgagcgccaccataaaggtcaggcggcggcccagtttgtccgccagcggcgccagcagactggcgccgataaacagtcccataaaggtggcggaggcgaaggccgcctggtcggcgatgccgaagatgcccgcctgtccggtgtggaaaatgccctccgccagcaggcccgcgctgatatacccggtctggaagagatcgtagagctcaaagaagccgccaagtgagagcagggtaataaacgaccataacccaaatgaggcgggcagcgcatcaatgcgtccggttaagctggcgtgcggttgtcctggcgaagcatagggcgtttcgccgagaacctgggtggtagacatggtgttgtgttcctcaggaagaatggtttgcctgctaatgttaattgattgttaatagttttaaatttttaatccttagccttagcgacattctttagcgtaagatcgcgctggggagacataaagttgatattcatgctggttttcgccgcatcccagcgacggaattgaagtaaatcaccgctgacggcattttagtcgcctggcgatgtcacgctacgcaggacccgcgaaagacaaactaaacgaatcgtcaccggcggcgttttcgtgctttacccatcattaccccgggctataatgtgcccacttttattcaggagtcatacgttggacagtcacccttattgcgattttccggcaagctaacgcgatcatttcgctgcttgccgtcccggcgggcagcaatctctcagttccggattgcctccctcaataatttatgcgccattgagcgcgagaggcagcgttatgtttatgttttccagacccttatttcctccaccatcatccaccggctaatcgcccggcgcggctgagcgctacatctgtaatttttggctttctgttttctggaggaaggcgcgatggtatttccttatatgacacatttactcgcggcaatgttgttgggggcgctgatcggcgcggaaagacagtggcgacaacgtatggccggtttacgcaccaatgccctggtggccaccggcgcggcggtgtttattctcagcgcgatgtcggcctcgccggacagcccggggcgtattgcagcgcagatcgtctccggtatcggcttccttggggcaggggtgattatgcgtgatggcatgaacgtccgcggcctcaataccgccgccacgctgtggtgttcggccgggatcggcgtactctgcggcctgggacagttctggaacgcgacggcggctacgctgattattctgtgcgccaatatcctgctgcgcgaggcggcgcagcgcattcatgccttgccgggggccggtgacgaagagaaacgctatgtcttacgcgtcacctgtctgcgcgaacatgaaaatgccgtgcgtcagctgttgctgaatattgcgcagcagcagcggtttaccctgcagggattgcagtcggcggcggcggacaccgcggaccatctggagatttgcgcgcagctgattagccataagcagcaccaaaaaacgctggcgcaaattatggcacagatgggcgttcagcagaacgtcacatcggtgcactggcgtgtcggagaggcgtaggggctggcggcggagcagcggaaatggccgctcgtcgcgcgattcgccatcccgcgggaaagcggctagaatggcctccttgcaggaggttataagaatgttaaaaaatggatgtgtaccctcggaatctggtcccacagaggtgacggctgattttcgttttacccgcgtgatggccgagcaggcggcgcgggcgcgtctgacgctggacgacgatcagctgtcactcatcgcccgccttgacgccctcggtcagcagttggtgtccacgacaggcaggccgcagggggtgtacgtctggggacgtaccgggcgagggaaaagctttatcctcgaccactttttcgccagcctgccgctcgccgccaggcggcgggtccattttcatcacttcttccgcgaactgcaccagcggctgaatgccccctgagcgcccgacctgcagacggtgatgaggcagatgacatccggttgccgcctgctatgcttcgacgaatttcatctacacgacccaggcgacgccatgctgattaaagccttgctggaacacctctttcaacacggtatcgtgctgctggccacctcaaactacccaccggagatgctgctgcccaatccgctatatcacgatcgctttttaccgtcgatcgcgctgatccgcgcccatctaacggtggtggcgctgaacggcgaggaggattatcgcgtacggcatcttagccaggataacgccttctgcagcgggcggatgtgggttaatccgaatgcacaacagcgtcagctgtatgacctgccgtcgctgcctggcgaaccggtttcgctgacggtaggctatcgcacgctgctggcggccgcggcgtcgcccgcgttgctgcacttcacctttacccagctttgtcaggccgccacggcggtgatggactatctgacgctctgcgaaagctatgccgtctggctactggacgaggtgccgccattggctacggtggggccggcggcccagcagcgctttatcaatgtgattgatgtgctgtatgaaaagcagatccgcctgctgctggtgacccgctgcgacctggagacgctggtggcaggggtggaactggaggatattcaacgaacgcggagtcgcctgcaacagctgccgcgggcggtataagaaaaacgccccggcgggagccggggcgagaggattaaagatcgaagcggtcgaggttcatcacctttgtccaggcggcaacgaagtcatgcaccagcttctgctgcccgtcggcgcaggcgtacacttccgccagggcgcgcagtaccgagttggagccaaacaccagatccacgcgggtggcgctgtacttcgcttcgccggttttacggtcgctgccggtaaacagctccgcgttatcatcggccgctttccagacggtagccatatcaagcagattaacgaagaagtcattgctgagcacgccgacgcggtcggtaaacaccccgtgtttgctgccgtcgtagttcgcgcccagtacgcgcaagccaccgaccagcacggtcatttccggggcggttagcgtcagctgctgcgctttatcgatcagcagggtttccgtcgagacaccgccttcgatacggcgatagttgcggaagccatccgccagcggctgcagcagatcaaacgactcgacgtcggtctgctcaggcagctgcctcttatacgcatctgccgctgccgacgaacgctcgaggggagagagcgggggccgccgtggcgggcgaagagaagacgacagcggacactgcataccgag

SEQ ID NO: 165 - DNA, 45964 bp, Unknown
  source: /note="Description of Unknown: MKP2_2161_1 Mutant Bacteria sequence"
gcgggcggcggcgcccgggggaccgcgccgccggttcgcccgcggtggtttggtgggccggcgtgcgtggggtgatggttgcggaaaggcgccacgcctggcgggtcccgcgccgtgtcgggagtcgtctccgtaaggcctggccgcaggtgcagagcttcgccggccaggccgagctgggcgaattcctgcagggcactcgcgtgctgatcaacctgctgccgaataccgccgaaaccgccggcattattaaccagacgctgctggcgcagttgcctgatgagagctatgtcctcaaccttgctcgcggcgtgcatgtcgttgaagaggatctgctggcggcgctgaacagcggtaagctcaaaggggcgatgctcgatgtcttcagtcgcgaaccgctgccgcaggagagcccgctatgggcgcatccgcgggtggccatgaccccccatgtggcggcagtgacccgtccaatggaagctatcacctacattgcggagaccattagccggcttgagcgaggggagccggtaagcggtcaggtcgaccgccagcgcggttattaagacgagagaaccccgccacggcggggtttttgctaatcaatagcccggtttcctgctattcttgcggcaaacagaagaggagaatgtgatgtatcccgttgacctgcacatgcataccgtcgccagcacccatgcctacagcaccctgcacgattatattgcggaagcaaagcgtaaagggatcaaactcttcgccatcaccgaccacggcccggacatggcggatgctccgcactactggcacttcgttaatatgcgcatctggccccgcctggtagacggggtggggatcctgcgcggtattgagtcgaatattaaaaatattgaaggcgagatcgactgttccggaccgatgttgacttccctcgatctgatcatcgccggatttcatgagccggtgtttccgccgcaggatcgtgacacccatacacaggcgatgatagccgcgatggccagcggtaaagtgcatatgattagccatccgggtaatccgaaattcccggtggatatcccggcgattgccgaagcggcggctcgctaccaggtggcgctggagattaataactcctcgttcgtatcatcgcgcgtgggcagtgaagacaactgccgggccatcgccgccgcagtgcgtgatgccgggggatgggtggcgctgggctcggactctcacaccgcctttaccctcggggagtttaccgaatgccgcaagatccttgatgcggtcgatttcccggaggagaggatcctcaacgtttctccgcgtcgcctgcttaacttcctcgagtcgcggggcatgccggcgatcccggaatttgctgacctttaatttgtataactggaataactgaatgaacgagttttcaatcctctgccgcgtgctgggttcgctgtattaccgtcaaccgcaggacccgctgctggtgccgttgtttaccctgatccgcgagggcaaactggccgccagctggccgcttgagcaggacgagctgctggcgcgtctgcagaaaagctgtgaaatgcaatccctggcgacggactataatgcgctgttcgtcggtgaagcctgcagcgtcccgccgtaccgtagcgcgtgggtggagggttcctcggaagcggaagttcgggcttttctgagcgaacacggcatcccgacaggggaaggtccggcggatcatctcggctcgctgctgctggccgcctcctggctggaggatcatgccgcagaagaccagagcgagacgctggagctcctgttcgccgactatatcctgccgtggtgcgggacgatgctggggaaagtcgaagcccatgcgcacacgccgttctggcgcaccatggcgccgttgacccgcgacgccatcgccgcgatgtgggacgagcttcaggaagaagatgagcaataatatgtgatgcaaatcactgtttgaatgaaactgaaagaaagttcattcatatactgtgttttagatcgcattcttccggcgcgtatctgctaggatacgcgccatgaacatactcttcgcaatcgcattaacgacaggcatcctctccgggatttgggggtgggtggcggtcgctctcggcctgctgagctgggccggattcctcggctgtacggcctatttcgcctgcccgcagggcggcttgaaagggctggccatctcgtcctgcacggtgatgagcggcgtggcctgggcgttagtgattatccacggtagcgcgctggcgccacaggtgcagatcctcagctatatgatgaccggtgtggtcgccttcctgatgtgcattcaggcgcgacggacgctactgtcgtttgtcccgggcacctttatcggcgcctgcgcgaccttcgcggcagacggcgactggcgtctggtgatcccttccctggcgctgggtctggtctttggctatgccatgaaaaatagtggcctgtggctggcggcccgtgcggataagcataaattgttcgtcaacgacaacgcctgatcggcgggacgactaaaaaacaggaccttacgggtcctgtttttttatcttctcgtcaccggacaaagcgatagtcttgctcccgcaggcgagaatgccctagtatcggcagaaagccgtatccacacgctatgccgacaggaggagaaatggctgttaaacctgaggtaattctcggcgatattacgacacttgatgtcgatgtgattgttaatgcggcaaatccctcgctgctgggtggtggcggagtagacggggccatccaccgggcggccggtcccgcgctgctggcggcttgcaagcaggtgctgcagcagcagggcgaatgccctcccgggcatgcgggaattactattgccggcaatctgccggccagcgcggtgatccacaccgtgggcccggtctggcacggcggcgaccgcatggaggcgcaaaccctggccgatgcttacaaaaacagtctgcagttggcctcggcaaataactatcgctccattgcgtttccggcgataagcaccggcgtgtatggctatccgaaagaggaagcggcggcgatcgccgtgcgcaccgtcaccgcgtttctcactcgctataaccctcttgagcgcgtcctgttcgtctgttttgacgaggaaacggcggctatctatcgccgcctgctggcgtcatacccctgattcaacagaataggctatgataaccgccagtcttgacgggaatgatgggtagcaggagggagcagggtgtcagaaggaaaagtccagcagaaacagcaggcgcgccgcgcggagatcgttgtcgctgcgcaaaaatgtttcgctgaaaaggggctgcacggcgcttccgtcgccgatatcgcccgggaagcgggcctgagcgtcggtcagctatatcgcatttttgccagcaaggaagcgatcatcgaagcgattgttagcgaaatcgtcaacgccagagtcggggagatgatcgatgagaaccacaatctggcgcgtaaagcggcggttttggctggcaggatcccgacgtcggcagccaccaaaagcgataattatctgctgatggagatcaatgccgaggcctcgcgtaacccccgcttgcgtgagatcctgatgcaggccgatcggcggttgaaagaggagggcggtcgcctgtcgcagcgctaccatcccgggctcagcgatgcgcgacgcaatgccgcatcagagctcatcgccgttctgacagagggggcagcctaccgctgtgagctgagcgcctccaccccggtcgataaggcagatttagaagccctgtacaatatgattttcgaccggctttttgacgagcaggcataatacggcacgcctggcgtgccgcacaggctaatggttagctggccgaggctggggttttggccggtttgttcatcggtttaccggagaacaggaaacgcagcagcggaatgcgcaggtgaatttcatacaggatcagggcaatacccaccacaaaaaccaacccgccaataaagcctaaggtattggacttaatgaccggggtgatccacgccccgtacagcagcgtcagcggatggtgcaccaggtaaataaacagcgaagcattgacgaaataggttacgcgcgccgactggaagttcagcaggcgatggccgagcgaaaagaccacattgaccatccacagcccaagcaccatggtgatcaccgattccgtttcatacatccagccgtcgccggagccgtactgctggttcagccggtaggcgataaatcccagcagcgccgctgcgcagcaccatggtgacggggtggtaaacatcgccttcagacgcggattaataaaggtctgcgcccccagcacaaagaagggaagatagaacagcgtctgcatcaccacaaagttaaacagaccattgctaagcagcggcgggtaaatcaggaacagcgatcggcggatcagcgcgtaaagcacccccagcgcaaggaaaatcatcgttagctggcccatagtgacagtgtcaccaaaggctgaggcaccccctgttgggcggcgcgtcagccatttaaacagcaccacgcccagcgaggtcagcaccaccagcaccagtaaaaaccacaggtgggaaataagctcccacgccagggtgttaaatttgtcgtacccggaaagggtgtgccagttttccgccttgccgttgacgtactgcagcataataaactgcggcagcgtcagcagtgggatagcggtcagcatcggaataccgacccgttcgacgcgcactttccaccactttttcaacgggtagcgcaggaacagcatgtaggagaaatagccggagatgacgaaaaagacctgcatccggaaggcatggatgaagtcattaaacagcgtcaaccaccacgagggctcagcgctgttgacatgccagctgtggctggaatagatcagcgaaatgtggaaagggatccccagcagcatcagccaggcgcggatgctgtcgaagaaatattcacgctgtaccggagtattattcatacgattcacgacaatctcagataattcgtcttatcactcaagatgataacgcttacattatcagcaaccctacatgaactcggggtacctgtctccaggataagcacgcaaagtgcaaacgggatagcgaactgtttattccctgcgccgctacgctgaacaaagcagggattatgttgtcggattgcctgagtttccattaaaatagatcggatcgatttaagcacacaaagggggaagtgcttacttatatgaaacataaaccacagatgatgaaaatgcgttggttaagcgcagccgtaatgttgtccctgtgtacttcatctgcatgggcatttagcattgatgacgttgcaaaagaggccaaaacgttagccgggaaaggctatgaagcgccgaagagtaacctgccctccgctttccgcgacatgaaatacgcggattaccagcaaattcagtttaatcacgataaagcttactggaataaccagaaaaccccattcaagcttgaattttaccatcagggtatgtacttcgacacgccggtcaccatcaatgaagtgacggccaccagcgtgcgcaaaattaaatatagcccggactattttaactttggtaacgttcagcacgataaagacacggtgaaagacctcggtttcgccggcttcaaagtactgtatccgatcaatagcaaagataagaacgatgagatcgtcagcatgctcggtgccagctacttccgcgtgctgggtcagggtcaggtttacggcctgtccgcgcgcggcctggctatcgataccgcgctgccgtccggcgaagagttcccgcgttttcgcgagttctggatcgagcgtcctaaagccaccgacaaacgtctgactatctatgcgctgctggactccccgcgggcaaccggcgcttatcgctttgtcatcatgccgggacgcgacaccgtggtagatgtccagtccaaagtttacctgcgtgacaaagtgggaaaactgggcgtggcgccgctgaccagcatgttcctgttcggttccaaccagccttctccggcgcttaactatcgtccggcgctacacgactccaatggtctgtcgatcctggccggtaacggcgagtggatctggcgtccgctgaacaacccgaaacaccttgccgttagcagctatgcgatggaaaacccgcaagggttcggcctgctgcagcgcggccgtcagttctcgcgcttcgaggatctcgacgatcgttatgacctgcgtccgagcgcctggatcaccccgaaaggggagtggggcaaagggaaaatcgaactggttgaaatcccgaccaacgatgaaaccaacgataacatcgtgacttactggacgccggatcagctgccggagccgggcaaggagatgaacttcaagtacaccatcaccttcagccgcgatgaagacaagctgcatgcgccggataacgcttacgttatgcagacccgccgctctaccggcgacgtgaagcagtcgaacctgatccgccagccggacggcaccattgctttcattgtcgacttcaccggcgccgatatgaaaaaactgccggcggataccccggtcgccgcccaggcgagtaccggcgataacgctgaaatcgttgaaaataccgtgcgttacaatccggtgaccaaaggctggcgaatgatcctgcgtttgaaggtgaaagatccgaagaaaacgacggaaatgcgcgccgcgctggttaacggtgatgacacgttgagcgaaacctggagctatcagctgcctgccaatgaataagataacaaagtacattgacgcattgccgctgtcggacgccgagaaatcggcgctgccggacaccagcctgcaggccgttcatcaggccctggatgacgaccatcagaccttcgcccgcgaagacgactccccgctggggtcggtcaaggcacggcttgcgcacagctggccggattcgctgtctggcgatcagctggtgaaggatgatgaaggccgtactcagctgcatgcgatgcctaaagccaagcgctcctcgatgatcccggacccgtggcgtaccaacccggtcggccgcttctgggaccgtctgcgcggacgcgatgtcacgccgcgctatctctcccgtctgacgcaagaagagcgcgagagtgagcaaaaatggcgtaccgtcggcaccattcgtcgctatatcctgctgctgctgacgctgtcgcagaccgtagtggccacctggtatatgaaaaccattctgccttatcagggctgggcgctgatcaacccggccgacatggtggggcagaacctgtggatctcgttcatgcagctgctgccgtacgtgttgcagagcggcattctgatcctcttcgcggtgctgttctgctgggtttccgccggcttctggaccgcgttaatgggcttcctgcagctattgatcggccgcgataagtacagtatttccgcctcgacggtcggtgacgaaccgttgaacccggcgcaccgtacggcgctgataatgccgatctgtaacgaagacgttgaccgcgttttcgccggcctgcgggcgacctgggagtcggtgaaagcgaccggtaacgccgctcatttcgacgtctatatcctcagcgatagctataaccccgatatctgtgtggctgagcaaaaggcgtggatggagctgattgccgaagtgcagggcgaagggcagatcttctaccgccgccgtcgtcgtcgagtgaagcgtaagagcggcaacatcgatgacttctgccgccgctggggcagccagtatagctatatggtggtgctggacgctgactcggtgatgaccggtgagtgtctgagcagcctggtgcgcctgatggaagcgaacccgaatgccgggatcattcagtcttccccgcgcgcctcgggcatggacacgctgtatgcgcgttgccagcagtttgccacccgggtgtacggtccgctgtttacggcgggtctgcacttctggcagttgggggagtcccactactggggccacaacgccattatccgcgtgaagccgttcattgagcactgcgcgctggcgccgctgccgggcgagggcaactttgccgggtcgatcctgtcgcacgacttcgtcgaagccgcgctgatgcgccgtgccggctggggggtgtggattgcctacgatctgccgggctcctatgaggagctgccgccgaacctgctggacgagctgaaacgcgaccgtcgctggtgtcagggcaacctgatgaacttccgcctgttccttgtcagagggatgcacccggttcaccgggcggtgttccttaccggcgtgatgtcctacctgtcggcgccgctgtggtttatgttccttgccctgtcgacggcgttgcaggtggtgcatgccctgaccgaaccgcagtacttcctgcagccgcgtcagctgttcccggtgtggccgcagtggcggcctgagctggccatcgcgctgttcgcctcgaccatggtgctgctgttcctgccgaagctgctgagtattattctggtgtggtgtaaagggccgaaagagtacggcggatttatccgcgtcacgctttcactgctgctggaggtcctgttctcggtcctgctggcgccggtccgtatgctgttccacacggtcttcgtggtcagcgccttcctcggctgggaggtggtatggaattcgccgcagcgtgatgatgactccacgccgtggggggaagcctttatgcgccacggctcacagctgctgctggggctggtgtgggcggtcgggatggcatggctggatctacgcttcctgttctggctagcgccgattgttgtctcgctgatcctctcgccgttcgtatcggcaatttccagccgggcgacagtgggcctgcgcaccaagcgctggaagctgttcctgatcccggaagagtattcgccgccgcaggtgctcaaggataccgatgcgtacctgacgatgaaccgtcagcgttcgctggacgatggctttatgcacgcggtgtttaacccgtcgtttaacgccctcgccaccgcaatggccactgcgcgccaccgtcaggggcatatcctggagatcgcccgcgagcgccatgtcgagcaggcgctgaatgaaacgccggataagctgaaccgcgatcgccgactggtgctattgagcgacccggtaaccatgtcgcgtctgcactatcgcgtatgggccgcgccggagaaatactcttcatgggtgaacgcctatcagcagttggcgcttaacccgctggcgctgaaaacgaaataagccgtacgttaaggaaaataccggcagcgatgccggtatttttttatctgaaatacgaggatgtggatgcgaatactaccgatcattgccatggcgctgctgctcagcggctgcggcagcattatcagccgtacggtgcccgggcaggggcatggcaatcaatattacccgggcgtacagtgggatgttcgcgattcggcatggcgctatctcaccattcttgacctaccgttctcgctggtatttgatacgcttctgctgcctctggacgccagccacggcccctataactgattaacgctcgtcccactcgtcggctgccgtctgcccctcttcggtgtccagcgagggctcgagctgaaattcgccttcatcccattcgtggagcgtattttcctccagccactcctgacgcagctctatctcatcataatccccgtcgaagacgctctgcgcggcttcgccgctgagcatcgggaggcattcgccttgttcctcttcgtcagcaaaaaattcggcctgccaggcgatatcgccatcctgcagcacatacttttgaatgttgagctgctcaacgttggcgctctcttcatcgctgtcagggttgttggcgagaaattcttcacgtgctgcatcaatagcttcttcaagcgtggcgtagaacatcgaatcctttggcatagcgaatctcctgagaagaatatgaattgaacacgattcaatctatagaaggcggtacgcacggcgtcaagggacagagcccctctcgacgttaatttactgaatgcgaagtatccgcggctggccgacgcaggctgagggtggagtagatcgcattaaataataccacccctgcggtgaccagaaatacagcgcggaagccatagttagcggaaaccgacgcgccaatcagggggccggtaacgttgccaatatcgcggaacgactggttatagctgaagattcgcccggagatctggctggtggagttgtacaccagcagggtttgcaccgccggcagcagcgcgccgtccgcggcgccgagcaggaatcgcaggatacctaactgcagcggggtctgaacgaacgacatcgggatcaggagtagcaccgagataatcagcgccacgatgaggattttttccggcccgatgcgatctcccagtttgcccagccgcggggcgctcatcagcgcggcaatgcccggcaccgaggcgatcattccgctgataaaggcgatgttactgacgttgcccgcgagatcgcgtacataaagcgtcaggatcggcgcaatggaaccggtggccacctggattatcagcgaggtcacaaacaggctgagcaccagtttgggattctgcagcgaggagaacacctctctggcactgagcatctctttcctggcgatcggcacaaaattttcgcggattaaaaacagggtaaacaagaaacagataaatagtaccgccgcggtcataaagaagacggtgcgcaatccccagtggtcggccaggaagccacctgccagcgggccgagcagggcgccgcttaccgcgccggtagacagtgtccccagcgcccagccgcttttatggcgcgggatctgggtggcgatcagggcgttggcgttaggaataaaaccgcccagcaggccgagcaatgcgcgcagcagcagaaactgccagatattctgcgccattcccatcagcatcatcacgatggccatcccgagggcggaacgcagcagcatgatttttctccccttgcgatcagcaagccccccccagaacggcgaggcgatggcggagaaaagaaaggtaatactaaagaccagcccggaccacatgttcagggcgctatgcccggtgacgccgagctgttcgacgtagagtggcagaaagggcatgaccaggctgaaggcggcgccggttaaaaagcagccaagccaggtcacggtcaggtttcgtttccagttaatgggggtttcagcagacgacatagggttccactggcctgcgcggcaggtcaaattaagagaaaatatgagcctgctaattatgcgcctgagaaatagatgccgcaatggaggagagcttttaaagctaaaggagagcctaaagcctgagcggcgaagcttcccggccgggatgagcgcggccgggaaaagggatcagtagcgggagggcatgccttcggggcgggttttgaagcgacgatggagccacatatactgttccggggccatcatgatgcactgctcaacgatcttgttcatccacgcggcggtggtttccgcgtcgtccagcggcggggaacactctggcggcaggataatcagttcataacctttaccgtccggtttgcggcgcgggacgaagggcacgatgcaggctttggacattttcgccagcatccaggtgccggaggtggtcgccgcctggtcgaccgcaaacagtggggcaaagacgctggcggtcgggccgtaatcgtgatccggtgcgtaccacaccacttcgccttttttcagtgcccggatcatgcctttcagatccttacggtcaatcatgtccttattggatcgtagccgaccccaggtctgcagccagtcgatcaccgggttgtcgttggggcgatagacgccaatccccggttcgttcataccgaacatccgcgcacccatctcgagagtgaggaaatgaataccgatcagcagaatgccgcgctgctgcgcctgcacatcgcgaatatgctcaaagccgatggtgtcggtccagcgggcgatacggcgaaccggccagaaccaggccataccggtctccatcagccccatgcccaccgattcaaagttcatcaccaccattcggtggcgttcctgctcgcttttctcggggaagcagagctcaaggttgcgataggcgattttcgcccggcgcttcataaagcgcatggccagacggccgatggcgttcccgaggcggtagatcagcgggtagggcagttggacaaccagccacagcaggccgatacccagccacagcagccaatagcgcggatgcaacagcgccggagaaaatttaggcaaatgagtcatttcatacccgtatcagtgagcaacgtcttatattatcgcatttttttaccggccagccaaaggcggcgacagtcagctcgttttgttaagcggggcgcgaccgggtgagagaaatgtagcgtaaaatgtagggatgtaaattaattagctttgctatatcatgcccgccgtttatttcctcatttctatgtcgagcaggtacaccatgccagtgttacacaaccgcatttcaaatgagacgttaaaggcgcaaatgctggctgaaaccgagccgcgcacgacgatctcattctataaatatttcaccattgtcgacccgcaggcgacccgcgatgcgctgtgggttgccttaacccagctgaaggtctttggccgcatctatctggcccgggaagggatcaacgcgcaaatcagcgtgccgcaaagcaacgttgaggctctgcgtgagtttctctatggcttcgatccggcgctggcggggctgcgtttcaatatcgccgtggaggacgatggtaagtctttctgggtgctgcgcctgaaagttcgcgatcgtatcgtcgccgacggcatcgacgatccctcgtttgacgcctccaatgtgggggagtatctcaaggcggcggaagtcaacgcgatgcttgacgatccggatgccgtgtttatcgatatgcgcaaccactatgaatatgaggtgggccatttcgaaaacgcgctggagatcccggcggataccttccgcgaccagctgccgaaagccgtggaaatgatgcaggaccataaagacaagaaaattgtcatgtattgcaccggcggcattcgctgtgaaaaagccagcgcctggatgaagcataacggcttcaataaggtctggcacatcgagggtggcatcatcgagtacgcccgtcgcgcccgcgagcaggggctgccggtgcgtttcattggcaaaaactttgtctttgatgagcggatgggcgagcggatctccaatgacgttatcgcgcactgtcatcagtgcggcgcgccgtgcgacacccatactaactgcctgaacgatggctgccatctgctgtttatccagtgcccgagctgcgccgagaagtttgccggctgctgtagcgaagcctgcatggaagagcataagctaccggaagaggagcagcgtaagctgcgcgccgggcgtgaaaacggcaacaaaatctttaataaatcccgtggccggctgaataccaaactcgggatcctcgacccggagccgtcagaaaaaccataaccagacgagatcgatgatcgccagcagcagccagagcgccaggtagatcataaaatgctcgcgcacgttgttgaccagcatattaaacaggcgacgcataaccgctctcaatcactaacggcctcagcagaggccgtttctttacccaacggcaaaagtgccgcattccattacgcgttaaagcgcgccagagaaaagggggccagattgaagctcggtgcttcgccctgagcaaactgactggcaatttcgcccagcaccggcgcaaacttaaagccgtggccgctcagcccggtgatcagcagcgtgtctggcctgcctggcaacgtatcgataataaagtcctcatcgacggtattgtcgtaggtacaggaggcgccgtgcaggcagccgccgatgccaggcaggacgttacgcaaaaacgggaaggattcggaaccatcgctggcgacagcgccaaacgctaccctttcctgcggggtggagatcggctggccgccgttatgcttgccaattttcagttcattatcttccgccgggaaaccgtaatattgatcgccgttgggcaactcgccggtgaaggccgggaagtgattcttgctgctgtaacggccatcggcctggtaccaggcgaacaccttgcgtaccggctggatagggaggtccggaagcaggcgggtgacccaggtgccggcgctgaccagcagctttttaccatgatattcaccgtcgagggtatcgatggtgatcccgtcagcatggtgatgaatagccgagaccggacagttgaatagctgcgcgcagcctgcttcccgcgccagacggatccaggtttcgacggccagttcgctgcgcagtacgccggaagcgggttcgaaaatcgcccgatagtcatcggggaggcgtatctccggccagcgctgcatcacggcctgggcatcaagctcttccacctcaagctggaacgcacgggcgctggcggcgacgttggcgagaaaagcggagctggcggggccgaggttaatgacgccggtgcgttcaaacacggcttcgccactgatctctgccagttcgtcccatagctgctgggcacgcagcaccagcggaacatatttctcaccttcgccataggcgtgacggataagacggctgctgccgtgatggctgccttcctggtggggaggttgatgggcatcggtcatcagaacattgagtccggcacggcgcgcataatagccagcggcggcgccgacggagccgctgccaataatgataagatcgtattgcatggtgagttccgggtaattgccttgttagcagggtaattaactccctgtgcttatacaagcccgaaaataattcaggcacccgcaggtgcctgttaagtttaatgttaagtcattcgcaagccgcgttaatgtcggcgatactcgttttcctggtattcgccagattcaatcttcgcaatgcctgcttccaggattgaaataaactgacgtgcgacgtccgtcgttagccatagcgtctggccgatctcagcatcattactgttttcttgagtggggttctggtagtgcaggcgcaacatcagcgcatcgtagctatgaacggtgctgatgtcccatccaacgaggggatgggtctgaatgacttcattatttttttccatcataaccccttattcatatgttaaaagacaacaattctcgaggtttaatgcatattttttgaagcaagttaattatatcagggatcaagaataaactcgagaaattaaatgaaaggcagcatgattttcttcttttgccgcttttttactcaagataagcgcgtaaaatggccactttagtcgatattgagcagaataatcaggactattctgaacagaagaggggataaaaaaagccggggcgacccggcaaaaaaagcacaatgagggagcaaaccagagtaactggatcccgccatgcttcaggagagatcgtggacaaaccagtcgtccgcgctttcccatgtttcctgcaggatttcgcttatccggtctttgtcttctttcagggcgccaaacaccgagagctgattaccggtggcgtagcggacgctcacctggctatcgatggccgggaattgctcggcgatacggcgagagagttcgttattcagcgcttccagcgcgccgttaggtaaggcggtcgttttggcgatagacacttcaatgcgcataattgccccctgcgttcgatactggttatttatacagtatccggttagcgttgacaacagggggctgcgtttttatttcttcacggtccagcgaacggtttcacccgccaggaagggcaccagggtgtcattaggcagggcaatgctgtccacaacggtcgtctcttcacgcaccagttcaacgtagctctcattgaccggcagaccgtagaagcgcgggccgttcagcgagcagaaagcctcaaagtgctgcagagcgttcatttcttcaaacacggtggcgtagctgccgagggcggtcggggcgttaaagcagccggcgcagccacagctggcttccttacggtggcgggcgtgcggtgcggagtcggtgccgaggaaggcgcggctgaagccgctggcgaccagctcccgcagagcctgctgatgaatattgcgtttaagtaccggcagacagtacaggtgagggcgaatgccgcccaccagcatatggttgcggttgaacatcagatgctgcggggtgatggtagcagccagcagttcattaccgtcacgcacgtactcagcggcgtctttggtggtgatatgttcaaaaaccactttcaggccgggcaggcgctggcgcaggggctccatcaccgtctcaataaagcgcgcttcacgatcgaaaatatcaatctcggcgtgagtgacttcgccgtgaacgagcaacggcatccccagtttttccatccgctccagcactggcataatggcgtcggtgctggtgacgccgtggctggagttagtggtggcattggccgggtagagcttggcggcggtgaaaaccccttcgttaaagccgcgttccagctccgctgggtcgagggagtctgtcagatagcaggtcatcagcggggtaaaatcatgcccggccggcacggcgtccataatgcgctggcggtaagcgatagccgccgcgacggtggtgacaggcggcaccagattcggcatcacgatcgcccggccataaaactcactggtataaggcacgacggttttcagcatatcgtcatcgcgcagatggatatgccagtcgtctgggcggcggattttcaatacctgggattgtgctgtcatggaaggctccggctaataggttcagtcatcagggctgttttttgccgggcactaaggataagcgtaaacgttttcctttgcactcatttccgtaaaaaattcagggcgccgtagcgccctggagattaattggtaaaggggatgacaatctcgcctggcttcacctctatacctttggcgtatttcttcgccagcgcttcgccggtgctggcgtcctcacgcaggacataagccggctgctggctgaagtagctgcgcagagactgattcaggtaggggagcagggcctgaataaccgactgcagcttctccggcgccactttggcatcgaccacttccatttcctgcaggaagatggcgcctttctctcggtcaaaggttggcagcgctttgagcttcagatcgatcgtcgctttctgcgtaccgaacagggagttaagatcgacgttggcgatcccgctcagggtgactttgcccggctcctcgcgcccgatagcgctggtcaggttctgcagttcgatatgggcgtcggcaacgcctttcagaccaatatctttggcgaaatggtttcgcttctgcagggcctggttaatctcctgctcgcttaccgtgtattgggtcagctgattacagccgctcagcaggccgctgacaattagcgcggcggcgatcaatatctttctcatggggttcctcaagctcataccttccttcatcctgacacaaagcatcatgacctgtcagcacccatcgcgccagcagaataggctgaaagcaggagaaaccgccgccgcgcgcatcaggtgcgcggctccagcataccggaggcagagcgtttcgggctgaattgccaccatagcgccaggaaggtgataaccccgatggcgccgagcatcagccacggcagttcgggctggccgacggctttcccggcatcaaacagccagccgccgcccgcgtaacccagcgcgccgccgaaggcgagccccagacggctgaaacccatatagctgccacgcgcccgggcgtccgccagcgaagcgcccagcgtctcgcgggcgggttcggcaatgatagagccgatgtaaaacaggcaaatcagggtaaacagctgctgtaaactgctggtcatcccgatggggagcatggccagggtcatcaccagcagaccggccatcagccggtgctcaaggcggaagcgtttttcgctccaacgggcaataggatagagcagggtgagcgaaatggtggcttcgatggcgtacatccatttcacggcggccggcgagccggcgatgtcattcaccatgatcggcagcatcagcatcacctgcaccgccagcatataatagccggtcagcgtcaggacataggtgacgaagcgtttgtcccgcagcacccggcccagaccctcgcgaatcggcgttttcaccgtcgagagcttccatgccggcagataccaggcgttaaacgcggcgcaggcgataaacagcgcggcgccggcgctgcacaccaggcgaaaatcatactgcagcagccagctgcccagcagcgcgccaatcaccgcgccggcgctatcctgcatcatcaggatggagaaaaagcggccgcgctgatgcggacgcaccagcttaaccaccagcgccgcccgcggcggatcgaacagtgtaccgccgagtccggagagtatgcacgagaaccacagcacccacggctcatgggcgacggccatcgccgcgaaaccgccggcacgcatcagcataccggtgacgatcatcggtttcgcgccgaagcggtcggcgatggcgccgccaaagatgcctaatccctgctgtaccagctggcgcaggccgagcgcaatgccgaccatcagcgctgcccagcccatctgatcgacaaagcggatggaaatcagcggaaaaacgacaaaaaagcccagcacgaccagcatgttatcgactaacaggaaatatttacccaggctccttgcctgcgagacgcgggacatttcccctccagggaaaaatagagataagcgaggatattctgcgggcaatctgctgcttttcccagcacccttgcgacaatatttttttatcaaaaagcaagatcgattgagcctattcatcgaaaagaggagatggcgcagaaaatggtatgttgctgttttcacactatcgtgcaggaaaggtatagtgatgaaagcaagagtgaagtcagggggactgaaaaaggaaatgtttggctatcgcagtaacgtgccgaaggtgcgtttgacgacggaccggctggtggtgcgcctggttcacgatcgtgacgcctggcgtctggccgattattacgccgaaaataaagcgttcttaaaaccctgggagccggttcgtgacgacagccactgctatccctccggatggcaggcgcgtctgtcgatgatcgctgagtttcataagcaggggtcagctttttatttcgcgctgctcgaccctgaggaaaaagagatcatcggtgtggcgaatttctccaacgtggtgcgcggatctttccatgcctgttatcttggctattccattggcgagaagtggcaggggcaggggctgatgtttgaagcgctgacgtcggcgattcgctatatgcagcgcacgcagcatattcatcgcattatggccaactacatgccgcataatcagcgcagcggcgcgctgctggcgcggttggggtttgaaaaagagggttacgccaaagattatctgctgattgacgggcagtggcgtgaccatgtactgacggcgctaacgacgccggactggtctgcgggacgttaaggagagaggatgaaatatcagttaactgcgcatgaagcgcgcgtcattggctgcctgctggaaaagcaggtcaccacccccgagcagtatccgctgtcggtaaatgctgtggtgaccgcctgcaatcagaaaaccaaccgcgagccagtgatgtcgctgagcgaaggcgaggtccaggccctgctggatacgctggtgaaacggcactatctgcgcacggtcagcggattcggtaagcgcgtcaccaagtatgaacagcgcttttgcaactccgaatttggcgatctgaagcttagcgccggcgaggtcgcggtggtcacgacgctgctgctgcgcggtgctcagacgccgggcgaattacgcagccgggcgcagcggatgtatgagttcagcgatatggcggaagtggaaagcgtgctggaagggctgacgacgcgcgaagatggccccttcgtcgcccggttgccccgggagccgggaaaacgggaaagccgctatatgcatctgttttgcgacgatatggacacgctgatcaccacagtggaagctctcgcgccgctggacgatgacggcgatctgcgcgccagggttgaagcgctggagggcgaggtggcggagctgaaagcgcgcctcgattcgctgttacaccatctgggagactaaaacgtggggacaagattgcgcattggggtggtcggcttaggcagcattgcgcagaaagcgtggctgccggtgctgggggcggcggaaagctggacgctgcaggcggcctggtcgccgggtaaagagaaggcgctacggatctgcgaaacctggcggatgccatacgctgattccctcgatgccctggcggcacagtgcgatgcggtctttgtccatacctcgacggcttcacattatgaagtagtgaatcacttactgaatgccggggttcatgtttgtgtggataaaccattggcggacaagctgagtgaggcggagacgctggtcgagctggcggcgcgacgtcgactgacgttgatggtcggtttcaatcgccgcttcgcgccgctctatcgggagctgaaggggcggctgggcgaggcggcctcgctgcggatggataaacaccgtagcgatagcgtcggcaacgatctgcgctttacgctgcttgatgactatctgcatgtggtggataccgcgctatggctggccgacggtcaggcgcgtctgcgcggcggcgcgctgaagatcaccccgcagggcgaaatgctctatgccgaacatcagttcagttcgccccggctgcaggtcaccaccagcatgcatcgtcgcgcaggcagccagcgcgagtgggtgcaggcggtcacggatggcgggctatatgccgtcagcgagatgcgcgaatggcaggaggagtgcggtcatggcgtggtccagcgcccggttgccggctggcaaaccacccttgagcagcgcggctttgtcggctgcgcgcgccattttatcgaatgcgtgcaaaatcagacagttcctgaaactgcaggcgaacaggcgctgctggctcagcggatcgttgagaaactgtggcgcgacgccattagcgaataatccattgtaacaactgacagtagtaattcatgttgaacccggtagactatcgccactttccagcgcccgcatttgcgggcgttttactccagggtttggaataacagcgtaatgaaccttttaaaatcactggcggcagtcagttcgatgaccatgttttcgcgcgtgctgggctttgcccgcgatgcgattgtggcgcgtatttttggcgccgggatggcgactgatgccttttttgtcgccttcaaactgcctaacctgctgcggcgtatttttgccgaaggcgccttctcacaggcgtttgtgccgatccttgccgaatataaaagcaagcagggcgaagatgccacccgcgtgtttgtctcatacgtctccgggctgctgaccctggccctggctatcgttaccgttatcgggatgctggcggcgccgtgggtaatcaccattactgcgcccggctttgccgataccgccgataagtttgcgctaaccacccagctgctgcgtattacctttccctatattttgctgatctccctggcttcgctggtgggggcgatcctcaatacctggaaccgcttctcggtgccggcctttgcgccgacgttcctcaacgtcagtatgattggctttgcgctgtttgccgcgccatatttccatccgccggtgctggcgctggcctgggcggtgacggtcggcggcgtgctgcagctggcttaccagctgccgcatctgaagaagattggcatgctggtcctgccgcgaattaatctgaaagatgccggcgcgatgcgggtggtgaagcagatggggccggcgatccttggcgtgtcggtaagccagatctcccttatcatcaataccattttcgcctcattcctcgtgtcgggctcggtgtcgtggatgtattatgccgaccgcctgatggagtttccctccggcgtgctgggcgtggcgctcggcactatcctgctgccatcgctgtcaaaaagcttcgccagcggtaaccatgacgagtattgccggctgatggactggggactgcgtctctgttttctgctggcgctgccgagcgcggtggcgctggggatcctcgccaaaccgctgaccgtggctctgttccagtacggcaaattcagcgcctttgacgcggcgatgacccagcgcgcgctggtggcctattccgtggggctgatgggccttatcgtggtgaaagtgctggcgccgggcttctattcccgtcaggacatcaagaccccggtcaagattgctattatcaccctgattatgacccaggtaatgaacctggcgtttatcggcccgctgaagcatgcgggtctgtcgctgtccatcggcctggcggcctgcctgaacgccgcgctgctctactggcagctgcgtaaacagaaaattttcaccccgcagccaggctggttggccttcctgctgcgtctgattattgcagtgctggttatggccgcggcgctgctgggcgtcatgcatctcatgcctgagtggtcgctggggacgatgccgttccgtctgatgcgtttgctggcggtggttatcgccggggtggtagcctatttcgccacgctgctggtgctgggcttccgcgtgaaagagtttgtccgtcgcacggcgtaagcggttgtgagggtagaaaaaccccgcttcgcctcaggcgaagcggggttttttttatgatgcgctgcgttcggcagcgaggatgcgggcattctccagcaggcggatcgccagggctagcgcgccagtgatcactgccagcgtgaccactccgttccagccggccagcacgtacagcttactgcccagcaccgatcccagcgacatcccgataaacaccacggtgaacagcagggcgttgaggcggccgcgggcctgtggctcaaggccatataccaggttctgatgcgccaccaggcttgactgcaggccaaggtcaaagccaatcgccgacagggcaatcagcgccaactgagcgtgcactggcagcagcggcagcacaaacatcagggcaaaggagagggtgaccagcgccgcacccatctgtgtcaccttaccggcgccaaatttatcggccagaccgccggcaagcggcgcggccagcgccccggcggccccggcgataccgaaaccgcccgctactgcgctgcccatgtgatagtgttcggagagcatcaccgccagcgtcgaccagaaggcgctaaaggcgatagagagcgcgccctgagctagcgcggcgcggcgtaatgccgggtaacgctgccacagatgcgccatcgaggccatcagctgcggatagctcagcgtcgagtgcacagcgaagcgcggcaggacgcgccacattaccaggccaatcagcgcgacgctgaccgccgccgcctgatacatcacccgccagccgaatacggcgcccaccacgccgctgaccgtccgggagagcaggatccccagcagcagcccggtcatcaccgtgcccaccatttttccctgcttgcccgccggggcgaggatcgccgccgccgggacgatatcctgcgccatggtcgccgccataccgatcagcagactgaccaccagcagtgagctgagctggccggtgaggctgcacaggagcagcaggagcgccagcagcgcgcttttcaccaggatcagccggcggcgatcgtggcggtcgccgagcgggagcaggaacagaatgccgagcgcataacccgcctgcgtcagggtagggaccagacccataccttctacagtcaggtggagattggcgcccatcaacggcagcagcggctgcgcgtagtaaatagaggcgacgctaaagccggcgccgagtgcgagaatgaagataatccagcctgcgtcgcgggtggaaagggaagtcggtgtcatgttcaatgcctcatagatgcgatggggctatttttccctgaacgcgactggcgcggtagccgggctggtggtaaaacggttatacgtagcacgtataggcaaaaggaaaatgaaaagacaagagcgtatagaccgcattgagctgatgcgcacctatatccgcatcgtagaggccggatcgctctccgccgccgcagggcagatggacactacccaggcgaccgtcagccgccgcctgcagtcccttgaagggctgctgggggttaagctgatcctgcgcaccacccatgcgatgaagctcactgacgatggcgaacgctgttatcgtcacgcccgtcaggtggtggacgcctggctggcgctggaggatgacctgcgtattgccgacgatcggccggtgggcgttctgcgagtgcgggcgccccacgcgtttggccagcagcagctgctggcgccgctggtggcatttctacagcgccatccgcagctgtcggtggagtggatgctaaacgataataccgtcgacttcctcagcgataatatcgactgcgctattcgcgtgggggcggaggtggatccagcaacggtatccgtactgctggcggaagtgccgcgctgcgtagtggcttctcctgagctgctggcgaagtatccgccgttaacctcgctggaggcgttatcgggcctgccatggatcgccattaataccttttatcagcatgaggtacggctcaggcatcaggcaagcgggcagattgtctctacagcgattactccctgtctgagcactgacagtctttacgtcgcgcgcaacaccgcgctggcggggctgggggtggcgatggtgtccagctggacggtcgtggaggatattgccgccggacggctgattgagctgttcccgcagtggcgacccgcctcgctgccggttcatctggtttatccctgggcgcgctattacccgacacgcctgcgtaagttcctcgacctgatgcgggagatcatgccggatctcgccgggatgcagcgtccgcaaagcgcataaaaaaaccggccaaaggccggtttttttattaagcacgcttactcgacgggctgtgggcgagtcggttcagcggtggctttatgggtcgcgctatgaccaccggcggcgcctttaccttcaaaggcgaacggcgggcgcacccaggtgctgtgacgcggtgcttccgggacatagtccggagctggcgcacgggtcattggcgcggtggcatggcgatgacccgccactacgaccggcttgctcaccgggggctcggctttgaccggttcggcaggggccgcttcggtcactggcgcttgctccacggtttctgcggccggggcgatggtttccactggcgctgcaacgacaggcgtcgtttctaccgcttcaggttctaccaccaccggctcggcgtcgagcgtcactggcgcgatagcctgaggcgcttcgacagccggtgcttcggtgaccggctcctgaggcgctggctcgacggctgctggcgcgacaacttccgcagcatcaacgaccagcggctcggcggccgctaccggctcgacgactaccggctcagcggttactggttccatggtagccggctcgacggtgaccggcgcagcggtaacggtttcaacgacggcaaccggggccgctacggcctcgacagttttcgcgacgctggcgtcctgaacctgaacctcttccggctgctgatcctgcggacgaaccaccgggtagcggatccagactttaccggaagccatctccggcgatgcgcaggctacggtcagcggcataggcgactgggtcggatagcgttcgtcacgatagcgacgacgacgctgaccgctgacgcgcaggtgacgcggggagcgacgtgagcgacgcggcataccgttcgcttcacgggattcgccattttcgtcctggtccgccacgctctccacccctgccggcagctcggctttcaccggctcgctttgcggagcgataacttcagccactacggcttctggcacgatctcggcaactggctcgacgacagcggactcaacgcgcactttctgtgccagctggcgcggtttacgacgcggcagagtttgtacacgctcttcctgctccgtctcctgcacaactggctcttcgcgagtctgcgctttggcttcctgctgcgcctgacgtttgtcgtcattgcggcggcgggtgcgttcgcggcgcggctgctgctcgtcacgggatttcgctttctccgcgtcgtcgcctgaggtttggcgaacatcacgggcttccacgttctgcgacggcttctcgcgacggttgcgacggttctcttcacgcgatacgcgcggttcacggccctcggcattgtccgcacgggtgtcgcgattgtcacggttatcgcggttgtcacgattgtcgcggttatcacggcggtcgttgcggtcgcggcggttgttggcgcgcggtttacgacgctcctgctgacgctccggtttttcttccgctttcttctcgacctgaacttcagccggtttggcctcttcggcgccagagaagatattcttcagcgcgctgaagaagcgtgagagcaggccaggctgcgccggtgcggcggccgcgaccggtgccgctgcggcgacaggcgcggcggcaggctcttcgagcatcggggctggcggcgcatctggcatgacaaaagcggccagggccggctgttccggacgtttccgctccgccggctcatcgtcgcctggcagcgccatctcttcttcatgcagcttcggcagcagatagctcagcgttgaggtttcttcacctttgcgcacgcgcaggacggagtagtgcggcgtttgcatttcgtcgtttggcacgataataacgcgcacatcgccctgacgggattcgatagcgctcactgcggcacgtttttcgttcagcagataggaggcgatcggtaccggaacaatggcgtggacttctttggtattctctttcagcgcttcttcttcgatcagacgcagaatagagagcgacagcgattcgttatcacgcacggtgccggtgccggagcagcgcgggcagacgtggtggctggactcgcccagcgacgggctcaggcgctgacgggacatctccagcaggccgaagcgcgaaatatggctgatctgaatgcgcgcccggtcctgacggacggcttcgcgcagacgattctccacggcgcgctggtggcgaaccggggtcatatcgatgaagtcgataacgatcaggccgccgaggtcgcgcagacgcagctggcgggcaatttcgtcagccgcttcgaggttggtattgaaggctgtctcttcgatatcgccgccgcgggtggcgcgggcggagttgatatcgatcgcggtcagcgcttcggtgctatcgataacgatagacccgccggaaggcaggcgcacttcgcgctggaaggcggactcaatttgcgattcgatctgataatggctgaacagcgggatttcaccggtgtacagtttgattttgctgctgaaatccggacgacccagcgcggcgatatgctggcgcgccagctcaagcactttcgggttatcgatcaggatttcgccgatgtcctggcgcaggtagtcacggaaggcgcggacaatgacgttgctttcctggtggatcaggaacggcgccggacggctttccgcggctttctgaatcgcttcccagtgcttcaggcggaagctcaggtcccactgcagggcttcggcggatttgccgacgccagcggtgcgaacgatcaggcccatgccgtccggaagctccaggctcgccagcgcttctttcagttcggtacggtcgtcgccctcgatacggcgggaaattcccccggcgcgcgggttgttcggcatcagtaccagatagctgcccgccaggctgataaaggtggtgagcgcagcgcctttgttgccgcgttcttctttatcaatctgcacgataacttcctgaccttcccgcagtacgtctttgatattaggacgaccatgcgcattgtagttggcggggaagtattcgcgggcgatttctttgagggggaggaaaccatgacgctcggcgccgtaatcaacaaacgcggcttcaaggctgggttcaatgcgggtgattttgcctttgtagatgttcgcttttttctgttcgtgcccggggctttcgatatccaggtcgtacaggcgctgcccatcaacaagggcgacgcgcaactcttcctgctgagttgcgttgattaacattcttttcatcgtaacttactcattattcttacattgacgactaagctgcgggcagagtaatgcctttccgggggaaaaccgatggcctcgtgtctggttcacgtcgccaacctcacggttgtcgcgcgcttaagaggcgcagagtgtcggtcgcctgtgtttcaaacggaaacacagcgcaattattcaggggaacagcctgggatgtatcaccagagaatattccatttatactcgtcgtctttcgcgttgcaggcatggtggcttaacctgctcacctcgatctggcgatccagatgagctcccgggagtcccggagttgacgccttcctgcgacttgaaatccatagagcctgtaccggtaaggactgcaacccgcagcccgctaactgtctgaaagatcacaacgtcttacgccattgctgcgtgggcgatcggtcagacaaaattggtcattccgctaatgtcttgttctaacaagatgcaatacggaaaacggtctcattattccattgctaaccttgttatagcaagttgactttcaccttttatcacccggttactcacagttttatcacctgcccatacagattgttctaataacaaacaaaatggcggtcaggtaaaccgtgaaaacaggataatgataaatataagcatataaaaatgagtggcgctaatgcgtccggctatttagaatcgcgcaccatgaaaactgagaccccaaccgtaaaaatggttgccattgctgctgatgaagcggggcaacgtatcgacaactttttgcgtacgcaattgaaaggcgtaccgaagagcatgatttatcgcatcctgcgtaaaggcgaggtgcgggtaaacaaaaagcgcgtgaagccggagtataagctggaagcgggcgatgaagtccgtatcccgccggtacgcgtggcggagcgtgaagaagaggcggtatcgccgcacctgcagaaagtggccgcgctctctgaggtgatcctctatgaagacgatcatattctggtgctcaataagccttctggtactgcggtacacggcggcagcggcctgagcttcggcgtgattgaagggctccgcgccctgcgcccggaggcgcgcttccttgagctggtgcatcgtctcgaccgggatacctccggcgtgctgctggtggcgaaaaagcgctcagcgctgcgttcgctgcacgagcaactgcgcgataaaggcatgcagaaagattatctggcgctggtgcgcggccagtggcagtcgcataccaaagtggtccaggccccgctgttgaagaatattctgcagagcggggagcgcatcgttcgcgtgagtcaggaaggcaagccgtcggagacgcgctttaaagtggaagagcgttacgaattcgccacgctggtgcgctgcagcccggtcaccggccgcacgcatcagatccgcgttcatacccagtatgccggccatcctatcgcttttgacgaccgctatggcgaccgagagttcgacaagcagctgtccgctaccggcttaaaccgcctgttcctgcacgcggcggcgctgaagtttacccacccggggagcggggaggtgatgcgcgttgaggcgccgctggacaaccagctgaagcactgtttacaggtgctacggaagagcaaataagcgcaacggcggaatcagttccgccgtttttttgcctcagcctaacagcgggttgtagttttcacggcgcaacatctgacagagcgcgattaagggtaaaccgaccagggtgttcgggtcgcggccttccagccgttcgaacagcgtaatgcccaatccttcgctcttgaaactccctgcgcactgcagcgggttctctttgcgcacatagccttctatctctttatcactgagatggcgaaagtgaacgtcaaagggttcgcattcggtttgcagatggccgctggcagagttgtacagcgccagtccggtataaaaggtaatgattgacccgctggcctttcttaactgcctgcgggcattttcctcggtgtgcggtttgccggtgatttcaccgtccagtacgcaaacctgatcggagcctataataaggtgattagggaagcgtgtggccagactttgcgctttggcctgcgccagtcgggtgacaagctgacgtgcggattcatcaggccggggcgtttcgtctacgtcaggcgcggcacattcaaacggtaaacccagtttttccagcagcatgcaccgccagggagaggttgacgcgaggataagatcagacatattttttcatccacatatagcgcttcgcagagcatcatcttaaactatgcgccgcaatgtgtgcgaataaatggcaaaaggcaacctgaggctgcctttttctttgactctatgacattacaaagttaatatgcgcgccctatgcaaaaggtaaaattacccctgacttttgatccggtacgcacggctcaaaaacgccttgattacgaaggcatctatgcccgcgatcaggttgaacgtgtaaccgattctgtagtcagcgtggacagcgatgtggaatgcagcatgtcgttcgctatcgataaccagcgtctcgccgttattactggcgatgcaaaggtaacggtaactctcgaatgccagcgttgcgggaaaccgttctcccatcacgtccacaccacgtattgttttagccccgtcagaaatgacgaacaggccgaagcactaccggaagcgtatgagccgattgaggttaacgaattcggtgaaatcgacctgcaggcaatggtcgaggatgaaattatcctctccctgcccgtagttccggtgcatgattctgaacactgtgaagtgtccgacgcggacatggtctttggcgaactgcctgaagaggcacaaaaaccaaacccatttgccgtattagccagcttaaagcgtaagtaattgaggagtaaggtccatggccgtacaacagaataaaccaacccgttccaaacgtggcatgcgtcgttcccatgacgcgctgaccgcagtcaccagcctgtctgtagacaaaacttctggtgagaaacacctgcgtcaccacatcactgccgacggtttctaccgcggtcgcaaggttatcgctaagtaatcacgcgatactcgcaggatttcccgttgcaggccatggcgggcgtgtgcgtccctggaaactcggttaacccggtcgctgggggcatttatgcccggattgttgcgtctgcagcgtgaatattcgcgggtgccagcgtgatgaagcttagtgaggactccccgggcaactggggaatcaccgaaccgggcagcgacgataccttgacacgtctaaccctggcgttagatgtcatggggggcgatttcggcccatccgtgacggtgcctgcagcactgcaggcactgaactctaattcgcaactcacacttcttttagtcggcgatcccgacgccatcacgccattactcgccaaagctgacttcgaacaacgttcgcgtctgcagattattcctgcgcagtcagttattgccagtgatgcgcgacccgcgcaggctatccgcagcagtcgcggaagctcaatgcgcgtggcgctggagcttgtgaaagaagggcgggcgcaagcctgcgtcagcgctggcaacaccggcgcgctgatgggtctggcgaaactgctgctcaaaccgatcgaaggtattgagcggccggcgctggtgacggttttaccgcaccagcagaagggcaaaaccgtggtgctggatctcggcgccaacgtcgattgcgacagcacgatgctggtgcagttcgcggtaatgggcgcggtgctggcggaagaagtggtcggcattgccaacccccgcgtcgctttgttgaacatcggtgaagaagagatgaaaggcctcggcagcatccgcgatgctgccgcagtgctcaaaacgctgccttccctcaactacatcggctatcttgaagccaatgaactgttgaccggaaaaaccgatgtgctggtttgtgatggattcacgggcaacgtcacattaaaaaccatggaaggtgttgtcagaatgttcctttcactgctgaaatctcagggagagggcaaaaaacggtcgtggtggctgctgttactaaaacgttggttacaaaaaagcctggcgaggcgattcagtcacctcaaccccgaccagtataatggcgcctgtctgttaggattgcgcggttccgtgatcaagagtcatggtgctgccaatcaacgcgcctttagcgtcgcgatagagcaggcagtgcaggcggtgcagcggcagatccctcagcggatcgccgcgcgcctggaatctttatacccagctggtttcgagctgccggaaagcgacagtgacgtgaacgcccgacagcaaagcgggacgaatggccacgattgacgccgcggcggttgaacgaggcgggtatatcacccaagagtgactgagcgtacatgtatacgaagattattggtaccggcagctatctgcccgagcaagtgcgtacaaacgccgacctggaaaaaatggtagaaacctctgacgagtggattgtcacccgcacaggtatccgtgagcgtcgtattgccgcagcgcatgaaacagttgctacgatgggctttgaagccgcaaagcaggcgctggcgatggcgggcgtgtccgcggagcaaattggtctgattatcgttgcgaccacctccggcacgcacgcgtttccgagttctgcatgccagatccagtcaatgctgggcgttaagggttgcccggcgtttgatgtcgccgccgcctgcgccggtttcacctatgcgctaagcgtcgccgatcagtatgtgaagaacggcgcggtagattatgcgctggttgttggcgccgatgtgctggcgcgcacctgcgatccggcggatcgcggaacgattattattttcggcgacggcgccggcgcggttgtactgggcgcctccgaagagccgggcattatctcgacgcatctgcatgccgacggcagctatggcgaactgctgaccctgccgaacgccgatcgcgtcgatccggaaaacccgatctatctgacgatggccggcaacgaagtcttcaaagtggcggtcaccgagctggcgcacatcgttgatgagacgctggcagcgaataatcttgaacgttcagcgctggactggctggtgccgcatcaggctaacctgcgtattatcagcgcgacggcgaagaaactgggtatgtcgatggataacgtcgttgtgaccctcgaccgccatggcaacacctccgcggcgtcagtcccttgcgcgctggatgaggccgtccgcgatggccgtattcagcgcggtcagctgattttgctggaagcctttggtggcggtttcacctggggttccgcgctggttcgtttttagtataaggatttaaacatgacgcaattcgcatttgtgttcccggggcagggctctcaggccgtaggcatgctggccgaaatggctgccgcctggccggtcattgaagagaccttcggtgaagcttccgcagcgttgggttacgatctgtgggcgctgacgcaacagggcccggcagaagaactgaataagacctggcagactcaaccggcgctgctcgccgcctccgtggcgctgtaccgcgtctggcaacagcagggcggcaaagcgccagcgctgctggcgggtcacagcctcggcgaatactccgcgctggtatgcgcgggcgttatcggtttcgctgatgccgttcgcctggttgagctgcgtggtaaattcatgcaggaagccgtaccggaaggtaccggcgccatgtccgcgattatcggtctggacgacgccgctatcgccaaagcctgtgaagagtctgccgaagggcaggtggtctctccggtgaactacaattctccgggccaggtggttatcgccgggcacaaagaggccgttgaacgcgctggcgccgcctgtaaagccgccggcgccaaacgcgcgctgccgctgccggtgagcgtgccgtcccactgcgcgctgatgaagccagccgcagaaaaactggcggtagagctgcagaagatcaccttcaacgcgccgacgattccggtggtgaataacgtcgacgtgaagtgcgaaaccgcgccggacgccattcgcgacgcgctggtgcgccagctgtacagcccggtgcagtggaccaaaaccgttgagtttatggctgccgagggcgtatcgcatctgtatgaggttggcccgggtaaagtcctcaccggcctgaccaaacgtattgttgacaccctgaccgcttccgcgcttaacgagccggcggcgatgtctgcggcgcttgagcaataaaagaggaaaaccatgagttttgaaggaaaaatcgcgctggttaccggtgcaagccgcggtattggccgtgctatcgctgaaacgctcgtcgcccgtggcgcgaaagttatcggtactgcgaccagcgaaagcggcgcgcaggcgatcagcgactatttaggcgccaatggtaaaggtctgatgttgaatgtgaccgacccggcatctattgaatctgttctggaaaatgtgcgcgcagagtttggcgaagtggatatcctggtgaataatgccgggatcactcgcgacaatctgttaatgcgcatgaaagatgacgagtggaacgatattatcgaaaccaacctgtcatcggttttccgtctgtcaaaagcggtaatgcgcgctatgatgaaaaagcgtcatggacgtattatcactatcggttctgtggttggtaccatgggaaatgcgggtcaggccaactacgccgcggcgaaagcgggtctgatcggcttcagtaaatcactggcgcgtgaagttgcgtcccgcggtattactgtaaacgttgttgctccgggctttattgaaacggacatgacgcgtgcgctgaccgatgagcagcgtgcgggtacgctggcggcagttcctgcggggcgccttggcaccccaaatgaaatcgccagcgcggttgcatttttagcctctgacgaagcaagttacatcactggtgaaacgctgcacgtcaacggcggaatgtacatggtctgaccgagatttgtgcaaaacgttcaggaaccgcgcacttcgcacggttctctgtgcggttttgtgcgaaaagatttgcgttcttagggcaaacggcctcaaaatagcgcaaaatcgtggtaagacctgccgggatttagttgcaaatttttcaacattttatacactacgaaaaccatcgcgaaagcgagttttgataggaaatttaagagtatgagcactatcgaagaacgcgttaagaaaattatcggcgagcagctgggcgttaagcaggaagaagttaccaacaatgcttccttcgttgaagacctgggcgctgattctcttgacaccgttgagctggtaatggctctggaagaagagtttgatactgagattccggacgaagaagctgagaaaatcaccaccgttcaggctgccattgattacatcaacggccaccaggcgtaagtgaacatctccaggcggtcattcgaccgcctgagttttatctttttattgtcccacaagaatctattttccctccctggaggacaaacgtgtctaagcgtcgtgtagttgtgaccggactgggcatgttgtctcctgtcggcaataccgtagagtctacctggaaagctctccttgccggtcagagtggcatcagcctgatcgaccatttcgatactagcgcctatgcaacgaaatttgctggcttagtaaaggattttaactgtgatgacattatctcgcgcaaagaacagcgcaagatggatgccttcattcaatatggaattgtcgctggcgttcaggccatgcaggattctggccttgaagtgacggaagagaatgcaacccgtattggcgccgctatcggctccggtattggcggtctcggcttgatcgaagaaaaccacagttcgctggttaacggcggaccgcgcaagatcagcccattcttcgttccttccacaattgttaacatggtggccggacatctgaccatcatgtttggtctgcgtgggccaagcatctctatcgcgaccgcgtgtacttcaggcgtgcacaacatcggccaggccgcgcgcatcatcgcctatggcgatgccgatgcgatggtggcgggcggcgcggaaaaagccagcaccccgcttggcgtgggcggcttcggcgcggcgcgtgcgctctccacgcgcaatgacaacccgcaggcggcgagccgtccgtgggataaagatcgtgacggcttcgtgctgggagacggcgcgggtatggtggtgctggaagagtacgagcatgccaaaaaacgcggcgccaaaatctacgccgagatcgttggcttcggcatgagcagcgatgcttaccacatgacgtcaccgccggaagatggcgcgggcgccgcgctggcaatggtgaatgctattcgcgatgcgggcatcgaaccgggccagatcggctacgtcaacgcccacggcacctcgacgccggctggcgataaagcggaagcgcaggcggttaagtctgtcttcggtgatgcggcgagccgcgtactggtgagctctaccaaatccatgaccgggcatctgctgggtgcggcaggggcggtagagtcgatttactctatcctggcgctgcgcgatcaggcggttccgccgacgatcaacctcgacaacccggatgaaggctgcgacctcgacttcgttccacacgaagcgcgtcaggtttccggtatggagtacaccctgtgcaactccttcggctttggcggcactaacggttcgctgatcttcaaaaaagtgtgacagggcttgccccggtactgctttaacaaaaggcccgttcgtcgggccttttttattcagctttctccccttgttctctgctctgggtcctgacacactgaccgaccagtgaaaaggagtcctttatgttcttgataaacggcgttgtacaggacacgttggcagcgaacgatcgcgccatccagtttggcgacggctgttttaccaccgcccgcatccagcaagggcaggttgcgctactggacgcccatctgcagcgtttacagacaacctgtgaaaaattacatatcccatttaacgactggctgacgctgagcgaagagatgcagcgtctggctcggccgcacgcgcagggcgtgctcaaggtgactctcacccgcggcgttgggggaaggggatacagtacggcaggctgcgtgtcgcccactcgcattctcagcttctctccattcccggcgcattatgcgcgctggcgggaggagggcattactctgacccagagtccggtgcccctggggcgcaactcctggcttgccggcctgaagcaccttaatcgccttgagcaggtactgatccgctctcatcttgagcagacggacgccgatgaggcgctggtccttgacagtgacgggtggcttacggaatgctgtgccgcgaatttattctggcgtcagggacgtgatgtatttactccgcgactcgattatgccggggtcaacggcattatgcggcagcgctgtatcgcgcagctggcaccatcgacgtttcgcgttgtcgaagtgacagcgcgtcccgagacgttgcgggaggccgatgaagtgctgatctgcaatgcgctgatgccgctggtgccggttcgccgctgggaggagaccacctggtcctcgcgtgagctttaccattttttagcccctttgtgtgagctgtctggttagtatgaagaaaatgttacgttttatcctgttgctggtcgtgctgttgggcatcgccgcggcggcaggcatgtggaaggtacgccagctggcggacagcaagctgctgattaaggaagagaccatctttaccctcgaagccggcaccggccggctggcgctgggccaggatctctatcgcgagaaggtgatcaatcgcccgcgcgttttccagtggctgctgcgggtggaacctgagctgtctcacttcaaggccgggacctctcgcttcacgccgcaaatgacggtgcgcgagatgttgcagctgctggccagcggcaaagaggcgcagtttccgctgcgctttgtcgaaggcatgcgcgtcagcgactacctgcgccagctgcgcgatgccccgtacgtgaagcacacgcttgaagacgatagctacgcgacggtggctaaggcattaggtcttgagcatgccgactgggtagagggctggttctggccggatacctggatgtacaccgccaacaccagcgatatcgccatcctcaagcgcgcgcatcagaaaatggtcgccgaagtggcgaaggtctgggaaggacggatggagaatctgccctatgccgatcagaaccagctgttgaccatggcctcgattattgaaaaagagaccgcggtagcggaagagcgcgaccgcgtcgcgtcggtatttatcaaccgcctgcgcatcggtatgcgcttgcagaccgatccgaccgtaatctacgggatgggcgaaggatatactggtaagttaacgcgtaaggatctcgagacgccgaccgcatacaatacttataccatcagcggtttgccgccgggccctatcgcggtgccgggcgaggcctcgctgaaggcggccgcccatccggcgaaaacgccatatctttatttcgtcgccgacgggaaagggggccatacgtttaccacaaacctggtcagtcataaccgtgcggtgcaggattatctgaaagtacttaaggaaaaaaatgcgcagtaactatatcgtcatcgaggggctggagggcgccgggaagaccaccgcacgtcaactggtggtggagacgctgcagtcggcgggtattcacgatatggtgtttacccgcgagccggggggcacaatccttgccgaaaaactgcgtagcctggtgctggatatccagtccacgggcgatgaagtgattaacgataaagcggaagtgctgatgttttacgcggcgcgcgtccagttggtggagaccgtgattaagcccgcgctggcccgcggccagtgggtgatcggcgatcgtcacgatctgtcgacgcaggcctatcagggcggcggccggggaattgaccgcacgatgctggcgacgctgcgcgacgcggtactcggtgattttcgccccaatctgacgctgtatctcgacgtcacgccggaagtggggctgcagcgcgcccgggcccgcggcgagctggatcgcattgagcaggagtccatgaactttttcaaccgtacccgcgcgcgctatcttgagctggccgccgccgatccttctatccgcacggttgacgcaactcagccgctggatgccgtggcgcgcgacattcgcgccacgatcgcccagtggatggcggagcaagcggcatgaaatggtatccgtggctgcgcccctcgttcgagcaactggtcggtagctatcaggccggacgaggccaccacgccttactgttacagtccctgaacgggatgggcggcgaggcgttgatttacgcgctgtgccgcttcctgatgtgccgccagcccgaaggacataaaagctgcggccactgccatagctgtcagctgatgcaggccggcacgcaccccgattactatgcgctcagccccgagaagggcaagagcgcgctgggtattgacgcggtgcgcgatgtcaatgaaaagctctatgaacatgcgcgccttggtggggcaaaagtggtctggattagcgatgctgccttgctgaccgatgccgccgccaacgcgttgctgaaaacgctggaggagcccccggagaatacctggttcttcctcgcctgcgaggagccggcgcgtctgctgaccactctgcgcagccgctgtcgcctgcatcatctggcgccgccgtctgagccttatgctctggcctggctggagcgtgaggtgagcctgccgcaggagtcattgttgaccgcgttacgcctgtgcgccagcgcgccggctgcggcgctcgaactgttacaggaaccgctgtggacggcgcggcagcagttgtgtcaggcgctggcggctaccctggcgagcggtgactggctgacgctgctgccgatactcaatcatgaacaggcggcggttcgcctgcactggctggcgtcgctactggtcgatgcgcaaaaacgacagcaggggattaccctggtgagtaaccctgacgtctggccgctgctggagcagctggcgcacagcctgcccgccgcccggctgcaggcgattgcccatgacgtctgtacctgccgcgagcaattgctcaacgttgtcggtgtcaaccgcgaactgctgcttaccgagcgcctgctgcgctgggaacattacctgcaacccgggacgggtttacccgtctcccacctctgagtgagacattatgtttttagtcgactcccactgccatcttgatggtctggattatcaaactctacacaaaaacgtcgacgacgtgctggcaaaagcggccgcacgcgatgtgaaattttgcctcgccgtcgccacgacgttgcctggctaccgcagtatgcgcgaactggtggggacgcgtgacaacgtcgtcttctcctgtggcgtacacccattaaaccaggacgagccctgggaggtagagaccctgcgcgcgctggcagcggaagagggcgtcgtggcgatgggggagaccggtctggattatttttataccccggaaactaaagcccaacagcaaagcccgttccgcgaccacattcgtatcggccgtgagctcaataagccggtgattgtccatacccgtgacgcacgtgccgatactctggctattttgcgcgaagaaaaggtgacggattgcggtggcgtactacactgtttcactgaggacagggagacagcgggcaagctgctcgatatggggttctatatctcgttttccggtatcgtcacttttcgtaacgccgagcagctgcgtgatgcggcgcgctacgtgccgctggatcgtctgctggttgaaaccgactcgccgtacctggcgccggtcccccaccgcggcaaagagaaccagccggcgctggtccgtgacgttgccgagtatatggcggtactgaagggggtgtcgcttgagcagctggctcagcagaccaccgacaattttgccaccctgttccacatcgaccccgcccgtttgcaacctgcttgatctgcttattattttaaggctcgtaattaatagccaaagcgagtaaagttcaccgccacaaaagtggcggtgaaggttttttagcaacatctggatacaatttatgtaagttgatgtaaatttttaccggaaggctgattgaaacgtgatagccgtcaaacaatcatcccgttaattattttactctgtgtaataaataaagggcgcttagatgtcctgtccacggcacggttctccccccgggccaatgcgtgaaagcgtaaaaaagtaccaaatactcaggagcactctcaattatgtttaagaatgcatttgctaacctgcagaaggtcggtaaatcgctgatgctgccggtatccgtactgcctatcgcaggtatcctgctgggcgtcggttccgctaacttcagctggctgccagccgtggtctcccacgttatggcagaagcaggcggttcagttttcgccaatatgccgctgatcttcgctatcggtgtggccctcggcttcaccaataacgacggtgtatccgcactggctgcagtcgtggcttacggcatcatggtgaaaaccatggcggttgttgcgccgctggtgctgcatttacctgctgacgagattgcggcaaaacaccttgctgataccggcgtgcttggcggtattatctccggtgctatcgccgcctacatgttcaaccgcttctatcgcatcaagctgccagaatatctcggcttctttgcgggcaagcgttttgtgccgattatctctggtctggccgctatcttcaccggcgtgatcctctccttcatttggccgccgatcggctccgcgatccaaaccttctcccagtgggctgcttatcagaacccagtggtggcgtttggtatctacggtttcatcgaacgttgcctggtgccgtttggtctgcatcacatctggaacgttcctttccagatgcagatcggcgaatacaccaacgcggctggtcaggtgttccacggcgatatcccgcgctacatggcaggcgacccgacggcgggcaaactgtctggcggcttcctgttcaaaatgtatggtctgccggcagcggctatcgcgatttggcactctgctaaaccggaaaaccgcgccaaagtgggcggtataatgatctccgccgcgctgacctcgttcctgaccggtatcaccgagccgatcgagttctcgttcatgttcgtggcgccgatcctgtacgttatccatgccattctggcgggcctggcgttcccgatctgtatcctgctgggtatgcgtgacggtacctcgttctctcacggcctgatcgactttatcgtgctgtccggtaacagcagcaaactgtggctgttcccgattgttggtatctgctatgcgatcgtgtactacgtcattttccgtgtgctgattaaagccctggatctgaaaacaccgggtcgtgaagacaccaccgaagagagcaaagctggcgccaccagcgagatggctccggctctggtcgccgctttcggcggtaaagagaacatcaccaacctcgacgcatgtattactcgtctgcgtgttagcgtggcggatgtagcgaaagttgaccaggctggcctgaaaaaactgggcgccgctggcgtggtagtggcaggttctggcgtacaggccatcttcggtaccaagtccgataacctgaaaactgaaatggatgagtacatccgtaacagttaagacgtagtatcggggagactaaggcagccaactggctgccttttttatgcgctaaagtcggtgccccacaagcgataaccctgaaaacagtccgccatatgcttattccctcagcagctaagtctatagttgaataagaaaaagagctttcaggttgaaagagagggagaatgtcgctcatactcttagcggaacctgtgcgtccgcgtttatctgcagaagcaggccagcgcacgggataaaacttataaggaatcagtcatggcagaagaaacgattttcagcaaaatcattcgccgggagatcccgtcggatattgtctatcaggatgagcttgtgaccgcttttcgcgacatctccccgcaggcgcccacccatattctgattgtcccgaatgttctgattcctaccgtaaatgacgtcaccgctgaacatgagctggcgctgggccggatgatgaccgtcgcggcgaagatcgccagcgatgaaggtcttgccgacgatggctatcggttgatcgtcaactgcaaccgccacggcggccaggaagtgtaccatatccatatgcatctgctgggcggtcgtccgcttggcccgatgctggcgcacaaaggctaacgtcatgctcaggacccttttgggcgcgtgtctggcggcggggctactcgccgggtgtagttcacacccggaaatcccggtttctgaccagcaggcgctggtgatggagtcgagcgtgctggcggcggggatcagcgccagcgagcctgccgtcgtggcgacagagattcaggctaccgcctcctcaacgctatataacgagcgccagcagccggttaccgtgcactatcgttttttctggtatgacgcccgagggctggagatgcatccgctggacgcgccgcgcaccatcgtggtaccggcccgctcctcggtcacgttatatggcagcgccaatatcctgggggcgcataaggcccgcctttatctttatctgtaaggggtaattataatgatgaaaatgtgtcgctatgcgttaatcacagcactggcgatattcctcgcaggctgtgcggggttgcgggagcagcccgcgccggtagaagaggccaaaccgcagccgcagcagcctgcgcagccgcagcccacggtgccgaccgtaccggcggtgccctctgtcccggcgcagcctgggccgattgagcatcaggatcagcagtcgggtcagccggcgccgcgcgtgcgtcattatgactggaacggcgcggttcagccgctggtggggcagatgctgcaggcgagtggggtcaatgccggcagtattctgctggtcgacagcgtgaacaaccgcaccaacggttcgctgaatgctggagaagccaccactgcgctacgtagtgcgctggccggtaacggcaaatttaccctggtatcggcgcagcagctggcggtcgccaagcagcagctgggcctgtcgccgcaggacagcctcggcagccgcagcaaagccatgggcattgcccgcaacgtgggcgcgcagtatgtgctttactccaatgccaccggcaacgtcaacgcgcctgagctgaaaatgcagctcatgctggtgcaaaccggtgagattatctggtcaggtaaaggtgctgttcagcaacaataagctaacgcgcgacgagctcttgtcgcgcttctttccccattatcatcctgtcgcctcgctgagccagagtggcctcagcggcggcagtgtgattattagcgacggcgaccggcggcacgtgctgcgtcagccgcacgatccgtctgccgccacttaccattttcgccgtcagtatcacgcactccgccgactgcctgccaggctggcgccaaccccgctgttttactcaccctgctggatggtggtggagtattgcgcaggggaggtgaaaagcgagttaccggcctccccgcagctgtcaggcttattgtatgatttgcatcagcaaccgcggtttggctggcgggttagcctcacaccactgctggcccagtactggcagaggtgcgatccggcgcggcgcaagccgcgttggctgcgctggcatcagcggctgcgccgccagggcgagccccgtcccctgcggctggcgccgctgcacatggacgtccatgccggcaatattattcataatg

SEQ ID NO: 166 - DNA, 44538 bp, Unknown
  source: /note="Description of Unknown: MKP2_2161_1 Mutant Bacteria sequence"
cttcaatactacttttaccctgcatctgcgcgaagagagcctcgatgaagtgtgggtgacccgcaagccgacttcggacggacacgtcaccagcgtcgaactgttcgctaaagacggcacccagattgcccagctctacggccagcgcagcgaggggcaccccgagcagacgcaatggcgccagcaggtagaccgcctgacccgtgaagggcagcccgcatgatgcgctggttactgctcttgatcgctttcccgctgctgagtcacgccgccgttgagcggctcgtcacactcggcggagatgtcactgagatcgtttatgcccttcacgcggaggagagcctggtggcgcgggacagcaccagcagctggcccccggcggcgcaaaagttgccggacgtcggctacctgcgacagctgaacgccgaggggatcctcgcgttacgcccgcagctggtgttagcgagcgcccaggcgcagccctcgctggtcttacacaaagtgcaggcgagcggggtgaaggtggtgaacgtgccgggcggcgaaagtctgtccgcgatcgataacaaagtggccgtcattgccgaagcgttaggcaaaacggcggcaggcgacgcgctgcgccagcagcttcagcagcagatcgccgccattccaacgcagccggttgctaagcgggtgctgtttattctcagccacggcggaatgaataccctggtggccggacagcataccgcggccgatggcgccattcgcgccgccggattgcagaacgcgatgcagggcttcgaccactatcgcgccatgtcgcaggaaggggtcgccgccagccaggcggatctggtggtgatctccgccgatggtctcaaagggatgggcggcgaagccgggctgtggaaactgcccggcctggcgcagaccccggcggggcgtcataaacagctgctgacgatcgacgatatggccctgctgggcttcgggccgcgcacaccgcaggcgataatcgcgctgcgaaacaaagcggagcagttgccctgatgcgccctgccctcgctcgccgtttgctgctgatgacgctgctgctggtctccctgacgttgtttgccaccaccctcggcgccatgcgcttgccgctggtcaacctgctgccttccggggatgacatgctgcgccatatctggctgaccatccgtctgccgcgggtgctgctggccctgctggtgggcgcggcgctggccctctccggctgcgtgatgcaggggctgtttcgcaacccgcttgccgacccgggcctgctgggcatcagcagcggcgccgcgctggcggtggccagctggctagtgctcccgttctcccctgcggggctgatcgctctgtatatgccgatgctggcggcgtttattggcagcctggcggtgatggtggtgattttcatcctcagtcgggcggaggagggttcgctgtcgcgcctgctgctggtggggatcgccatcaacgcgctgtgcggcgcgctggtcggcgtcctgtcctggctgagcaatgacgcccagctgcgccagctgtcgctgtggggaatgggcagtctgggccaggccgaatggccgacgctgctggtggccgcgaccttgattatcccggcggcgctggcggtgtggtggatggcgtcccgcctcaatctgctgcagcttggcgatgaagaggcgcactatcttggggtcaacgtgcaggcgctgcagcgctggctgctgctgtgcagcgcggtgctggtggccgtcgcggtggccatcagcggagtcatcggctttatcggcctggtggtgccgcacctgatgcgcctgtggctgggacctgaccatcgcggactgatccccggctcgctgctggcaggcgcgatcctgcttctgctggccgacaccctggcccgcaccgtggcggcgccggcggagataccggtcggtctgctcaccagcctgctgggcgccccctggtttctgtggctggtctttcgtcgggagaactccagacatggttaatgaatactgcgcccaggggctgtcacttcaccttggtaaacgacagattatcgacaacgtctccgtcgcgctgcgcggcggcgagatgacggcgcttatcgggccgaacggcgccgggaaatccactctgctgcgcctgttgactggctatctgactccggacagcggcacccgccatcttgcaggcaagccgctggaggcctggtcccccgaggcgctgtcgcgccggcgggcggtcatgctgcagcgaacggccctgcaggccgactggacggtggaaacggtcattgccatgggacgctcaccgtggggcgcgacggcggatccggcggtgctggcggcggtgatggccgtcaccggctgcgatggccttgccggtcgccgctatcccggcctctccggcggcgagcagcagcgggtacagctggcccgctgtctggcgcagctatggcgcgacggcgcgccgcagggctggctgtttctcgatgagcccacctcggcgctgacctttactatcagcagcacctgctgcgtttgctcaaacggctcaccgccggcgggcaactgcacgtctgcgtggtgctgcatgaccttaacctcgccgccctgtgggccgaccgcatcctgctgctccaccagggacatctggtcgcccagggcacgccgcaggaggtgatccagcagccggttatccatcgctggtacggggcggatgtccgcctcgtccagcacccggacaacgcggtcccccaggtttatctggcgccgtaacccccgcgcggcgcaactggaatccggatcgcgccgcgcgctttcgtcggtttccctcacctgcccatctccgttattatgtctcatccatgtgataacgacgaaaactacaaaatcgcagccatttaaaatcagggatctggataacaccccatgagcacaattgacaatctcgacgcccacacgccgatgatgcagcagtatctcaagctaaaggcgcaacatcctgacattctgctgttttaccggatgggggatttttacgagctattttatgacgatgcgaaacgcgcctcgcagctgctcgatatctcgctgaccaagcgcggcgcctccgcgggcgaacccattccgatggccggcatcccccaccacgccgtagagaactacctcgccaaactggtcaatcagggcgagtcggtggccatttgcgagcagattggcgacccggccaccaccaaggggccggtcgagcgtaaagtggtacgtatcgtcaccccgggcaccattagcgatgaagcgctgctgcaggagcgccaggacaacctgctggccgccatctggcaggacagcaagggcttcggctacgcgacgctggatatcagctccgggcgctttcgcctgagcgaaccggccgaccgcgaaaccatggcggcagagctgcagcgcaccaacccggcggaactgctgtatgcggaagattttgccgaatcgtcgctgatcgagggccgccgcggtctgcgccgtcgcccgctgtgggaatttgaaatcgacaccgcgcgccagcagctaaacctgcagttcggcacccgcgatctggtcggcttcggcgtcgaaaacgccccgcgcggcctgtgcgccgccggctgcctgctgcagtatgtcaaagacacccagcgtacctcgctgccgcacatccgctccatcaccatggaacgccagcaggacagcatcattatggatgccgccacccgccgtaacctcgagatcacccagaatctggccggcggcaccgacaacaccctggcctcggtactcgactgtacggtgacgccgatgggtagccggatgctcaagcgctggctgcatatgccggtccgcgataccgccgtgctggtggagcgccagcagaccatcggcgcgctgcaggagcgctctaccgagctgcagccggtgctgcgccaggtcggcgatctggagcgtattctggcgcgtctggcgctgcgtaccgcccggccgcgcgatcttgcccgcatgcgtcatgccctgcagcaactgcctctgctgcgtgagctcctggccgacgttgacagtcagccggtgcaaaaattgcgcgagaaaatgggcgagttcaccgaactgcgcgaactgctggagcgcgcggtgatcgacgccccgccggtgttggtccgcgacggcggggtcatcgccccgggctatagcgaagagctggacgagtggcgggcgctggccgatggcgccaccgattatctcgataagctggagatccgcgagcgcgagcggctgggcctcgataccctgaaagtcggctacaacgccgtccacggctactacatccagatcagccgcggccagagccacctcgcgccgatccactatgtgcgccgccagacgctgaaaaacgccgaacgctacattattcctgagctgaaggaatacgaagataaggtgctgacctccaagggcaaagcgctggcgctggaaaaacagctttatgacgaactgttcgacctgctgctgccgcatctcgccgatctgcaaaccagcgccagcgcgctggccgagctggacgtgctggtcaacctggcagaacgtgcggaaaccctgaactactgctgcccgacctttagcgataagccaggcattcgcattagcgaaggccgccatccggtggtcgagcaggtgctgaaagagccgtttatcgctaacccgctgcagctggcgccgcagcggcggatgctgatcattaccgggccgaacatgggcggtaaaagtacctatatgcgccagaccgcgctgattgcgctactggcctatatcggcagctacgtcccggcgcagaaagtagaaattggcccgatcgatcgcatcttcacccgcgtcggcgcggcggatgacctggccagcggccgctcgacctttatggtggagatgactgaaaccgccaatatcctgcacaatgccaccgagcatagcctggtgctgatggatgagattggccgcggcacgtccacctacgacgggctatcgctggcgtgggcctgtgcggaaaatctggccaacaaaatcaaggcgctgacgctgttcgccacccactacttcgagctcacccagctgccggagaaaatggaaggcgtcgccaacgtccacctcgacgcgctggagcacggcgataccatcgcctttatgcacagcgtgcaggacggcgcggccagcaagagctatggcctggcggtcgccgcgctggcgggggtgccgaaagaggtgatcaagcgcgcgcggcagaaactgcgcgagctggagagtatctcgcccaacgcggcggcgacccaggtcgacggcacgcagatgtcgctactcgccgccccggaagagacctcgcctgcggttgaggcgctggagaatcttgatccggactccctgaccccgcgtcaggcgctggagtggatctaccgtctgaaaagcctggtctagccacccattaaggtgaaaaacggcagcgctgtgaagcgctgccgttttagtaaacaaaaaatgggtgctagaggatgcgtcctgacaacccatacgcggggttgccctcgcgcggatgctacttcttcgattcgtaagcgagaacagctttaaactcaatattacgctctttaatactcagctcgcatagtgagctgtgcaccaacagcgtaaatcccagtaccgtaataaagagtacgacgattgccacaagggcatattttgcctccctgcaaagaagagactaacatctgaattgtctatgttcattcgctagcctcagttgatagaaatatctcctggggctttcgtctgtctggggtcctggtaatgctcaaggccagacagcctcaagcacccgccgcaattctacactcgtcagggcgtgaaatttatctgcaaggaattaatcagacgaattttataataatctggatgcaggctcgcaaagtcatcccggtatattaacccttcacgtaattttttaatttaatgaaaaaataatttccataattgtactaaatataaaaaaggcccgacttagcgggcccctttcattaacgcttatcttccggcaatagcggcggtacgtgcggcacctgcggcgcctcatcgatatctttctgcgtcatgcggaacgcttccggatagtgttcgcggctggtgcggcgcagcggctcggtatctcgccaggtgtaaagacagtgctggcactgatacacggtccagacccctttcaccggcgaggtcgccatgacttcaatcttttcatcggcgcaacgtggacaaatcatcttcttctccttatttacggttggccagcatagcggtcagtttttcagaccaggctttggtttccggcagatcctgcaccggctggctgtagtggccgcgaaggtccggcgcaaccggggtggtggcgtcgataatcagtttgtcggtaatgcctgccgggctggagcctgggtcaagttcaaggaccgacatgttcggcaactgcaccaggtctcccgccgggttaaccttcgaggagagcgcccacatcacctgcggcaggttgaacgggtcgacgtcttcatcaaccatgatcaccatcttcacatagccgaggccgtggggagtggtcatcgcccgcaggcccaccgcgcgggcaaaaccgccgtagcgttttttggtggagatgatcgccagcagaccatgggtgtacatggcgttgaccgcctgcacttccggaaattcggccttcagctgctgatacagcggtacgcaggtcgccgggcccatcagatagtcaatctcggtccacggcataccgaggtagagcgattcaaaaatcggtttgctgcgataagagactttgtcgatacgcactaccgtcatgttacgaccgccggagtagtgaccggtaaattcaccgaacggcccctcgatctcacgcttacgcccttcaatgaccccttcgaggatcacttccgaaccccagggcacgtcaaagccggtcagcggcgcggtagcgatgggatacgggctctcgcgcagcgcgccagccatctcatattcagactgatcgtatttcagcggcgtggcacccatcagggtaataatcgggtcgttaccgagggtaatggcgatcggcagatcttccccacgctcttccgctttgtgcagatgcagcgcgatatcgtgcatcggtaccggctgcaggccgagcttgcgcttgcctttcacttccatgcggtagataccgacgttttgcttaccgaagttatctttatccagcggatcgcgtgaaacgacacaggctttatcgaggtagaaaccgccgtcaccatcgttgaggcggaacagcggcagaatatcgaacaggttgatatcatcgccatcaacagtattttctgcccacgccgggttggcgcggcgctctggcgtcaccgggaagttatcccagcggcgaatgaactcatcaatctgctttttcaccggcgtgttaggcggcaggcccagcgagatggcatggttctgccacgagccgatggtgttcatcgtcacgcgagcgtcgttaaagccgcgaatattatcgaaccacagcgccggggcaccgtcgccgatgcgtccggtcgcattggcggccgccgccagatcgggctcagcgttcacctcttcactgattttcagcagttgtccctggtcatccagcgcctgcaaaaagctgcgcaaatcatcaaaagccattattcgatctcctgtgcaaattgttctgccgtgcgcaagccgttccagcggcgcgctttgtgatagtcgaggccaaactgatccagcacccgggtgacgatatgattggtgatatcgtcaaccgtctccgggtggttgtagtaagctggcatcggcgggaccatcgccacgcccatgcgggacagcgccagcatgttctccagatggatcgtgctgagcggcatttcccgcgggaccaacaccagcttgcgcccctctttgagcaccacgtccgccgcgcggcccaccagcccttcggcataacccgcgcgaatgcctgcaagcgttttcatactgcagggaataacgatcatgccgtcggtacgaaatgaaccggatgagatggtggcggcctggtctgccgggctgtgggaaaagtccgccagcgcggccacttcgcgcgccgtccagggcgtttccagctcgatggtggttttggcccatttcgacatcaccagatgggtttccacctccggcatatcgcgcagcgcctgcagcaatgccaccccaagcggtgccccggtggcccccgtcatcccaataatcagtttcattccagacctcattacttttgttcgtgtacgaactttatatttaaactaccccctccagcccttattggcaagatcgttcgtatacgtgcgcatttttaatcaaaacgcagaaagggtataaaaaggcgtacgaacggctatcatagaggtgacagttttgttacggagtattcatggagttacgaaacgaagcattccacctgctgcgccagctttttcaacagcataccgcccgctggcagcaggcgttgccggagctgactaaacctcagtatgcggtgatgcgctcggtagcggagcaccccgggatcgaacaggtggcgctgattgaagcggcggtcagcaccaaggctacgctggcggagatgctcagccgaatggaagcgcgcggcctggtgcgccgggagcacgatccggccgataaacgccgccgttttgtctatctgaccgacgaaggcgaggcgttgcttaaccgttccattccgcagggcaatgaggtcgatgacgagtttctcggccgcctgagcgatgacgagcgcgagcagttctcccggctggtgcacaaaatgatggcgccctgaacgggcgcttaaccgaccttctcgcgcaggaagtcaataaatgcccgcacccgggtcggcaaatgctgagagtcgggataaagggcatacacaccctgctgtgggaaatggtattccggcaggagcggcaccagctcccgctgcgccacctttttggctaccagccatgcgggcagcaaggcgacgccgcatcccgccagagcaaagctcatcagcgccgtagcgctatcagcagaaaaccgcggcgcgctggctatcgcgaaatccacctctgtctggtgatccgtgcgcagctgccagcgcagcggcgtcggcaggcgctcgtgaataatccactcagcttgcgccagatcggacagcgtctgcaccggatggcttgccagccagaccggagaggcgacgggcaggatcgcgaaactggctatccgcgtcgcccgatagcgggaatcggccagcgtaccgaggcgtatcgccacatcaaatcgttctgaaatgaggtcggcatgacgggaggaggagacgtggcgcacccgcagcgccggatgacgacgggcgaacgcggccagcgctggaatgataacctgctcgccatactccggcgtggtggtgatccgtagctccccgcttaagccgctatggctggcccgcacctcatcctggagattttccgccgcgttcaggagcgccaccccgcgctgatagaacagcaccccggcgtcagtgagccgcaaacgccgcgtcgaacgcagcagcagcgtcacccccagctcattttccagctgccgtacgttaaagctgaccaccgccttggtctgccccagcgccgctgcggccagggtgaaactgccggcatctaccacggcgataaacatggtcacgcgctgaagattaagcatcgtcgtccggatgattgtcaaaaatattcagacagtatatcccgattagtcccgtttatccctcgctgcggcaggtttacagtagccgcctgtctgagggagtgaaccatgacctaccgccaccgcgttgccaccgtttttctgttcggcttttttctcgatttgatcaatatgtttatcgccagcatcgcctttccggcaatcagccgcgcgctggcggtttccgtctcgcagctggcgtgggtcagtaatgcctatattctcggtctgacggtcgttgtgccgttcagcgcctggctcagcgagcgctggggggcgaaacggctgtttttactctcgctggggctgttcagcctcggcgcgctggcggcagggcttgccaacagcctgagcgaactgattttatggcggacgctgcaggggatgggcggcgggctgttaatccccctcggccaggcgctgacgtggccgctgtttcagccgcatgagcgggcgaagctgtcggcggcggtgatgctggtcggcctgctggcccccgcctgctcgccggcgatcggcggcctgttagtcgaggcgttcagttggcgctgggtctttttcgccagcctgcctgtcgctctgctaacctttgtgctggcggtgcgatggctgaacgacacccccggtccggttcgcccgactcgctttcttccactgtcgctgctggccgatcccctgctgcgcttcgcgatgctgatctacctctgcgtgccggggatgtttattggcgtcaacgtggtggggatgtactacctgcaacgcgtcaccgggatggcgccgggggcaatcggtgccctgatggtgccctggtcgctggcctcgtttgccgccatcacctttaccggcagatatttcaaccgcttcgggccccggccgctggtcgtcatcggctgcctgcttcaggcgatggggatcatgctgctgctgaagatcgatgcggacagcccgctggcgctgttgattctggcctttacgctgatgggcggcggaggcagcttatgcagcagcaccgcgcaaagcagcgctttcctgcatacgcctgccgaagagatgcctgacgccagcgcgctatggaatcttaaccgccagctcagcttctttgccggcagcgccctgctcgccctgctgctgagggtattcccgccggcctacgcctggcagggggtatttatcagcgccgccgtcattaccctgttgccgctgctgttttgcctgcggctgaataatcgggcgattatccatcgcctgcacaccactctggagaagtcatgaatccttatctgcaggaagtcctcgatgcccatgtccttatcgaacgctggttaagccatggcgaaggaagcgctgaggcgctgatgaagcgttttgccgccgattttaccatgatccccttgagcggtgagaagatggactacccaacggtgagccattttttccaccacgccggcggcagccgtccggggttagatatcgtagtggatcagatggaaatcatcagcgagtggcacgacggcgccgcagggctatatcgtgaaagccaaacgctggcggatagcagccagaacgttcgctggtcgacggcgatttttcagcaagcggaagggaaaatcgtctggcgccatctgcaggaaacccgcctcggctagcccaaagaaaaaggccccgactttcgagggggcctttttgacagaaaacgtcttagtcgcggaagagcgcttcgatattcagcccctgtccctgcagaatttcccgcaggcgacgcagaccttccacctggatctgccgcacgcgttcgcgggtcaggccaatttcacggcccacatcctccagcgtggcagcttcataacccagcagaccaaaacgacgtgccagaacttcacgctgcttggcgttcagttcaaacagccatttgacgatactttgcttcatatcatcgtcctgcgtggtgtcttccgggccgttctctttctcatcggccagaatatccagcagcgctttttctgaatcgccacccagcggagtatccacggaggtgatgcgctcgttcagacgcagcatacggctgacgtcatcgaccggtttgtccagctgttcggcgatctcttccgcgctaggctcgtggtccagcttatgggacaactcgcgcgcggtacgcagataaacgttcagctctttaacaatatggatcggcaaacggatcgtacgggtttggttcatgatcgcccgttcaatagtctggcggatccaccaggtcgcgtaggtcgaaaaacggaacccacgttccgggtcaaacttctcaacggcgcggatcaggccgaggttaccttcttcaatcagatccagcagcgccagaccacgattgctgtaacgacgggcaatcttcaccaccagacgcaagttactttcaatcatgcgacggcgtgaagcgacatcaccacgcagtgcgcgacgcgcgaaatagacttcctcttccgcggtcagcagtggggaataaccaatctctccaagataaagctgagtggcgtcaagtacgcgctgggttgcgccttgcgacagcagctcttcctcagccagatcgctatcactgggttcctcttctactaaggctttctcgtcgaaaacctcaattccgttctcatcaaattccgcgtcttcatttaaatcatgaactttcagcgtattctgactcataaaggtggctcctacccgtgatccctgagcaaagcaccttccacggcacatcaacaaacgacgcctggacgatttcccctgccctctctgcgagaggaacgtagacaccgccctggcgcctgttagctgatgcttcgcttatccgtactttgccaaattatcgctgcggtaagtactgcagcgggttgacggatttccccttgtaacgaatttcaaaatgtaatcttgttgagctggttccggtgctacccatggtagcgattttctgccccgctttgacttcctgttgctcccgaaccagcatggtatcgttatgagcgtaggcactcaggtaatcatcgttgtgtttgatgataataagattaccgtagccgcgcagtgcgttaccggcatagacgacgcgcccatcggcggtcgcgacaatagcctgtcccttactgcctgcaatatcgatacctttattgccgccttccgcgccgctaaagttctcgataaccttgccatcagtcggccagcgccatgctgagatcggcgaactggttgacgtactgcttgcagtcggctgggttgtgctcaccgttgttggtgccgtcaccggcgcgacaaccgttgtggttgtggtcgctggtttattattaggcaacatcttggtagcactctgttcacctgaagattcagaatacgtaatagtcggttgtgaagcaaccaccgcggtcgatttttgtgcagaagttgtgctggtcgtcgcaccgccgctcgctcttgcgctggcctgagaaacggcgttttcgccggtgatcggctggcctgaggcgttaccgacctgcagtacctgccccacgttcagcgcgtacggggccgggatgttgttgcgttgcgccaggtcgcggaaatcgttgccggtgacccaggcgatatagaatagcgtgtcgccgcgttttaccgtataggtactgccgccggtatagctacctttcggaatatcgccatatttgcggttgtaaacgatccggccatttaccgtctgtaccggctcctgcgccaccggcgccggctgcggctgaatggtctgggtctgcatcggctgaatcggctgcgcctgaggagcggacttgacgccggagggtggcggcgtaatcagcatgccggagttggtgctggaagaggcggcgccgccggcagagctaaccggcgcaggcggattattggtgttggtacacccggccagccagagtgaaaccagtgaaagagccgcaatacggctgacggtaaatttggtgcttcccgcgctcatttatcccccaggaatatgttaactgccaatatcttgcttaccgggcggcgcccggccaggacactgaaaaatgtgtccaccctacgcctaaagtcaggcaaaaaaaacctggaatactccgggtctcaggccagctcccccttcaccaggggaacaaagcgaacggcctcgacggtatcaatgataaattcgttgccccgacgacggatccgtttgagaaactgatgctcttcgccgaccggcagcaccagcacgccgtcatcatccagctgcgccagcagcgcggtcggtatttccggcggcgccgccgtcacaataatggcatcaaacggcgcccgcgcctgccaaccttgccacccctcgccatgacgggttgaaacattatgtaaatcaagttgtttcaggcgacgacgcgcctgccactgtaaactcttaattcgctctaccgagcatacgtgatgcaccagatgcgccaggatggccgtctggtagccggaaccggtgccgatctccagcacccgcgactccggcgtcagcgtcagcagcccggtcatccgcgccaccatatacggctgggagatggtctgcccctggccaatcggcagcgcggtgttttcccacgctttatgttcaaaggcttcatcaacaaacttttcgcgcgggaccagcgcgatcgcctcgaggacacgttcatcgacgatgccctgcgtgcgcagttgattcaacaaactttcaacacgtttacttaccattgcctgtcaaccccgacacgttccagccaatcggtgaccacctcatgcgcctgatgggcggttaaatcgacgtgcaatggcgtcacggaaacatagccttcatccactgccgcaaaatcggtgcccggcccggcatcgcgcttatcgcccggcgggccaatccagtacagggtgttgccgcgaggatcttgttgcgggatcacctggtcggccggatggcggttgccgcagcgggtcacgcgaatgcccttgatttgatcaagcgggagatccggcacgttgatgttaaggatccgcccggtacgcagcggctcgcggcttaaggcgcgcagaatggtgcaggttaccgccgcggcggtatcgtaatgctgatagccgttcagcgacacggccagcgcggggaaccccagatgacggccttccatcgccgcggccacagtgccggaatagatgacgtcgtcgcccaggtgggggccggcattaataccggaaaccacgatgtccggacgcgggcgcatcagcgcgttcacgccgagatagacacagtcggtcggggtgcccatctggacggcgatgtcgccattttcaaaggtaaacgtacgcagggacgattccagcgtcagcgaatttgaggccccgctgcggttacgatcgggtgcaaccacctggacctcggcaaactcccttaaggccttcgccagggtctgtatccccggcgcatggatcccgtcatcgttactcagcaatattcgcatagtcacccgttgtattgataagctccctgaccacgctggtggcgaagctgcccgccggcagccagaaacgcagttcaacggttacgtcatcccaccagttccagctgagctgctgtggatagagaagcatcgcccggcgcgccgcctcgactttctcccgtaccagcagcgcctgcaacgcggtttcctcggcgatcgcggcctgctcgaaagccggggcgtcgcgctggcttccccagtcgccgctgcccggcagcgtggccgtaatcatcagttcgcggttatgcacccgcgcctgcgaaacctcgagttcttccggtgtgacgacaaaccagctcccgcgccccgctaattgtagcgcatcgccatcaacgacctgattaaattccgttttttttaatctaatactcacttgctgattaaacaacgcgctgcgggctgccgacaaccaaaaactgcgcttattgcgatcgcgcactggcgcgccgctctccgcccagcgcagggcaccctgcaggttactgccgccaatgccgaagcgctgcgcgccgaaatagttcggcactccccgttcagcgatggcctgcagacgcgtctccacgtcctggcgatcgctaatctcgcgcaggatcacggtaaactggttgcctttcagcgcgcctaaacgcagcttacgcttatggcgagcatattccagtacctggcagccctcgagctgaaatttgctcaggtccggcatctctttgccgggcacccgggcgcacagccactgctcggtgaccgcgtgcttatctttttgcccggcgaagctcacttcacgggcgtggatcttaaggaatttcgccagcgcgtcggcgacaaagcgcgtattgcagccgtttttcaggatccgcaccagcacgtgttcgccttcgccgtccggggcaaatcccagatcttccaccaccagaaaatcttccggattggctttcagcagcccactgctctgcggcttgccgtgcagccaggtcagttggtcaaaggcgatcatttgtcggccttacgcagcagcgcaaccgcttcgcaggcgatcccttccccgcggccggtgaagccgagcttctcggtggtggtcgctttcacgttgacgtcgtccatatggcagccgagatcctcagcgataaagacgcgcatctgcggaatatgcggcagcattttcggcgcctgggcaataatcgtgacgtcgacgttgccgagcgtatagcccctggcctgaatgcggcgccatgcttcgcgcagcagttcgcggctatcggcacctttaaacgccggatcggtatcggggaacagcttgccgatatcgcccagcgccgcggcgccaagcagcgcgtcggtcagcgcatgcagcgcgacgtcgccgtcggagtgggccagcagccctttttcataaggaatgcgtaccccgccaatgatgattgggccttcaccgccaaaagcgtgtacgtcaaaaccatgtccaattcgcattaagctttctcctggtgtcgggaacgggtgaggtaaaattcagccagcgccaggtcttccgggcgcgtcactttaatattatccgcgcgtccggcgaccagctgcggatggaagccgcagtactccagcgccgaggcttcatcggtgatagtggctccctcgtttagcgcgcgagtgaggcaatccaccagcagctcgcgagggaaaagttgcggggtgagcgcatgccacaggtcattgcggtcgacggtatgggcgatagcggttttgcccggctcggcgcgcttcatggtgtcgcgcactggcgccgcaaggatcccgccgacgcggctggtttcgcagagcgacagcaggcggctgaggtcgtcctgatgcaggcaggggcgcgcggcgtcatgcaccagcacccactgcgcctccggcaacgcccgcaggccggcgagtaccgaatcggcgcgctcagcgccgccatccaccacggtaatctgcggatgctgcgccagcggcagctggctgaagcggcgatcgccggggctgacggcaatcaccacccgctggacgcgcgcatccgccagcagcgcggcgaccgcgtgttcgagaatcgttttgttaccgattgagagatattgtttcgggcattccgtttgcatgcggcggccgaaaccggctgccggcaccacggcgcaaacgcccggaaaagtggctgccatgttgtaatcctgggcctggttatcgattgttctgctgttgccccgatgcctgattgcgtttagacgcatccggtaccagacgatagaaggtttcgcccgggcgggtcatgctgagttcattgcgcgcacgctcctcaatcgcttcctgcccgccgttgaggtcgtcaatttcggcaaacagctgatcgttgcgtgcttttaatttggcgttagtcgcctgctgggcggtgacgtcgtcgttaacccgcgtgtagtcgtgcaggccgtttttaccgaaccacagcgaatactgtagccagaccagcaaagctaataatagcagcgttagtttacccatcctgccccctgaaaaacggcatcatcatcccaaaactcgcccgggtacgctaccggggcgcgcggacgatgccgcgtaacgcggggactgtaccatatttttgctgtcgatacccatgcttgattcataccagcaacgggttatcccaacagccagaggaagagtagcgcaaacatcagcccaacggtcaggatggtcgcgctgacgctatagagcagtttgccattgagcagagagtgcagcgcaataccgaccaccaccgccaccggcatcaacgcaaggaagaatggccaggtgtagaggagaaagaagagtgtattactgccatagagaaggaagggaatacccagcgccagcagccacgaaataaagcccacggcagcgcccgacaaagaccaggtggtctcgtcgccgatcgccggaggcggttctgaacgaataatactgaggttctgggtattgcgcatatcgaatcctgtagaccgggcaaccggcacccctcgatgccgctgccgtttcaggatctgataatatcgctctgttgcagcaggtctaatagttggtgcaccaaatttgttaccaattgttcaccatccagatgaatttccgccttttccggtgcctcatagaccgagtctataccggtgaaattgcgtaattcccctgcccgcgctttcttatacaatcctttcggatcccgcgcctcgcagatggccagcggggtatcgacgaacacttcgataaagcgtccttccccgaggcgctcgcgcaccatctgccgttccgcacggtgcggagatataaatgccgtcaataccaccagcccggcatcgaccatcagcctggccacttccccgacgcggcgaatgttctctttgcgatcctcatcgctgaatcccaggtcgctgcacaggccatggcgcacgttatcgccgtccagcagataggtgctgacgccgcgctcatgcagggcctcctccagcgccccagcgacggtggatttacccgaccccgaaaggccggtaaaccacagcaccacgccgcgatggccgtgatgctgttcccgctgctgttgggtcacagggtgggcatgccagacgacgttttcgtcatgctgggccattatttgcctcccagcaggtcgcgggcgtcccagtgcgggaaatgtttacggatcagctggttcagctccagctcgaaggcgctgtactgtgatgccgaagtcgatgcctgcaggtgcggctcgttgaccatcccggcgccgacggtgacgttggtcaggcgatcgataaagataagcccgccggtcaccgggttttgctgatacggatccagcactaaaggttcgtcaaaggtcagctccaccaggccgatgccgttcagcggcagagactcgacttcacgctgggtcaggttgttaatatcgacctggtagcggatagcgtcgacgcgagcgcgggtcttcttgccggcgattttgatgtcgtagctctggcccggggtcagcggctgttcggccatccacaccacgtcgatgctggcgctttgtaccgccggcagcgaggcttgcgcgtcaaccagcaggtcgccgcgactgatgtcgatttcatctttcagcacaagggtaatggcttcgccggcggcggcttcctgcaggtcgccgtcgaaggtgacgatacgcgccacgctcgattcgacgcccgacggcagcaccttcagacgctggccaacctgcacggtaccggaggcgaccgtgccggagaagccgcggaaatcaaggttcggacggttaacatactgcaccggaaagcgcagcggctggctctcgaccacccgctggatctccacggtttcgaggacttccagcagcgtcgggccactgtaccacggcatattcgcgctctggctggcgacattatcgccttccagcgccgacaacggcacaaagcggatatcaaggttgcccggcagctgctcggcaaaggtcagataatcttcccggatctcgttgaagcgcgcttcgctaaactcgacgagatccattttgttgaccgccactaccaggtgtttaatgcccagcagcgtcgagatgaagctgtgacggcgggtctggtcgagcacgcccttgcgcgcatcgatcagcaggatcgccaggtcgcaggtggacgccccggtggccatattgcgcgtgtactgctcgtgccccggggtgtcggcgatgataaatttgcgtttttcggttgagaagtagcgataggccacgtcgatggtgatgccctgctcgcgctcggcctgcaggccgtccaccagcagcgccaggtccagcttttcgccctgggtgccgtgacgcttgctgtcgttgtgcagcgaagagagctggtcttcatagatctggcgcgtatcgtgcagcaggcggccaattaaggtgcttttgccgtcatcgacgctgccgcaggtcaaaaaacgcagcaggctcttgtgctgttgcgcgtgcaggtaagcttctacgccgccttcgttggcaatttgttgggcaatggtcgtgttcatggcggctccttagaaatacccctgacgtttcttcagctccatcgagccggcctggtcgcggtcaatgacgcgcccctgacgttcgctggtggtcgataccagcatcccttcaataatttcggggagcgtctgcgcttcagactccaccgcgccggtcagcggccagcagccgagggtacggaaacgcaccatccgtttttcaatcacctcgcccggctgcagatcgatacggtcgtcatcgatcatcatcagcataccgtcgcgctccagcaccggacgctcagcggccagatacagcggcacgatttcaatattttccagatagatgtactgccagatatccagctcggtccagttggagagcgggaagacgcggatgctttcgcctttgttaatctggccgttgtagttgtgccacagctccggacgctgatttttcgggtcccagcggtggaaacggtcgcggaaggagtagatgcgctctttcgcgcgggatttctcttcgtcgcgacgcgcgccgccgaacgcggcgtcaaagccgtatttgttcagcgcctgcttcaggccttcggttttcatgatatcggtatgcttggcgctgccgtggacaaacgggttgatgcccatcgccaccccttccgggtttttatgcaccagcagttcacagccgtaggctttagcggtccggtcgcggaactcatacatctcacggaatttccagccggtatcgacgtgcagcagcgggaacggcagggttcccggataaaacgctttgcgcgccagatgcagcattacgctggaatctttcccgatggagtacatcattaccgggttagaaaattcggcggccacctcacgaataatatggatgctttccgcctccagttgccgcaggtgagtgagtcgtttttggtccataaccgttccttaagccagattgaccaccgaagcgttaaacccctcggcggatgatgtatgttgaaaccaggcgagctgctgatgcagctgcaccacttcgcctaccaccagcagggcgggcatcggggcgtctttcgccaggtgttcgagttgttgcaatgtgccggttatcgtctgctgatcgtcacgggtgccacgggaaatcaccgccaccggcgtgtcgctgtcgcgaccgtgggcgatcagctgggcgctgatttccgccgccttcatggtgcccatgtagatcgccagcgtctgttggctcttcgccagcagcgaccagtcgaagggggcgctgtccggcttatagtggccggtgacaaagacggcgctttgcgcataatcgcgatgggtcagcggaataccggcgtaggccgtcgccccggcggcagcggtgacgcccggcaccacctggaacgggatccccgcctcggcggcagcctgcagctcttctgcgccgcggccaaaaataaacggatcgccgcccttcaggcgcacgacggttttccccgccttcgccgcctccaccagcagctgattggtttcatgctgcggcaccgagtgctcgccggcgcgtttgccaacgcagatcagctcggcatcgcggcgcaccagctcgagaaccggctgagtcaccagatggtcgtggaaaaccacgtccgcctgctggatcgcctgcagaccgcgaagggtcatcagcccggcatcgcccggcccggcgccgaccagaataatttctcccgtctcgcgttcgggcttatccagctcatcctgcagcgccttttccgcctccgcagagttgcccgccaccatcaggctggcgaagcggccggtaaagacgcgctcccagaagcggcgacgcgcttcggtagtcgtcaggcgggttttcagatggttgcgccagtagcttgctgattccgccagccgaccgagattcgtcggcagcagcgcttcgattttttcacgcagaatgcgcgacaacaccggcgctttaccgctggaggagatcgccaccagcagcggcgaacggtcgacgatagaagggaaaacaaacgagcacagcgcctggttatccaccacgttgaccaaccggtagcgcgcgttagctgccgcaaatacccgctggttaagcgcctcatcctcggtggccgcaatcaccagaaagacatcatccaccagcgagtcgctgaattccgtcgcccgccagctgagtgcctggcgcgcagccagatcggccagcgccggtgacagcgtttcagcgaccacctgcacctgcgcctgggcgcgcagcaagaacttgatcttacgttcagcaatctcgccgccgccgatcaccagcacgggccattgtttcagttcggcaaaaaggggcaagtaatccacggtgcaacaactctcttacattcagcgatactgcgactatagggtgcgccttagagcaaatgaaattacgaaatggaatgagttgtgacacaaaggaataacgcggcggaaatacaaatatcaaaaagtgcttaacgcgctatttttccgctatttaagagcaattgaaattgtttaaccgcggtcacagtttcatactgtacgcgtcaaattgtcttgttcgtgtaaggaccccttatgttttccgcgttgtgccgccgtctgcttccgctggcgctcggcaccggttttgtttttgccgccgcccccgcattcagcgcgctgggcgacaccgccagtagccaggcccgccatatcgccaccgtcttcccgggacgaatgaccggaacgccgccggaaatgctctcagctgactatctgcgccagcagttcgccctgatggggtatcagagcgacgtgcgaagcttcaatacccgctatatctataccgacagcaatcagcgcaagaactggcataacgccaccggcagtacggtgatcgccgcccatgaaggtaaagtgcgccagcagattattatcatggcacacctcgacacctatgcgccgcagagcgataaagacgtggagaacaacctcggcggcctgacgctgcagggcatcgacgacaacgcgatgggacttggcgtgttgctggagctggcggagcatttaaagaacgtccctacccgctatggcatccgctttatcgccaccagcggtgaagaggaaggccgtctcggcgcgcaaaacctgctgcagcggatgagcgaagcggaaaagaaaaataccctgctggtgatcaatctcgataatctggtggtgggcgataagctttacttcaacagcggccgcagcacgccggcctcggtgcgcaagctgacccgcgatcgcgcgctggctatcgctcgcagcaagggcatcgccgcctacaccaacccgggactcaacccggcttatccgaaaggcaccagctgctgcaatgacgccagcgtcttcgacaacgccgggatcccggtgctgtcggtcgaggcgactaactggtcactcggcaaaaaagatggctatcagcagcggagcaaatcggccagtttcccgcagggaaccagttggcatgacgtccagctggataatcagcagtatatcgaccacgcgctgccggggcgcatcgaacaccgcggacgcgaggtagtgaaagtcatgctgccgctggtgaaagagctggcgaaagtggagaagaaaagctaatacgcacaaaagaacgcgcggtatcgcccgcgtgttctttttgaattatcactcagaggaagagctaacagcttaaccctcgtgcaatccgcactcgcgtttaagcccgaagaaccgggtctcttcttctgccatgcccggctcccacttgcgggtggtgtgggtatcgcctaccgagagatagccctgatcccacagcgggtggtacttcagcccgtgcttttgcaggtactgatacaccgtgcggttatcccagtcgataatcggtagcaccttgaacaccccgcgctggaccgccagcaccggaagcgtagcccggctgcccgactgctcgcggcgcagaccggcaaaccacgtctgcgcgttgagctctttcagcgcccggttcatcggctcaaccttgttgatctcattgtatttctcaatgccctcaacgccctgctcccacagcttgccgtagcgcgcctcctgccaggccgcgctttcagccgcgcggtagaccttcaggttcagcttgagcttgtccgtcagctcgtcaataaactgataggtttccgggaacaggtagccggtatcggtgaggatcaccggaatgtccgggcggatctgattcaccagatgcaaactgaccgccgcctgaatgccaaagctcgacgacagcacatagtttcccggcagattttccagcgcccacgccacacgcccttcggcgtcaagcttttccagttgggcgttggtttccgcgagtgccagaatgcgttccactttcggcaatgcattaagcgcgtttagatcgagtacggacatatgaacctcgtttgcctgttttgccggacgacactgcgttcgtccggcctacgggtttcgctggcccggatcgctacgcgccaccgggcaccaggatgttattcccagaaatcgcgggctgggtcgagcaccgggcgaatgatgcccgcacgcaccgtaaaatcgccgaagccttcacccgcttcgcgctctttcgcccagcgccctaccagttcgtctagcgagtcgagaatttccgactcggtaatattctcacggtacatccgcgggatgcgggtgccgttgcggttaccgccgatgtgcaggttatagcggcccggcgctttgcccaccagtcccacttccgccagcatcgcgcggccgcagccgttcgggcagccggtgacgcgggtgacgatatgctcatcgctcacgccgtgcttgctcatcagcccttccaccttgtcgataaacgacggcaggaaacgctcggcttccgccatcgccagcgggcaggtcgggaaggagacgcaggccatcgagttttcgcgctgcggggtgacggcattcatcaggccatgatcccgcgcgagcttctcgatccgcgccttctgatcttccggtacgctggcgacaatcaggttttggttagcggtgatgcggaattcgccttgatggaccttagcaatctccggcaggccagtcttcagcggacgacccggataatcgagaatgcggccgttttcaataaacagcgtcaggtgccacttatcatcaatccccttcacccagccgatgcgatcgccgcggccggtaaattcgtacgggcggatcggctcaaacttaatgcctgcccggcgctccacttccgctttgaaggtttcgacaccgacgcgctcaagggtgtacttggttttcgcattcttacggtcggtacggttgccccagtcgcgctgggtggtcacaaccgcttccgccaccgccagcgtatgctccagcggcagataaccgaattcgctcgccgtgcgggcgtaggtttttttgttaccatgttcgatagagagaccgccgcccaccagcaggttaaagcccaccagcttgccgttttcggcgatcgccacgaagttcatgtcgttggcgtgcagatcgatatcgttctgcggcgggatcaccaccgtggttttaaacttacgcggcagataggtctggccgaggatcggctcttcgtcggtagtggcgacctttttctgatccagccagatctcggcataagcgcgggtacgcggcagcagatgctcggagatctttttcgcccactcgtaggcctcagcgtgcagctgcgactcgtaggggttggaggtgcacagcacgttacggttcatatcgttggcggtggccagcgcgtccagccccaccgagtgcagcatctgatgcaccggcttgacgttctttttcagaatgccgtggaactgaaaggtctgccggttggtcaggcgaatactgccgtaaatggtgttctcagcggcaaacttatcgatcgccttccactgggtggtggtgatcaccccgcccggcagacggcagcggagcagcatcgcatgacgcggctccagcttctgggcggcgcgctccgcgcggatatcgcgatcgtcctgctggtacatgccgtggaaacggatcagcaggaagttatcgcctttaaaaccgccggtcagaccgtcgtttaaatcttccgcaatggtgccgcgcaggtagttgctctcaagcttcatgcgctcggcatcgctcagtttaccttcgaccactaaaggccccggatgtttttcgctcattagtagacatctcgctgataacggcgctcaacgcgcagctcacttaaaaattcgtccgccgcttcggcgtccatcgcgccgtattcggcaatcacttccagtaaggtgttttccacgtccttcgccatgcgattggcgtcgccgcagacataaatgtgggcgccgtcattgatccagcgccacagctcggccccctgctcgcgcagtttgtcctgaacatagattttttgttgttgatcgcgggaccaggccagatcgatacgggtcagcagaccttccttcacatagctctgccactccacctgatagaggaaatcttcggtgaagtgcgggttgccgaagaacaaccagttcttgccttgcgctccgtccgcagcgcgctgctgcataaaggcgcggaacggcgcaataccggtgcccgggccaatcatgatcaccggggtctccgggttggctggcagacggaagttgtcgttgtgttcgataaagacacggacttcgccatcctcttccacgcggtcggcgaggaaactggaggcgccgccagcccgggcgcggccttcaatttcatagcgcaccacgcccacggtgacatgcacctcgctctccacttccgcctgtgaggaagcaatggagtacaggcgcggcgtcagcggacgcagcagaccgattaacgcctcagcgtccagctgcgccggagagaaacggaccatatcgacgatcggcgtcgcggcggcatactgctgcaactgagctttatcgcccaccagcggcagcagcgattcgctgcgcgtcagggtggcgtagttttcaacgatagtcgcggtgttaaccgtcagctcaaaatgccactgcagggcttccgacagcggcagagttttgccctcaacggtcaccggctcgtcgcctttcagccacagcagctccaccagctctttcaccagctgaggatcgttctggtaccagacgcccagggcgtcgcccggctgatagcgcagaccggaatcaccgaggtctatttcgatatggcgcacatctttttctgaattgcggccggtgattttctgattgaccgacagggtcgccgtcaggggcgcttctttggtatatgggctggtgtgaatatcgttcaccgcgccgctggtggccagctgagcgggcgcagcgaccggcgcacgggccttcagcgcctcaaccacgcgcgcgcgccattcagcggccgcggcctgatattcaacgtcggcatcaacgcgatcgagcagacgttccgcgccgagctcggccagcttgttgtcgaaatctttgccggactgacagaaaaattcataagaggtatcgccgagaccaaagacggcgaacgcggtcccgtccagcttcggcgctttcttagagaacaggaacttatgcaatgcgaccgcttcttccggcggctctccttccccctgggtggacgtcactaccaccagcagtttttccgcagcaatttgtttgaatttataatcgcctgcattcaccagcttcacgttcagcttcgccgccagcagatcgtcacgcagcgcttcggcgacgcggcgggcgttgccggtttgcgaggcggaaatcagcgtgatcgtcggtacctcggcggccggggcgggttcggctaccgccgcgccggactgctgattcagcacgccccagaaatagccagatacccaggcgagctgagtgggcgtgaagtcagtggtggccgcctgaaggcgcgccagttgctccgggttgagcggtagcaagttggaaggtggggcctgtgtcgtcatgcgtcgtttgttccagtaagcaaagctgttattcgcaccctgtcagcgcgacaaaaacagaagagaatagaaggttaacggcgggcatagtaacaattaaagaagggatggaaataataaataaccaaatggactaacctgttttagttgtagttattaacaacaaaatcgattaaataagcaattgaaatataagagattaactcaaataaagcagatgaacatgtctattttctgttcacggccgttttagttaatgcgaaaaaatgtactttccggtaccctacggcggtttttttcgtcctgttgagagtcaatgatgtccaccacgctgtttaaagatttcaccttcgaagccgcccaccacctgccgcacgtcccggaaggacacaaatgcggtcgcctgcatggccactcctttatggtgcgtctggagatcaccggtgaagtcgatccccataccgggtggatcatggattttgccgagctgaaggccgcctttaagccgacatacgatcgcctcgaccactattatctgaacgatatttctggtctggaaaaccccaccagcgaagtgctggccaaatggatctgggatgagatgaaaccgcgggtgccgctgctcagcgccgtgatggtcaaagagacctgcaccgccggctgcgtctatcgcggcgagtaagcgaaaaaaagcccggtcagtacgctgccgggcttttttatcaggcaatattcagatacttgtgcgtctgcatagacaggcgccagttgcgggcgatgcaggtatcgatacacaggcgcgtcgcatcttctttctgactgatcggctgcagggcgatgatccgcggtttgtcatcgctcagcgtttccagcagttcgtccagcgcttctatgtcgcggacgcgccctaccggatgcttgatctcatccgcccgctgcagggcctgagacagcacgtcatagccaccgcgcatgttgaccttcggggaaaccgtcacccaggtattggggctgcagcgtacttcatgggtgccgctggtttcaatctgacagctaaagccgttttgttccagaagcgaggttaacggcgttaaatcatgaatgcagggctcaccgccggtaataaccacgtggcgggctgtccacccctgccgcccaataatcgccagcagatcctcgctgcttgccgggccccacttgtcgctctctttggttttcgccaggatgctgaacaacgacacttcccgatcggccagcttgtcccaggtatgcttggtgtcacaccacgcgcatcctaccgggcatccctgcagacgaataaagatggcaggcacgccggtgaagtaaccctcgccttgcagggtctggaacatctcgttaatcgggtactgcatagtcatctctgtttagggtgataaacgttcattatcgcagatttcgctgcccaggtcttgtcctgcgctgcgatcgcttttttacccctccgtcaatatccgtgtcgggaataatattattgattaaaaaagcaatcttttcttttggcttagtttattagcatggtaagaattaaaataaatagcattctgacgcgcggggggaaatatgtaacagaaaatgttattcctgtcattcaggataaaataaaaggtccaagaaccaaaataaaaaaccttaaaatacagtaatgtacaaactgatacatgaaagagtgaattatctggccgatctgcgagtccaattctatcccccggtaataataaccttaaactggtcttaataaagccctgatcgggccccttttttatttaattgtcgtttacttttgcccgcctagaatcccgcagaccaaccataatgagatagcgtttatgaccacattattaattaccggcgttacggggtttctgggcggtgccgcgttagagaaaatactccatcaggaaacccggttagatctgctgctgctggtacgtgctgatagccccgaggctggcctcgaacgggttaaagagaacatgcgtaagttcaacatcgccgaggagaagctggcgatgttgcgccagcagcatatcctgctgggcgatctcgcctctccggagcattttcttaacgatccgcgcctcgatcaggtcacgcacatcctcaactgcgccgctgtcgcttcatttggcagcaacccgcttatctggaaggttaacgttgagggcacgctgcgcctggcgcaacgtatggcgcaggtgacgggtctgcagcgctttctgcacgtcggtacggcgatgtcatgttcgcctgaaccggattcactggtcgccgaaagcgcggagtttcgggaacgcgctgagcacctggtggaatatacccactcgaagtcgaccatcgagcagctgatgcagcagcagtgccctacgctaccgctggtaattgcccgcccctctatcgtggtgggtcatacccatcacggctgccggccttccagcagtattttctgggtgttcagcatggggctgatgctgcagaaattcatgtgctccatggaggaccgaattgacgttatcccggtggactactgcgccgacgccctgctaatgctgcttaaccagcctctggctcacggcgaggtggtgcatatctctgctggcgaagagaacagcgtgaagtttgccgaaatcgacctggcgatggctcaggccctggagcaggcgccggtgggggataagtacgcccaggtgagctatgaaacgctggtcaaaatgagacgcgaactgaaagggatatttgggccatgcaatgagcggctgatgctgaaagccatgcgcttatacggcgcattcgccaccctgaacgtgcgctttagtaacgacaagctgctgagcatggggatgccaaaaccgccgcgctttaccgattacatcgaccgctgcgtggaaaccacccgcgggttgtcgatccctcagcaaatggccgtcgactttaaataatggccgcaggcgtaaaaaaaatgccagcccgaaggctggcatgattatttcacaaggacaggattaagcctgacctttgatctctttacgaccgttgaacggcgcttgctcacccagcgcttcttcgatacgaatcagctggttgtatttagcaacgcggtcagaacggctcatagaaccagttttgatctggcctgcagcggtaccaacagccaggtcggcaatggtagcgtcttcagtttcgccagaacggtgagagataacagcggtgtagccagcgtctttcgccatcttgatagcagccagagtttcggtcagagaaccgatctggttgaacttgatcaggatggagttagcgatgcctttttcgatgccttctttcaggatcttggtgttggttacgaacaggtcgtcaccaaccagctggattttgtcgcccagtactttggtctggtaagcgaaaccttcccagtcagattcgtccagaccatcttcgatggagacgatcgggtactgtttggtcagctcttccaggaagtgagtgaactcttcagaggtgaacgctttgttgccttcgccagccagaacgtatttaccgtctttgtagaattcagacgccgcgcagtccatcgccagggtgatgtctttgcccagctcgtagcctgcagctttaaccgcttcagcgataacagccagcgcttcggcgttggaacccaggttcggcgcgtagccgccttcgtcaccaacggcagtgttcatgcctttggacttcagcactttcgccaggtgatggaacacttcagaacccatgcgtactgcttctttcagggtcggcgcgccaaccggctgaatcatgaattcctggatgtcgacgttgttgtcagcgtgctcaccgccgttgatgatgttcatcatcggaaccggcatggagtatttgcccggagtgccgttcagttcagcgatgtgcgcgtacagcggcaggcctttggacgcagcagctgctttggcgttcgccagagaaacggccaggatagcgttcgcaccgaagttagatttgttttcagtaccgtccaggtcgatcatgatcttgtcgatgccagcctgatctttagcatctttgcccaggattgcctgagcgatcgggccgtttaccgcagcaacagctttggttacgcctttacccaggaaacgggatttgtcgccatcgcgcagttccagcgcttcgcgggaaccagtagaagcacctgacggagcagctgccataccgacgaaaccaccttccaggtgtacttcggcttcaacagtcgggttaccacgggagtcgatgatttcacgaccgatgactttaacgattttggacattaggttttcctcagtacaagttaaactaaaactccagacaaacaatgcacccggatgggtgcattgccgttcaaactctttttacttcgcctggcgtttctggtactcgctcgcggctttcacaaagccggcaaacagcgggtgtccatcacgcggcgtcgaagtaaactccgggtggaactggcaggccacaaaccacggatggttcggcacttcgatgatctcgaccaactgatcatccccggaacggcccgcaacgcgcagaccggcagcttcaatcggtttcaacaacatgttgttgacttcgtagcggtgacgatgacgctcggtgatggtcggctcgccgtaaagctggcgtaccagagaatcatcactcagctggcactgctgcgcgcccaggcgcatggtgccgcccagatcgctcttctcagagcggacttcaacgttgccatcttcgtcacgccattcggtaatcagggccacgaccgggtatttacagtctggcacaaattccgtcgagttggcgttttccatacccgctacgttacgcgcgaactcaatcagcgcaacctgcatacccaggcagatgcccagataaggaatattgttttcacgcgcatagcgcgcggtggcgatcttgccttcaacgccgcggtagccgaagccgcccgggatcaggatagcgtctaaatccttgaggatttcgacgccgcgcgtttccacatcctgcgaatcgatcagcttgatgttgacggtaacgcgatttttcagaccgccgtgtttcagcgcttcaatcaccgacttgtaggcatccggcagttcaatgtacttaccgaccataccgatggtgacttcgcctgccggattagcttcttcatagattacctgttcccattcggccaggtttgcttccggacaagttaagctgaatcgtttacaaatataatcgtccagcccctgagatttcaacaggcccggaattttataaatggaatcgacgtctttcagagaaatcacagccttttccggaacgttacagaacaaagcaattttggctcgttcgttggccggaaccgcgcgatcggagcggcagatcagaatatcaggctgaataccgatggagagcagctcttttacggagtgctgggtcggcttggttttgacttcgcccgcggcggccatgtacggcaccagagtcaggtgcatgaacagggtatgctcgcgaccgatctctaccgccatctgacgaatcgcttcgaggaacggcagggattcgatatcgcctacggtaccgccgatttccaccagcacgacgtcatggccttcgccgcccgccagtacgcgctctttgatagcgttggtgatgtgcgggataacctgaacggtcgcgcccaggtagtcgccacggcgctctttgcgcagcacgtcggagtagatacggccggtggtgaagttattgcggcgcgtcatcttggtgcggataaaacgctcatagtggcccaggtccagatcggtttctgcgccgtcttcagtaacgaacacttccccatgctggattgggctcatggtgcccggatcgacgttgatatacggatccagtttcatgatggtcacgttgagaccacgggcttcaagaatggctgccagggaggctgcggcaatgcctttacccagagaggatacgaccccgccggtcacaaaaatatagttcgttgtcatgctgaacctgagaagttagggtaaaacgatggaataaccaggacgggaaagtagtatacccgaacatgcgtgacgccacaaactttcattcttcccctccccttcgttcttcaagttgcacctgtgttgcgactcgaacaactcgaagaggcaggctacatggtgtttcaacgacataacggaaagagaaaatagacgcttttggcgaaatgtttttgacgtaaatcaagcgcttgttatttataaaatcacacaaatcgcgcctgatcacgaaaatccgttagagatcagtttcctggcgttttacttcctgccacacttcttccatggtatcgaggtcgacgccggtcatttccaggcctcgggcggcgacaatacgctcgacctcgcggaagcgacgctcaaatttgaggtttgctttctgcagcgccacctcggctttgacgcccaaatgacgggataagttcaccgtggcaaacagcagatcgcccacttcctcttccagttttgcttcatccaccaccgcctgctgcgcttcatgcatcacttcatcaatttcttcatgcactttgtcgagcaccgggcccagcgaggtccagtcgaaacccactgccgagcagcggcgctggattttatgcgcgcgcatcagcgccggcaggctatggggaatatcgtccagtgccgaatgctgggctttttccgcccgctccgcgcttttgatttgctcccagcgggccaggacttccgtgctattgcccgccgatgcctcgccgaagatatgcgggtggcgacgctccagcttgtcgctgatggcggcgcagatatcgtcaaagttaaagcgtccctcttcctgcgccatttgcgcatagaacaccacctggaacagcagatcgcccagttcaccgcgcagatcgtcaaaatcttcccgctggatagcatcgaggacctcgtaggtctcctcaagggtgtaaggggcgatagtggcaaaggtctgctctttatcccatgggcagccgttttccgggtcgcgcaggcggcgcatgatgccgagcaagcggtcaatttgagtcatgtgacaatcctggaaatttaaaaaatagtcggccggataaggcgtttagaccttatccgacgttgcgaaattgccggatggcggcttcgccttatccggcctacagacgaattaaccgccgtgcagacggcgcgcgtcgatcacatccggcacctggttgagcttaccgagcacccggcccagcacctgcaggttgtaaatctcgatggtcatatcgatggttgccagctgctgacgggtatcgctgcggctggcgacgcccagcacgttcaccttctcattggcgaggatggtagtgatatcgcgcagtaaaccgctgcgatcgttcgcctccaccctgaccaccagcgagtagcccgccgagtagctttcgccccataccgcatcgacgatgcgctccggggcatgcgactgcagttctgccagctgatcgcagtccgcgcgatgcacggagatcccgcgcccctgggtgataaagccgacgatctcgtcgcccgggattggctggcagcagcgggcaatatggtgcatcaggttgcctaccccttccaccactacccggccattgtccttggtgcgattttgcggcgtgtaggttttctgctgcagttgcttcagcgcggccgcatcctgctcggcggcgctaggtttattgaactgcgcctgcaggaagttgaccatctggttgagacggatatcgccaccgccgatggcggccagcagttcatcgagctcgttgaagttatagcgcggcagcaggtgcttttccgcatccttcaggctgatgcccaaatgctccagctcgtcgtcgaggatctgccgaccggcgagaatgttcttgtcgcgatcctgcttacggaaccaggcgtggatcttcgaacgtccgcggctggtggtcacatagccgaggttagggttcagccagtcacggctcgggttcggctgcttctgggtaataatttcgatctgatcgcccatctgcagctggtaggtgaatggcacgatgcggccgccaattttggcgccgatgcagcgatggccgacatcgctgtgaatatgataggcaaagtcgagcggcgtcgaccccgcaggcaggtccaccacgtcgcctttcggcgtaaagacatacacccggtcgtcgaagacctggctgcgcacttcgtcgagcatctcgccggagtcggccatctcttcctgccaggcaatcagcttacgcagccaggcgatacggtcttcatagccgcggccgccgctggtgccggctcccgcgccctctttgtacttccagtgcgcggccacgcccagctcggcatcttcatgcatctgccgggtgcggatctgaatctccaccgtcttgccgctcggccccagcaccacggtatggatagactggtaaccgttgggtttcgggttggccacgtagtcgtcgaattcatccggcagatggcggtagtgagtatggacgatccccagcgcggcatagcaatcctgcaaacgctcagccacaatacgcaccgcgcgaacgtcaaacagctcgtcgaaagcgaggtgttttttctgcattttgcgccagatactgtagatatgcttcggccggccatagccttccgccttgacgccttcggctttcatctctgagcgcaggtggccgacaaactcttcgatgtaatgctcgcggtcgatacggcgctcgtggagcagtttggcaatgcgcttgtattccgccgggtgcagatagcggaagcagtaatcttccagctcccacttcagctggccgatacctaagcggttcgccaggggagcatagatattggtgcactctttcgccgcaagaacgcgctcatcttccggcgcgtctttgacctcgcgcagatgcgcgatacgctcagcaagtttgatgaccacgcagcggaaatcgtcaaccatcgccagcagcatacggcgaatgttatccacctgctcggaagagactgagtcggtatgggtagccttcagctggcggatagcggccatgtcccgcaccccgtgaatcagggtcacgaccgatttacctacgctctcctgcatcacctcttcgctgacaacttcgccgtcggccagcgggaacagcagcgccgcgcgcagcgtatcgatgtccatacttagggtggagaggatctccaccatttcgacgccccgccacagcagcaggtccgcctgcgggtgtccttgcgttttttcgcgacaataatcccaggtttcggctaagcgctcacacgactgctggctggaaattcccagactcgcgatccatttcttcgggtcaaattcaccagctttattaagatgtgcacttcttaccgcaaccattgtcctctccttaagggaccggcctgccgaagtcggcaagcctcaactttctacatgtcatcctgcaggtcgcgtcagcattcatggccagggtggctcttctgcgacgttgtgaatgaccttatgtaagcctgcgctcaaacaacaccattgattccagatggccggtatgcgggaacatatccagcatcgccaggcgttgaatctgatatccagcctgcaacagggtttcgctgtctcgcgccagcgtcgccgggttgcaggaaacatacaccacccgccgcggtgccagttttattatatgcggcatcacgcccggcgcgccggcgcgggccgggtccagcagcactttatcaaagccgtgcttcgcccaggcctgacgggtgacgtcttcttccagattttcatggaagaaagtgacatttgataaaccattgcgggcggcgttttcccgccccttctccaccagcgccggcaccccttccacgcccaccacatgggcggcgcgtgtcgccagcggcagggtaaagttgcccatcccgcagaacagatccagcacccggtcctctggccgcagatccagccactccagtgcggtacgcaccatctgctgatttacgccgtcgttgacctggataaaatcccgcgggctgaacactaagcgtagtccgtctgaggtataccatggcgcttcgccatgaatttgctccagtatctcgctttgtggcgcgaggtacagggaaagaccgtgagtttgcgaaaagcgttccagtttttccctgtctgtcgccggcagggctgcggtatggcgcagcaccatcagcgggccattgtccgcctgcaccagctcgacgtggccgagatggcgtaatgcgctcagcgcgcttaagcactcgcgcacagcgggcagcaatgcctcaagttggggcaccaaaacagggcactgcaccacatcgacgatcgctttggcgttgacctggcgaaaacccatctgcaattgttgggtcttcggctgataattcaagctcaagcgtgcgcgacggcggtagccccacggcgcgccggcgatgacgtcatctacctcgcgcttcatcagtcgccccagcgcggcgcgtttactttgctgctgaagcggaacgctggcatgttgttgttggcatccgccgcagacgccaaaatgggggcagcgcggcgcctggcgctgcgggctgtcggtcagtcggcgtttcacctcggcgcgggcgtactgttttttatcttccaccagcaccacctcggcctgctcgtggggcagcacgccgctcacgaacagcgccttcccctggtggcgggcaacaccctgaccaaagggatcgaggtcgttgactgtaacggttatgatctggcgcgtcgtcacacgccgttttgcagagtagaattgcgccatcgtagagagttgtctcaatcaaataaaacgagctcgttcagagcggcagcgccgcgaggcgcagcgacgctgcacagaacgatgatgtctatattctcccataatggaaccgcatgaccaactacagcctgcgtgctcgcatgatgattctgattctggcgccaaccgtcctgataggactgttgctcagtattttctttgtcgctcatcgttataacgacctgcaacgccagctggaggacgctggcgccagtattatcgaaccgctggcggtctccagcgaatatggcatgaacttgcaaaaccgcgaatccatcggccagctgatcagcgttctgcatcgtcgccactcggagatcgtgcgggccatctcggtgtacgattcgcataaccgcttatttgtcacctccaattaccagctcaatcccagcgaactgcagatcccgaaaggcgaggcattcccccgtcacctcagcgtcatccgcgatggcgacatgatgatcctgcgcacgcctattgtctcggaaagctattctccggatgaatcacccgaatctgacgctaaaatgccgggcaatatgctgggctacgtcgccctggagctggatctaaaatcggttcgcctccagcagtacaaagagatttttatctccagcgtaatgatgctgttctgtatcggcatcgcgttaatcttcggctggaggctgatgcgcgacgtcaccgggccaatccgcaatatggttaacactgtcgaccgcatccgccgcggacagctggacagccgggtcgaaggctttatgctcggcgaactggatatgctgaaaaacggcattaactcgatggccatgtcgctggcggcataccacgaagagatgcaacacaacgtcgaccaggcgacctccgatctacgggaaacgcttgaacagatggagatccagaacgtcgagctggacctggcgaaaaagcgcgcccaggaggcggcgcgcattaagtctgagttcctggccaatatgtctcacgagctgcgcaccccgctcaatggggtgatcggctttacccgcctgacgctgaaaaccgatctcaacgctacgcagcgcgaccacctgaccaccatcgaacgttcggccaacaatctgctggcgatcatcaatgacgtgctcgacttttccaagctggaagccgggaagctcatcctggagagtattccgttcctgctgcgcacttcgcttgatgaagtggtcaccctgctggcgcattccgcgcacgataaagggctggagctgacgctgaatattaagaacaatgtaccggataacgtcattggcgatccgctgcgtctgcagcagattgtgaccaacctcgtgggcaacgccatcaaatttaccgagcacggcaatatcgacgtactggtggagcagcgggccatcagtaattcccgggtacagatcgaaattcagatccacgataccggcatcggcatccccgagcgcgaccagtcccggctattccaggccttccgtcaggccgatgccagtatttcacgccgccacggcggcaccgggctcgggctggtgatcactcagcgtctggtcaaagagatgggcggggatatttcgttccacagccagccgaaccgcggctccaccttctggttccatatcagcctcgatctcaacccgaacgccattccggatacgctgaacaccgacgggcttgtcggcaaacgtctggcctatgtggaagccaacgcgacggcggcgcagtgtaccctggagatgctggccgctacgccgctggaggttatctatagccctaccttctcctcgctggcggaagcgcagtatgacattctgctggtcggtatcccggtttcaatgcgcgatttgtcgccgcatcgggaaaaattagccaaagcctgcgcgatgtccgataacgtactgctggccctgccgtgccatgcccaggtcagcgccgaagccctgaagcgcgacggcgttgccgcctgcctgttaaagccgctcaccaccacccgtctgctaccggcgctggtggctaccagccacgcgcttgcctccgcgccgctgatgcagatcgacagtcataagttgccaatgacggtactggccgtcgacgacaacccggctaacctgaagctgattggcgccctgctggatgatcttgtgcagcaggtgatcctctgcgacagcggccagcaggcggtggacaaggccaagcagctgcagatggatctgatcctgatggatattcagatgccggatatggacggcatccgcgcctgcgagcttatccatcacctgtcccatcatcagcaaaccccggttattgcggtcaccgcgcacgccctggagggccagcgtgagaaattactgagcgccggcatgaacgactatctggcgaagccaatcgaagaagagaaactgcacgcactgctgctgcgctatcagcccggcctgcacagcgtcgttccggcgtcgctaccgcccgcagagccgatcgtcgatcataatcaaacgctcgactggcagctggcgctgcgccaggcggccatgaagccggacctggcgcgggagatgctgcaaatgctgatcgcctttatgccggaggtgcgtaacaaagttgaggagcagctggtgggcgagcagccggaagggctggtggatctgatccataaactgcacggcagctgcagctatagcggcgtgccgcggctgaaaaagctgtgccataccctggaaagtcagctacgggcaggcaccgccgccgaggatctggagccggagctgcttgagctgttagatgagatggataatgtggcccgcgaagcgtgccggatgggggtgtgaaccccggatagcggcgctacgcgcctcatccgggctacgtcctacggtccggtattcggttggtagccccggtaagcgtaagcgccaccggggatggttcccggatcgcggtgctacgcaccttatccgggctacaaataccactgcgccagccgggttaccgcctgtcgcccatctgcaaaaccgcggctacgttacgcgccgtcattcgcaggttggcggcggcattggccaacgcttcatcaagggtacagatggtatacaacacgctgaataccgcatccagcccgtgctgatgcacgacgccaacatcggcggtaagactgccggcaatcccgatcaccgggacgttaaaacgcttcgccaccctcgccacccccaccggcactttgccgtggatcgtctggctatcgatacgcccttcgccggtgatcactaaatcggcatccgccacccgctcagccagctgtagcgcatcggtgacaatctcaatgcccggacgcaactgagcaccacagaacgcatacagcgccgcacccatgccgcccgccgcgccgccgccctcaaggctcagcacgtcgatatctaaatcgcgggcgataatccgggcatagtgccgtaggccgctatcgagccggtcgatcatctgcgccgtcgcccctttttgcgggccgaacaccgcgctggcgccctgcgggccggtcaacgggttggtgacgtcgcaggcaacgtcaatccggcaatctgccagccgcgaatcgagttcgctgagatcgattcgcgccagcgtctccagcgcgccgcccccggaggcaatttgctggccctcggcggtcagcagtttcgcccccagcgcctgcgccatcccggcgccgccgtcattggtcgcactgccgccaataccaataatgatctgtcttaccccggcgtccagcgcatggcggataagctccccggtaccccaggaagtggtcagcagcgggttacgctgcgccggcgggacgctctccaggccgctggccgccgccatttcgataaaggcgcactggcgatcgccggacagcccgtaaaatgcctcaaccggctcgcccagcggcccggtgaccgtcagcggaaccagaagcccgccggtcgccgccaccatggcttccaccgtcccttccccaccatcggcaaccggcagcttgacatactcggcgtcaggataaatctcgcgaaagccttgctctatcgcactggccacttccagcgcgctcaggctctccttccaggaatccggtgcgatcactattttcatctgctgtccttactctgagccaacccctggcgctgtcgcgcaatgccggcccccgcagaggccggcggacttttagcgcaccatgcatggacgcttgttgtcaaaggtccagcccgggatcagatactgcatcgccatcgcatcgtcgcgggcgccaagaccatgtttcttatatagctcatttgcctgcatcacgcggtccatatccagctcaacccccaggcccggggtactcggtacctgcaccatgccgcctttgatttcaaaaggttgtttggtcagacgctggttgccctcctgccagatccagtgggtatcgatagcggtgatcttgcccggcgccgctgccgcgacgtgggtgaacatcgccagcgacacgtcgaagtgattattagagtgcgaaccccaggtcagaccgaactcatggcacatctgcgctacgcgcaccgacccctgcatggtccagaagtgcgggtccgccagcgggatatccaccgattgtagcgacagcgtatggcccatctgccgccagtcggtggcgatcatattggtggcggtcggcaggcccgtcgcgcggcggaactcggccatcacttcgcggccggagaagccctgttcggcgccgcacggatcttccgcataggccagcacgcccttcagctgtttaccaatctgaatggcctcctcaagcagccaggcgccattcgggtcgagagtgacgcgagcattcgggaagcgcttcgccagggcgctgatcgcttcggcttcttcaaaaccggccagcacgccgcccttcagcttaaagtcgttgaaaccatatttttcatacgccgcttccgccaggcggaccaccgcatccggcgtcatcgcctcttcatggcgcaggcgataccactcgcactgctcatccggctggctctgataggccagcgg

SEQ ID NO: 167 - DNA, 40908 bp, Unknown
  source: /note="Description of Unknown: MKP2_2161_1 Mutant Bacteria sequence"
ggggggggggggggggggggagggcggggtgtggcggggggggggcgtcggcccgcccggaagcctgcagggataagtcgaaggcaccgcgcagcggcgatgttgctggccggagcccgggggtacagggggcggcggcgactggccgccccctgtgcgctccaggcgccataagtgacatagcgcagaagacatatcgggagcgcaatctgcccggaaatagccctggatggtagccctgctaagcgcagcgcgggcagggacatttccggttgcgccgatatttcgccgggtggcggctggcgccttacccggcctacagggcttatccggcctgggacgactgaacccacaggcctgtagaaaaatttatccgctccgctattccagccgccagctcagcaccggccagccgtatccggcaccggccgcctgcagctgcggacagggattgaccagccgcacgcgatccgcatgcaggcacagcggcagatcgttaatggaatcggtatagaacgtcacctcgccgtcatactgcggatgcgcctcgcgccactgcgccagacgcgccaccttcccctgctgatagctggggatcccggtgatttcaccgctgtagccgccgtcgaccatcgccacgtcaatacccagcgcctgatcgatctccagcgcggcggccaccgcctgcaccagcaggctaaccgaggcggagataatcagcatctgctctccctcggcccgcagacgacgaatgagctcccacgcctgcggatagacccggggcaggatcgcctcgcgtacgcagcgggccaccagcgcgtcaacgtccgacttcggtattccggccagcggcgcctggatcagggccacataatcggcgatattcatctctccccggtcataatccgccattagccgcgcctcgcgggcaagataccccttctgcgtcgccagcccttcgcaaaccataaactggctccagaccgtactgctatcgccctgtatcagggtgttatcgagatcaaaaatcgtcagcgtgttgcccatggtacttcccttactggtcaaaataagctgccgggagcatgcgtaaaaaagatgacaggaaaatgaaccggacgccgcagcgcccggctcgccatcagccggcgcggaccttcgcggtgcggaacaccagcacgatcccgccgacgatcgccatcataccgatcatcgccgccgccggcagccggttgcccagcagcagataatccagcagcgccgtgatcgctggcaccagataaaaaaggctggtgacattgacgatatttcccgcgctcagcagacggtacagcagcagctgggcgaccaccgaaatcagcagcccgagaaacagcaccggaataatcaacccggcgttaacggtaaactggaagccgctgatcggggcaatcagcaggcacagccccagactaacggcatactgcagcggcaggacatccgccggcgcctgacggctgcgcttttgccacagcgcgccaaaggtcatcagcagcagcgccgccagcgcaaacaggatccccaccgtcgccatcggcgaggccgccaggctgcgccacaccaatagcaccagccccgccagggcaagcagcagtcctgacagccgccgcccctgcaggcggcgctccaccacgcaaagcgtaaggatgggctggatccccatgatggtggcgataagtcccggcgtcacgccgttggccatcgcctcgaagtaacagaccgaatagccgccaatcagcatcagaccggtgacagctgtctgcaggcgggtgcccggcgcgggcagccagcgccgacggacgatagccagcggcgtcagcgcgaccagggcaaccagaaaacgaaagaccagcagcgccatcggcgaggcgttatccagtccccagcgggtgaagatggccgcgctgccccacagcagcacaaaaagggccgttgtcgcctgcgaggcgagcagagaatagcgaacgtgcatagcatgctccagaacgtcaaacacaaggtatcaagcgtcataccggcaggtaagcgcctgctaaagacggcgttaagcgccgaaaactacccggtctggagggggaggcggtgggcagagcgtggcgaagcgatgatgaggcgcagacgtcatccaccccgcgtcgaaagcggcgccgggcaaagtctcgctagagatggcgtaatgcgtcatggaatgcctcgtgaaatgttcctgtcagcatcctggcacagaccgttgcggagtgacaactgccctttatggctgatccatcccgaggttgtttatttttaatcgtaaataaacgtaaaggcggcctcggcttattcagccgtggtttttaatcggctataaaacaaagcagtctgcttgctacttcgaaaataacgatatgaagccaaaactgacgcatgctctctttttaattccttttttgttgttggcaggatgctcctcctcaccgaaacaggcaaagaacacaaaatctcatgcggatatgaccattgatagcggatcggacgatctgatccctgtggtggcggccctgcatgatcagatgcacacctggcagggaaccccctatgaatggggcggtactgaacaaagcggcgtcgactgctcgggtttcgtctggcgcacgctgaaggatcgctttaacctgccaatggagcggatcaccacccgcgagctgctgcacatgggcgtgcgggtcaataagcgggatttacgtcccggcgatctggtgttcttccgcacccgggccgggatgcacgttggcttttacgataccgatcataatttccttcacgcctcgagcagccagggcgtgatgcgctcttcgctggacaacccttactgggaatcagcgttctatcaggcgcgtcgtctgccgaaggagtataacgcgcagatcaccatgaacagcgacaccctgcatttggcgaagaatcgccgctaaaaaaaagccgcagccagggctgcggcgggtggttctgcggttaatcagaactggtaggtcatacccagcgcgacgatgtcgtcatcgttgatgccgagtttgttatcgcttttcagctggttgattttgtaatccacgaaggcgttcatgtttttgttgaagtagtaggtcaggcccacgtcgatgtagttaaccagatcttcactccccaccccttcgatatccttccctttcgacagcacatagccgagggacggacgcagaccgaagtcgaactgatactgcgccaccgcttcaaagttctgcgctttgttggcaaagccgccgctgatcggggtcatcttgcgggtttcagagtacatggtcgccaggtagatattgttggcgtcatatttcaggccggtcgcccaggcttccgctttcgaaccctggccgcgggccagcaggttctgatcgttggtacggtcggagctggtgtaggccgcgctgacggcgaagtcgctgccgccgaaatcatagcttaacgaggtgccgacgccgtcgccgttctgtttcttcgcttcacggccttcgtttttaccctggtactgcagggtcagatccaggccatccaccagaccgaagaagtcggtgttgcggtaggtcgccaggccgctggcgcgcttggtcataaagttatcggtctgggcagaggaatcgccgccgaattccgggaacatatcggtccaggcttccacgtcgtacagggcgccaaggttacgaccgtaatcgaaggagccgtagttcttcagcttcacgccggcgaacgccagacgggttttctgactggagtcgctctcggttttgttaccggagaattcagattcccaacggccatagccggtcaggtcgtcgttaatctgcgtttcgcctttaataccgaaacgcacgtaggtctgatcgccatccttgctgtcatagtcgctgaaatagtgcatggctttgatcttgccgtacacatccagcttgttcgcgttcttattataaacttccgctgcctgcgtcgctgttgaagccacaaagcccatcatcattaatgccagagtactctttttcattattcagtcctggtgatttatttatacgcgctattcaattgcgggcgctcgcccatcaaaaactggaggttttttaacgccgggatattaaatatttatgacaagatggaactttttataaaaaagggtatttaaatgtatctgacatatttttgtcacattccctctccagaatgcccgatcccgcgcaataaaatggcgcgcccgccgccccgggtgttggcaagcgggccgactcctgctacaacatcagctcgatatcgatattccttttgaacggcagagaatcatgagtgaaagccagacgctggtggtaaaactgggcaccagtgttttaacaggcgggtcccgtcgcctgaaccgcgcccatatcgtcgagcttgtgcgccagtgcgcacagttgcacgccatgggacaccgtattgtcatcgtgacctccggggccattgccgccgggcgcgagcaccttggttacccggaactgcccgccaccatcgcctccaagcagctgctggcggcggtgggacaaagccgtctgatccagctgtgggaacagctgttttctatctatggcattcacgttggccagatgctgctgacccgcgccgacatggaagacagagaacggttcctcaacgcccgcgacactctgcgcgcgctgctggataacagcatcgtcccggtcattaacgaaaacgacgccgtcgctaccgcggaaatcaaagtgggcgataacgacaatctctccgcgctggccgcgatcctcgccggggcggataagctgctgctgttaaccgaccagccaggcctgttcaccgccgacccgcgcagcaacccgcaggcggagctgattaaagacgtctacggcatcgacgacgcgctgcgcgccatcgccggcgatagcgtctccggactcggcaccggcggcatgggcaccaagctgcaggccgcggacgtcgcctgccgggcggggattgataccatcatcgccgccgggaaccgtccggacgtcatcggccatgcgatggcaggcctgccggtaggtacctgcttccacgcccaggagtctccgctggagaaccgtaagcgctggatcttcggcgcgccgccggcgggggaaatcaccgtcgatgcgggcgcgacccaggcgatcctcgaaagaggcagctcgctattgccaaaaggcatcaaaatcgtcagcggcaacttctcccgcggcgaagtgatccgcatccgcaatagcgaaggacgcgacatcgctcacggcgtcagccgctacaacagcgatgcgctgcgccttatcgccggccagcactcgcagcaaatcgatgccattctgggctatgaatacggcccggtggccgtccaccgcgatgatatgatcatccgttaaggagctgaaaatgctggaacaaatgggcattgccgccaaagcggcctcctggcagctggcgttactctccagccgggaaaagaatcaggtactggaaaagatcgccgattatctggaagcgcagaccgacgatattctgcgcgccaacgcggaagatttagccgaagctcgcgccaatggcctgagtgaagcgatgctcgatcgcctcgcgctgaccccggcgcgtctgagcggcatcgccagcgatgtgcgccaggtgtgcaatctggccgatccggtcggccaggtgatcgacggcgggctgctggacagcggtctgcgtattgaacgtcgccgcgtcccgctgggggtgattggcgtgatttatgaagcgcgtcctaacgtgacggtcgacgtcgcctccctgtgtctgaaaaccggcaacgcggcgatcctgcgcggcgggaaagagacctggcgcaccaacgccgccacggtgaaggtgatccagcaggcgctgcaggagtgcggtctgccggccgccgcggtacaggctatcgagagcccggatcgcgcgctggtgggcgaaatgctgaagatggataaatacatcgatatgctgatccctcgcggcggcgcgggcctgcacaagctgtgccgtgagcagtcaacgatcccggtgatcaccggtgggattggcgtgtgccatatcttcgtggatgaaaccgccgagatcgcccccgcgctgaagatcatcgtcaacgccaagacccagcggccgagcacctgcaataccgtggaaacgctgctggtgcaccgcaacatcgccgataccttcctgccggcgttgagcaagcagatggccgagagcggcgtcaccctgcacgccgccccttccgccctccccgcgctgcaaaacggcccagcgaaggtcgagccggtgaaagcggagcagtatgacgacgagtatctgtcgctggatctgaacgtcaaagtggtggctgatatggatgaggctatcgcccatatccgcgaacatggcacccagcactccgacgccatcctgacccgcaccctgcgtaacgccaaccgctttatcaatgaagtggactcttccgcggtatatgtgaacgcctccacgcgcttcaccgacggcggccagttcggcctcggcgcggaagtggcggtcagcacccagaagctgcacgcccgcggcccgatggggctggaagcgttaaccacctataagtggattggtttcggcgacgataccattcgtgcgtaaatgagaacgggcgatgcaaaaataggcagttgattccactggctattgacgcatcgcccgctaagttctaaccttttgcctcgtgattcaccctcgtgaacacctcttgcagggccgatatagctcagttggtagagcagcgcattcgtaatgcgaaggtcgtaggttcgactcctattatcggcaccattctaacgtctccccaagtctactaaagttcactgaaaccccttatactctgcgctttacagccccttttagtatttctacgtctactaaagttccctgaaatctacattcgtttgggggtacttatgggggtatatgctgttcggtctagaggaggtacccccaaatgaaactaaacgcccggcaggtggacaccgccaaacctaaagataagccttacaagctggctgatggtggtggtttgtatctcctgattaaacctaatggcggcaaatactggcggctcaagtatcgtgtagccggcaaagagaagctgttagcgctgggtgtgtatcctgaagtcacattggccgatgctcgggcaaaacgtgaagaagccaaaaggggtatcgctgggggtatcgatcctatggaagcgaaacgggaagagaagatcgcccgtgaaacgcagttaaacaacaccttcaaagatattgcccttgagtggcacagcagcaaactaaaaaaatggtctgctgggtatgcttcagacatcctggaggctttcaacaaagatgtgttcccttacattggcaaaaaaccaatagccgatatcaaaccgcttgaactgttgaatgtgctgcggcgcattgaggggcgcggcgctacagaaaaggccaaaaaagttaggcagcgctgcggggaagttttccgttacgcaatagtcaccgggcgtgctgagtataaccccgctccggatctcaccagcgccatgcaagggcatgagtccaatcattatcctttcctcacaccgaaagaattgcctgatttcttcaaggcgttgtcaggatatacaggaagcgcgttagtagttttggctgctcgtctgctgattatcaccggcttgcgtaccggcgaactccgcggggcattttgggatgaaatcaatatcagtaaggcggtttgggaaataccagcctcacgcatgaaaatgcgtcgccctcatgtggtaccgttgtccaggcaagctcttacgcttattggccagctccaagagctaacaggcaattacccgcttatgttccctggccgtaacgatccgcgaaaaacaatgagtgaagccagcataaaccaagtctttaagcgtattggctatgacggaaaagtcaccgggcacggtttccggcacaccatgagtaccatcctgcacgaacagggctacaacaccgcgtggatagaaacgcagctggcacacgtcgacaaaaactctattcgaggaacgtacaaccacgctcagtacatagacggccggcgagaaatgcttcagtggtatgccgactatatggaagcgttggataacggtgaaaatgtagtgcatggaacattcgggaaaagcgcttaactgtatgtatagacagtgctaattgacagtagtagacttctgtagactatcgttagcaggaagcttttatgcgagaaaacatcctcaacatgccccatcatcttcgccgacaacgtgtggtcactgctgagcaggctgcaatggctatggctggcgtgtacagttgttcacgcttagatgagttgaaagctaaattccctcctgagatctacaacattgcttccagttacttgaggataattttgagtgctgtaaacgcagaagaactacatcccaagagaacatggtctagctcacctggcggagatatcactggagctgatttttattccaatgatatttggccttgggctgttaaagaaatatcagctacagatagttggtttggatgtgatccagatagctttagcgaaaagtaccagcctttacgaagcgggtggggcgagtttgctggtaaagatacagcgttaaaactgatcgctggaatggctattgcgcttgaaaaatcaggtggtaaatatgttcgcggtaaaaatttgaacaaatccgaagttgctaggagtgcttcaagaagcatattggaacatggcgatggcatcgatgtgacagataaggcattgactatgctaattaatgaagctctgaacacatacgcttccaaatagctcgtgaggatttccaaaaagtcgatctacaggttctaaaacttctgaccgtacttctatttcagtggaagagctgcttccaactgatttaccgtgacttccacaactacccgcatgtttttgctgaaatatacctcgtagaccacattagacttcgagaggtatatatgtcccattcccttatccgcttacctgaagttcagcgcagaaccggctatagcaaggcttggatctatcgactcatggctgagcaacgtttcccctcatccataaagattggttctcgagcaattgctttcattgaaagcgaaattgatgaatggattagtgagcgcattgaatcgtcacgcagccaaacgaactgagattccgtgagcagagataatttgcgagagtttgcacttcggatctcgcagaatacgtttgtcgcgacagctcactaaacaattcaaaaaggttaatgccatgaagaacaattatgcccgtctggggcagggcttcgctcaccctaaaaactccttgccttgttattcaactgaagggtatgctttaaaagcaccagcaaaatctggtgtcgggcgtgagaacccggataagcaaaaggcgataccagacgcctatagcgtctttttttgtgtcgtaaagccagtacatcttcattcagcggggaagatccgcatcgaatctatggtggcgctggcggggcagccgaaaggctggccggtatccttttgcaccggtattctcacccccgtcagtgtcaccaccctttatgagcgtgagaactcaagtggtgactccagtaagcaaaaggaggctgccacatggctactaccccaacccaaaaactgcccaaattcacctggcttttcctcggtacgccgaaaggccggacctgcactcccgttgttatccgtatcgttgccgacagtgagcaagaagcccgcgagttttattcccgctgggatcttatctttgccgccaaaattcgctctgaatgttcgctttatcagtacagtagcggcgcgtttgaactggatgttgcgaaattgggaggtagccatgcttaacctccagaccctgacagctaaagcccgcgagctgcgcggcaacgtggtaaaagccacgaccacgaaaggcacgcgcaccatgacgcccgtttacgaacgggaagagcagcgcaaactgcgcgaacgcatccagcagacccagccggactgggttttactctggtgggatattgcgaccgttaccggctggcgtaccagcgacgtgtgcaatttccgttactcctgcatcaactgggaaaccggtattgcaacgatcatcgtagcgaagcagaccaaagcagcggaagccagagcgacccggaaggggatcgagattgttcgccagcagcgcaaggacgctgcccggcttgctggcgatcacattgggtacatgcactgggatagcgtgagctgcgacgaactggccgccggcatgacgggagaagaacaggcgatcgtgtttgagctggtggcaaaggctgaagttaagcacgacaccaaacagctgccgccgggcatcatcaagcggctgcgcgaacgcatggagcgcaatcttatcggtgacgacctggtattttcccgcagccagattgaaagtaaccgttgccagtctctggaaggtagcgttagccgtcagacgatctggaagaaactgcacaacgtcatggtgtggtttacccgcgtagtaaacacgcgtctgcgcctgagcgcctattccagccgcaaaattgccgcctttaatctcatgtccgccggcggcgaacagggcttgctggtcgcctctgaaatgctcggacacagtaacccggcaatcacccggacttatctccagctggggagcaaggccgcggctatccagacacgcctcgctatggaggtgaatgcatgacaaagccaactcaaaacgaatccattgccatgctgacgaccagcgcaggccaggcgcttgaatacagccgtcaggcgcttgccgttctcgatatgtggataaacaccctggcgccggatgatgaaatggaaagctttcgtgtcgcggcggttcacagcctggtcagtcaggcatcggaatatctggtgaaagtcagggaggtcagaccatgaccgctatttataatctggtgcgctgtagcgatggcaaaactgtattcagttttccggccggcggccgctatctggtggacacgtcgaacgggttgcagtcgatgcgcccccttatggacgacgagatccttttcacggtggagagtgccgcgcgctttctgaagaagattggttatcaggtaatcccgccagcggcgtgaggtaaaaaatatgacgattaaaatttccggcttagctgctggtggccgcgctcaccctgaaatcaggccgggcgataaatggaaggacagccggggcagcatcgtaattatcgaaagttaccgattcgacagagtgacatattgccgcgaggggtacagctcaccgtgtttttgcacgccagaaagactggtgcgggaatttgaatttgtttcttccgcgccggtcgccggcgaaaaagatatcgatcggattatgcgggtacagggcatcgagcgaattcgtgtcatgcgggaaatcatcagggagcgagggaacagaaaatgaagaatgcaccaaaccttaaaaagcagccggcggatctcatggaggagtcaatcatctttgccggcgccgatgcctggacgttcgccaaagcatggcaggaaatgaacccgattggcgacacggtgccgccggttgtgctggataaaaagcagctggcggagctggagaatatccgcattgttgatgatggccggctctatgcccgggtttgccgcggcgggcatctgaccgaacggcagataaccattctcgcgacaaagctggcggtggccggcgtggagcgcgcgcaattctactctgaaggttatcagcttctggaggactggacgccgcagctgccgcgcctcaaagccgatgcggaagccggcaaaagtatggtgatcggcaaaccgctgacggatgtaaacctccgcgacctggctgataacgaaaaggcgctcatactggccgcgcgttacaccggcattgcaatcaacgaaaacagcgagggcgtgtacgtctaccgcgccggcatttgggagaaaacgtctatgctcgagctgagccgcgaaatggtggctatctacaacgagaacaaaaccaacttcagcaagcgcgcgatcaacaacgttatcgacgccctgaaaatcgttatcccggtgatgggggagccgcggcggagcctgatcccctttgcaaacggtgtctacgatatggaaaccggcattttctccgaacacagccaggacaactggctaaccaatcataacggcgtgacctacacgccagcggtaccgggcgaaaacctccgcgaccacgcgccgaacttccataaatggctaagttacgcatcagatagagacgcaattaagatgcagcgcatcgctgcagcgctctttatggtgctggcgaaccggtacgactggcagctgttcctcgagataaccggtgagggcggtagcgggaaaagtgtctttacccatatcgctacgatgctggccggtgcgcataacaccgccagcgggaacatggcggcgctcgacagcgcgcgcgggcgggcgcagttcgtcgggaaaagcatgataacgcttcctgatcagcccaaatattcaggagagggcaccgggataaaagcgataaccggcggggatgccgtggagatcgacccgaaacacgagcaccagtacaccgccgttttgcgggcggtggttgtggccacgaacaacacgccgatgattttcaccgaacgtgccggcggcgtttcccggcgacgcgtaattttccagtttaaccggcgcgtcagcgaggaggataaagatcccgacctggcagaaaagatatccgctgaaattccggtggtggttcgtcggctgctggcgaactttgcgaacccggaaaaagcgcgggcgctgctgctggagcaacggaacagcgaagaagcactggaggtgaagcagaaaacggatccgctttatgccttctgcgcgcatcttgagcggctggctgattgtgcgggaatgatggtaggaaaccgcaatccgcctcactatccgcgaatttatctctatcacgcttacctggcattcctggaagccaacggtttcgacaagccgctgacgctgaataaattcgcagaggggatggaaagcgcgatgagggagtttaatcacgagtaccgtaaggaacggagagcccgtggcatggtgaccaacgttgaactttcagagagtgcggaagactggttacctcagacgcatcctgtagccggtcataaagaatgaagttcagataaatatggagaaaggtatacatggtatacatcgagagaataatttatatataaatcagtgaaataaaccatgtataccttgttttcaggtatacacagggtgtacatggtgttcattctctcattaaccatctgatcgtttattaaacagaatgatgtataccgtgtagacctgaaatcccaaaatgtaggctggtgttcataggttaatattatgttttataagcaatttatagcctttatgaacaccatgtataccttgagggcaaattctttaaaacgcatccattcatttcacgttgtgcatcccctcgatttcattaccatcatttcattacttgcaatgattgttgtgattgttgtgattgttgcgttttttatcatgtgataaccaagggggaagcatgaaaaaggaacacgtgaaacccattcttctgagcgctgctcaggttgcggcattaaaagccatccaggagcaggaacgccagaaatccgggtttggtatcgcaccatcaatccatgatgtggcgagaaaaatatttgatgttgggctatccagaatggaggtaagccagtgagttacgaaattaaaattgggcaaagaagcattgctatcactgataacgtttctgaagtggttgcgcctaatgagcagatggcgattctttttaaagggatggcgaatatttttggtgatctgcgggccgtggcaatgttagctgaggcggaagccgatgccgtagaggttatccgcaatgatccggatttaaacgaagcagcaaaaaaccgccgggccagagatgcggcaaatagagacacactcacggctttcactagaagtacggcgatgatcagcgaacaagctgaaaatattctcaattatcttaagaccaaactggccccagttgctccgttggccgagggtgatgttgtcggatttatgcgagatagcgagctacggaatgtatttcgctcgctggatggagctgcgaaagaaaagctgatggtagcaatgtatgccgggaatcagactgatttatgtgacgccctgctacgaggtaacgccatttgctcaggcgtaacagattctcagctggagcgactgacttttgcccgtatagccacagataacggagccgttatcaaatctgtttctaacctggtaaaagccattaaccgcaacctgcagcaaatcatcgctgttcgcacatggtatgcaaatctggtatttggaagcaatgacgaccctcgcgatgtggctcctcgagtctccggtctggcgaatctgtccgagtacattgatggtatggaaaaaattaattcccgacagggtaaagcagatgatgaagatgggaaacaggccgcctgatggcggctttttcttaactggagaatgctaaataacagaagtgaggaacggtaaattatgttattgagcaaatcagcctatgccaggcacatgggagtaagccgacaaacagtttacggctggatagcacgtggtgagattgtgctatcaggcgataaagtggatgttgaagcaacacaggcgaagcaaaattctgctggtgctggtgctggtgctggtgatcatcacaatgcaatgacgtgggcgcaggccgccgcgtgggtatgggggcatgacggcgggaaagagttgccggctgatattaatgctggccagcgaatagaggcagcagccgctgagctgggttttgatgttcagcacgagcccgatgaacaattgctgattctcttccggttggatgaagaaacccacagcttctatggcaaagatcacatggctggtggtctgcgtttcctgcgttccgagctggcctatgtggccgcaatgcatcccgacacccaagatgactggagcgatacaggattaaaggcactctgtctgctggcaggtgagaaactgtaaaacccccggccaaacctaactcctctaacttgacacttttcgtgaaaaacagggaaaagtgtcaacccaacctaacggatcctaacgcctacgaacagcagctacagtagaagtgtaaagggcttgcgttgagatttgttgagccttggctgttagtatctgttagtcctgccggcaaagtgtaaaccgcgccgctttagaaaacttcaggtacacgaactcgcgaaggggaggtgttaagcacttccccaatgcaaccatcctcgagcctctttcagatcgctgttctggtttgcccgaacgctggcgttcagattgagttgtcaaaagttgtcacccaccggcagcgccagtggggatttttggcagaacgcgctctaagttacagttgcttcagtcagtaatttagatatatttagaataacttttaaccattctaaagcttgttctaagcgaccaagttgattgtctctgatgatgtagagcactagaagtgtctcttagtgctcgaatcgtttatcgtgcatcatagctatgaaactctcatcataatgtcttgttaataattaacagccttatgataacgtcactttaaaataacgggatttgattaaatggcaaagcaatttatgttgatggaaccaaaaaatgagaattttaatgaattaatcggtgggcctaacaaatatatagtgcctagattccagcgagactatgcatgggatgtaggacaatgggaggatttatggggagatataaattctcttgatgatgaaggttttcattatatgggctatattgtcctacaacaaaaagaacagtatcagcatgaaattatagatgggcaacaacgcttagttacgttatcgattatagttctggctgcaatgaaagcgatcaaaactttaattgataacggggaggatgttcagggcaatactgagcgactcgatggtataactcagaattttgtaggaagtaagaacttcgttacgcttaaagtaattaataaattagaactaaatagaaataataaaagttattttcaaagaatgtcatctcatttagaggctcaaaactctcgcggtataacatcaactaataaattgatacgcaagtgttttgactttttctgtaagaaagattacggcaaaacaggtgcggagattgctcagtttattgcagatttttcttcaagtatgatttttacaaagataattgtacaagacgatcttaatgcctataaagtttttgaaactttgaatgcgagaggggtccaattgtctactccggacctactaaaaaactatttgttttcaattgtgacgaaagatgatcaaatcggagaagaagagctcaacgatttggacgagcaatggtcagaaatgattgttcaacttggagagagcaatgtttctgattacattagatatcactataattcacagagaagaatggttactaagaacaaccttttttcctcaatgagaaaaatattaacgaaaccggaagaagcgtatcagtatttgaagtcattaattgactactcacctatctatgcatcattgatcaatcccaatgatgcatggtggggggatcaagatgtgaaatacagaaatgtattgcactatcttaatggtattagattatttaatatcaagcaaccactaacaatattcctcgctgcctttggtaatttttctccagaagagtttgttaagctcgtaaaatatatatatatattatctattcggtataatattatctgccatttatcacctagtgaacaagagaatatttataatcaaatcgcgaacaaagtttataatcgagagttcttaagagctagtcatgtgaaaaatagcgaagaatttaaacgtttgtatcctgatgataatgctttctttaatgcttttgaatttcatagaatgccaagtagacaaacagcgaaaaaaatacgttttttactttctgaaattgaaggctatttaggtaatccatgtgattatgaaaaaacgacattagagcatatttgcccttatcatccagagaaagattggaacgaatcttttggtgaaggaattaatgatgtaaaagatagacttggaaacatgatcttaatggataaagataatttaaaacgctcatcctttgaagagaagaaaaaagaatatacaaaatccggatataagttggccttaaaagtaacagaatatgcagagtggaatttagaatctgtcaatgattttcaaaagtggatgtcacaacaagcagttaacgtttggaaggttgattagtctctgtaaaaacatcaaccgtgctggcggactgtctattaggcagcccgcaacattttttactgtcagagttcagacgggatctgattgggggtacttttgggggtaccttagaaaacttaatgaatataactcactgaaaatcaattggatgtttagcgatgttatgttcctattatcgcaccatttcaacttcccccaacttccgtatttatccataactatcctgatttataacgattttactgctttttagtccatcgttgtccgtaactctccagtaaagtccgatacttaaggtatttaggattatgtatatgtccttgttcggtcctggattcctatacacctgctttttaatgagatgcagattcgctgcactaagtccgaagataaaccctatactcttggggatcggcaaggcttgtcattgtttatagaacctaatggaagcaaaagctggcggttccgctatcgctttgtcggtaagcctaaaatgatctcgcctggtgtgtatcctacgatcacacctgcagacgcccgttctcgtcgtgacgatgcccgaaaactgctcgcggaaggaaacaacccgagtaaagttcgaatagagcagaagatcgctttgcaaacggaatccgaaagtgcgttcgaaaagatagccacagagtggcatcagatgaagtccgccaaatggtcggcaggatatgcatcagatatcatggaagcgttacagaacgacattttcccgtatgtggggacaagacccatttgtgaaataaaagcgctagaactgcttaatgtgctgcgtaaaattgaaaaaacgcggggcgttagagaagatgcgcaaagtacgacagcgttgttcagaagtgtttcgttatgcaattgtaacgggtagagcggagtacaatcctgcggcagatctttccagcgctctcgaagtacaccaatccaatcatttccacttcctaaaagctgattagatacccgaatttctgcgtgccttagacagttacacaggcagtcggcttgtacaagctgctacgaaattactcatgattacgggtgtgagaaacattgaattacgtgcagcattgtggtcagaatttgatctagataacgctctttgggaaatcccagcagaaaggatgaaaatgcggagggcacaccttgtgccactatcgactcaagcgttaaatttactcaatgaactcaagattatgacgggtaagtatcgttatgtatttccgggacggaatgatccgaacaagcctatgagtgaggctagtatcaaccaagtcataaagcgaattggatatgctgggcgcgttccagggcacggattcaggcatacattgtcaacaattttacacgaaaaaggatatgagagggcagagattgaaatgcaattagcacatatcgataagaacaatattcgtgggatttataatcatgctcagtacttaaatcgtatgggggaaatgatggattggtactcatcatatatttttcaatgctagccgggctatcacccggctaaaatttaaaaaggtaaatcatctacctgaacattaacttgcacattatcggatattttaacttggccagacattctgtctgcaataccctttaattgttctactgtaaatctcggttcagaccatccctcagaaaaactcacgttctctgaccgaggtcttctatcttccggtagaaaattaattttaattctagatggtaatgcagcggcttcgccaacgaatatacattcctgctgagataagctaggcaaagacgcgactaaacctgaaaggccatccggtaaaaatgttgagacatgctgttgatccgtcgcattcgttaatcttaacacaacccatgagccgcattgggaaatgacagtgctttcaatatcagctggcctttgactgattaacattagtcccaaaccatattttctgccctcacgcgcaattcgccggattgcggattgtgcagctgcgtattgggcttcaccatggttaggaacatagcggtgagcctcttcgcagactagaagaaatggatctttatttctttcagatgctgtttgatgtattttatattgaaatagtagcctggcaagtgttgcagctaatgggccagcgacttcattgggtaggccagatatatcaatgattcgtatatctttatatttttcttcaataatgatttcgccaactagctggtctaatattttctcaagattacagtcattcttcggagaccagttttccatcatgaatttaattcttggatctcgtcttaatactgataatttatctaaaattgatttaaacttctcagcaaatgttgattctgtttctttttctattttccctgattttactctggctgcttgaatgtatcttatgtgattttcaaattcatttaaacaaaacggaattggtttatcagagtcaaatgaaagtatttcttcaatagaatgcccttctgtcggcctcggttcatctagagcttgaccatctgtcggtagaggccagttatagttatctggcgcatgagttgtaattccacacgtaaccatcctggcatgagatagcgctttgtatataatattgttttgggacgttgcttctttttcagttttgccaattattaatgttctaaactcatcacttgacattagccagtatgggagttttatgttttttttactttcatcattttcaagagcactgtaagcttgataagttatccctctatctttaaaggctaacccatattcatcatgcgggtctatcattacaattcgaggagataggattttgccctcaatgcttgagtgttctaatatgctatgaagaatagtggcgacagcaccagattttcctgatcctgtcgagcctaatactgcacaatgaagtccaaataatttgtcaatatttgccctacaaggtattgaatttgcacttgaatagtgagcgaatggcactaaagggttacacgagttgtctcttgcaccttctgcagcactgaagagctctgctgattcagaatgagttaggagataaacgccctgctgaggcaatggatatatttttacaccgcggttgaatgttaatttctgatttgatggcgaccagtaaccgtgcgagaacaactctacctccatgatacgttggtctgcttctggagggattggtagagagttaggttgtaattcatccgatctcattcttaaaagagttacaaaaccaaaaatgatatttcttccgaagtttatcttaacaatactacccagttgtcctattgcataaactttaccacaataacttctagtcaactcttctacattgctggacagttctactcttatttttgtaccggtcacttctactacgtgccctatttttaactcttctattggtttgaatttcatcatagaaccccttcttttagaactttagtcatcccagaaaaagtccaccaatcatcatattcatcctttctcttaatgggtgatttacttcctacataaagaccattttgggttgcaacataaactctttccccccaatcactgcatctccaaacatcaagcacttccggtatcttgttatcaacctcctcacaaaatgcaagcaggaccgttttattattaggattggatagcgatagattaatttcttgattgatatgctcatctccaaaactataaccacaaacaatcaatacatgataggataatgagttcagcgattttctgagtaaatcaaattgtgcagaaaagggatctttctgagttgcaatgtactttgtagattgagggtagattaatactctattgtttttaataggatatgtatcccggtctcttactctccacaaagacccatcatcattttgaaaccaatctattgaaccatgcattttaattatgtgagcctttgcatcgttcataggttcaatttgtccatattgatatgacctatacgcaacagcaccaccactaaacccatcccaatatggtattctatttaatgccaaagcatcttcaagtaatgtgtcataattcgttgtgaataaccgtattggttttcttcgttcatttataccagctcttaaactataaaaaatagtattaatgaagttaaaatgctcttttatatcgactatgaaattatctttatcaccaatgattttttcaggcttttctacatagccgtatcgtattgtatcagcaatatatttaagtattttattatgaattttttcaatgcaatctaatgtgaaattttctttgcatatttcaatttctttcttcaatgtgcgagaagcaattgcagagtagtcacctaagtgactaagtatatgttctatatggaggtttggtggaagttctgattttatttttgttataagatttacggcctcggcatcctcttggatcaactccataatcctcgaggtcagggggtacattaagggaatttttgcggaataacttatccctgcaccaagcaaccagttttgttcggggcagttcagtaattcctgaaattgctctaagtcattttctatctcactgtttttcatgggcaatccttttttgtcgctcattccgattttcagtttttgacgtcggttgacgtaagggattaaggggagattttcagatgtatcatactgatggacagataaaaagcgtcaaccaggggctttgtggggtggttaacattaatcgatgtgaatttaatatgctcggaataatcactgatattctcaagcttctcgactaaaagagcttagcgtgagcagccccggccgactgcccgcttcgcttaacagactggttttcatgcactgaacttgggtcagggtcacctgtttaacggacgacgtttccgggcgctgactgtagtggataattttagtcgggagtgtctggcgatccatgcaggaaagtcgctgaaaggtgaggatgtggtcggtgtgatggaaaggttgcgggtgctaggcaagcgcctgccggtacgtattcagacagataacggcagtctgcgggatgagtgcctgaacattcactggtttctctcgctggaagatgcgcaggacaaactcgacaactggcgcagggaatataatcatgagagaacgcattcatcattaaatgacatgactccggctgaattcatccgaagtctccagaaagacgaagatctctgatttagcactgcactgaattttggccagggtcaggtaattaaaatttatacttattaagaagatctttataacgttcgacttcttttgaataccatttgagactccatgaccagccatcctctctgggtttacaatccgtgcagttatcacaatttgattgtttgaaactattaccgaaatcatagctaccagtactatcatataattgacttaataaatttccggttccttgtgcatgtcggtgttttaagcagatcaaaagatgcataccacctagagaatgcattcttaatgattgggcaaatactccaccagggcgataatgaacaaataaatactcacaatttttcattatatttgtggggtcataattagcaaatccaattttaaggaattcatgatattctccttgtgggtcatcaggatccattcctagatttttggccatactcaagaagtattctttttgctcttcagttgtaagatcataaaaatctttttgactgtcaagacggataacatgattctctatttctgttagggcttcctcaaaatcaggaaaagttgaaagaatcatcttccgatggggttgggttgctttagggttttgttttagtaaggtggcagtaaggaagtataatttttcaattttttcaatatcttttgataatacgcaatatgtcattactaataatgacattctttcatgccaatcatctagaaaatcaattgtttccttcgaaccccgtgcttcatggattcctttgaatattaaaatagacgcatagatatcaacaaaaaaatctgcaagtatgtgatattgctggtttcttgtcatcctgttacataactcaatgatcttttgtagggatatgcagcagtctctatacattatttgagtttgatcattgaaaatataacgctctaaagatttttcttcaaagtgattgacggaatgatgggtcgcatgaagctgatccaactgagccttaaattttgctttccgtgatttaccaaaagcaattaatctgtgaatccggcttttttgctctctagctaataatattaaatgttggcaaatataaaatttttctctgtaaatttctcttttaatattagtataaggagcaatttggaatgcttgtaagtaatataaaactgctataaatctatcttttgcaggaactattggtgaatgacttatttcggtagagcgtttaaaaacagcatcatatttcctttcagataaaagattatccaactgctgatgatacgctttatataatgcttcacctatatcttcaattttcttatcgagagttgaagggctaatgattggatatctgacaacagaatctttaagtcccttaatgttcaagtaatcccaacaatctatggctgcgtctaatattttatttgctgatgctatgtcttttctgaccagtgtattttcaattgggatatgaacttgaactgtatcattctgattagattttgaagctttttttcttaatatcgcattgtttgttattgggagccaaaatattttctctgacgtaatctctaccacaactaaaataacaggcactttaaattcaaagtaatatctcaaacgctctgttttgagagtaaatgataataagctattgtcatgaataaaggttgagttctcttcacctttaatctgaactttgaaaacactctctttcccaagagctttgccactaccatctttgagttcaatttctccatcaataccaaaatcattttgatcctcttgacttcggaaaatccaatggcttggtaagttgtattcaaaaatacgcccggcttcaattccaatctctcctgcgttcatcaggcccctcaatcttgtttttttcttgtggtcttatagtaccatgctcatacaataaaacagtatctcacctatagccattgctcttacctccactaagataatgcggatggtagcaatatcaatccagtgttaggctcatgcttctgttgggcacgccactgctagacacaatcagctattgtgcggcgtgttcaaaaggagctctcggcaagtaataatctctcactacgaacacaaaaaatccattgggagtatcaacaaagatgaaacaggtaatttttattaataatcaataaaatagtgcataggtattgttcctattatcatcaatcaaaacgttacagcccccctaaagcttcactgtaatgacttcccctggcgtcgtccccctaacctcaatgtccatatcgctgagccagagcatcaaaactgtcgtcactgttcagagagagaagccccatggtctcagaaatgtcgggattatccgtggctcatagccccgttaagaaagtggctcgtctttataatattttatatccagccctccctcttcaaaccgttaatccagtaatttcatctccagcgcccggctcatcgcttgagtgcgactattcactttgagcttcgcgtagatgtttttgatgtgccatttgaccgtctcggcagaaatagcgagggagcgagcaatttctttattcatctgaccttcagcgatcagttgtaatatctgaaattctcgctcgctgagttccccttgaatatcggggcttccactattaaacggtgttccatctgcaggcgcgcgcttgtcggcccagggttcatgcactcccccttcctctttaccagccgaagaggattcattcataccggcaagcaaaggttgcaaggtatcgccagcgtcaagaaagaggcctttgagatgctggtgttcagccagctgcacgactggctgaaatgttgtgcgcgcagcggcagttttgccgctgctccacaaggctaatgaccagagcgtacgcagacgcgctgcggttaacctgtccccccggttttcctgatcagagaccatgtcagccaggagaatacaggcttgcggcgcctggcctctggcgagaagaaggcgacagtggctaagggatgcatacagaacgatagcgcgttgacagggatgttcggcatccattcggaagctggcggccatttgttcaagctgtcgttgcagttgctctgcgcctgtgaaattgccgtgctgcagtcgcactctcacctgctcggctaacatcatggcctggagccgttgccagccgcgagacacggcaagacgctgcgcatgctccagcaatcgctcggcctcatacggcatatcgccatccagggcctgacgcgcgggataggtatagcaacgactcagcgcatcgggtggactgaatcggtcgatgaattcgagccggtcggctaacagatgatcgggcgagtcaccactctgacattcataggctatctccgccagcagcggcgccagcgtcgcgccactggtcgactgggtaccggtataacattcagcctggcgcaacgttttctctgcgtaccacccggcttttcccagatcgccctgacaaagatggcactgggcaatgataaacgcgcgataaaccgagacaaacagattatctaaaggactttccggagagggcatatgctgttgaacctccagcgcgtcgtgatagcgctggttaacaacatggcaatagctgagaatattgcatatcagaccatcaacccaggtgtcgccgcagggcacttcggccagcaacggctgaactatagccagactctccgggatgttttccgcaaaggcttcgcaaattgcccgcacaacgcgcaatttacaccaggtgctgcgggttaaatcatcgcgatgatgcagtaccatctgatcgaggttatcaagcaactgcctcgactcatcaaagtggaaataatgcgccagtgcccaggccaggttaatttgcaggtcaatgcgcgacggatcggtgctgggcggtaaatgatgcatccatgaaatcagggtatcgatatccccttcttccgccagtgactgagcgcttgcgccgtcctgcacggggctatgcaccggcttgcctgcgctgagcgcatggcgtaccgcctctgaccacagcttctgttcgacgaaccactgactggctaattcatgtagctgtttgcggtcaatatcgttgttctgctgcagcatggtccgaagattttcctgcaacagaggatggtagcgaaaccagtagccttgttcgtcaagggctgacaaaaaaaggttgtgtcgctcaatccatgccagcatcgctttactatcatcacgtccagtcactgcattgcatagttcggcatttaaccgactgaggaaggacgttttcaccaggaaatcgagaacctcttccggcagcggatccagtaccacctctttcagatagcgggcaatggatcgtgttcctccatgcatattacgcaacagatgctcgggatcattctgtaattctgccgacaatgaagcgatcttcatgcccgcgatccagccctctgtcacggactgtagccgctgtgcatgatggttgctgaggggtagcgcaaccgtgcggctaaaatagtgttttgtttcttcgagcgtgaattgcaggtctcgatcatagatctccaccagttggtcctgggcctgcagctggctcagcgcaagattcgggtggaaacggctgccaatgatcagatgcaaggcggcaggcgcatgcttgattaaataccccagcgcttcatagaccccacgatcgttaatcacgtggaagtcgtcgataatcaggtacacgtcatgcgggcagtagtgtagctggttaatgagcccggccagcagttgctcggagctggagagcttctgctcttccatgtcacgccagaaatcggcgtcccagtcagcatagagtggacgcaatgcttgcagcagataaggaataaactgccatacgtcatcatcatcctcatcgaggctcagccaggcaatacgttcgccctgggcgaccatctgctgatgccattgcgccaacagcgtggttttgccaaatccagcgccggcgcagacgacgcccagccggcactgctgaacgggactgagaagctgaagcagccgggggcgctccagcaattgtattgaggagcgaggcgggacgaatttggtcaggattagcggcaagcctcgcgtcagccgcaatggcccggagaccagtgagggtgattggcgaccttctaaatccaatggcttcatccgtggtgtctactcgctttgtttttttcaattgtacgccagcccccgggatgacatggggcagccaaactttattgctacacaaaatttagaaagtttgacctcaagcatgaaaacccccacctacccccccatgaaggtggcttcgcactccctttaaccgctcgtagattcattgcatgggtgtggccagggttatccgccctgtctgttggccccgcctgggtgacctttattgaggagaattaaacgatgctcagcaaacaggcgttattgcaggcttaccgcaagatgcgggagatcagaacatttgaagagcggttgcatcaggaaaataccagcggtgatattccgggcttcattcacctttacaccggtgaggaggccatcgcggtgggggtctgcgaaaatttaacgagcgcagattttattggttcaacacaccgtggacatggccactgtattgctaaaggttgcgacattcacggcatgatggccgaaatattcggtaaggacagcgggttatgtcgcggtaagggcgggtcgatgcacattgccgatctgtcgaaaggaatgctgggggcgaacgctatcgttgggggagcccctcccctggccatcggcgccgcgctaacgacaaagacgctaaaaaccggcaacgtcggtgtctcttttacgggcgatggtggttctaatcagggcctggtctttgaagccatcaatatggccgtcgtgctccagcttccagccgtctttattttcgagaataacggttacggcgaagggaccggccatgactacgccgtgggtgggcgtgatatcgcccggcgcgccgctggcttcggcctgccggcagtgaccgtcgatggcaccgatttctttgccgtttatgaggcaacctcagaggcggtcaagcgtgcgcgagaaggcggtggcccaagcgtcattgaggccaaagccttccgctggcatggtcattttgagggcgatcccgcgctatatcgtgcggaaggtgaagtgcaacgcctgcgtgaacaacatgatccgctgaagattttcaccgctaaggtcaagcaacatatcacccaggaagaactggcggcgattgacgaggaagtagaagccctggtcaacgatgccgtattgaaggcccgcgccgctgcctacccggctccggaagacctgctgacagacgtgtacgtctcatactgagggtgataaccatgacaataaaaacctatcgtgaagcggtcaaggaagccctggctcaggaaatggaacgcgatgaacgcgtggtgctcatcggtgaagacttgcgtggcggtcatggcggaaatgcgcccgaagaggcgaaaatagaagcctttggcggtgtgctgggtgtcactaaagggctgtggacgcagttcggctccgatcgggtgatcgacacgcccattaccgagtcggccatcatcggtatggcggccggcgccgcagcgacgggtttgcggccggtcgcggaattgatgttcatggatttttttggcgtgagtcacgatgcgctgtacaaccaggcggctaagttccgctacatgtttggtggcaaagccagagctccgctggtgatgcgagggatgatcggcgcggggttttctgccgcagcccagcattcacagtcaccctataatatctttgccaccacgcctggactgaaggtggtggtgccctcgacgccttatgacgtcaagggtctgttaatccagtccattcgcgacgacgacccggtggtattctgcgagcataaaatgctgtacgacctcaagggcgaggtaccggacgagatctataccatcccgctaggtgtagccaactacactcgcgaaggggaggacgtcaccatcattgcgttgtcggcaatggtacataaagcaaaccaggtggcggacaaactggccagagaggggatctcggtcgaggtggtcgacccgcgaaccatttcgccgctggatgaggaaggtattctggaatcggtggcgtccacggggcgggtcgtgattgtcgacgaatccgctgcacgcttcggttttgctcatgatgtcgcggcgctgattgcgtcccaggcattccatttcctcaaagcgcccgttctgctggtgacgccgccacacacgccggtcccgttctcccctgctctcgaaaaactctggatccctggcgttgaacgtatcgaagccgccgtccgtcaagtgctggaggattaacctatgagcgaaatcaagacgcttgaaatgccaaagtgggggctttccatggaggaaggcttgctcgctcgatgggcaatccaggagggtgacgatttcaccagagggcaggaaatctgtgagattgaaaccagtaaaatcgtcaatgtgctggaggccccctttgccggtacgttacgtcggatactcgcccgcgagggtgagacgcttcaggtaggcgccgtgctggccctggcggctgacgcgtcggtcagcgatgctgaactggacgaatttgttgcccgcctggcgacggcgaaacccgcagccccaggcccggaggctgccgcgccggacgtagcggcacaggcaggcgctaagccagcttccgttgtttccccgccatccaacagccccgagccccctgttgggcagaccgtcatccccgtcagtctgcaaggcgtgaccgatgtgactcaggttaatgccacgccccatgcgttacgactgtctgcccgctggggtgtcgacctgaaaaaagtccgcggcagcgggcgcggggatcgtatctctgtatctgatctggaaagcgcgatcgttgccgccggcggtcgcctggcctctccgacgcctcccgttcgtcgcagcaaagcgccccgctcgcatgccgatgatagccaggtatcggccaccccgctggcgcgccgtctggccggcaaactgggtatcaacttacatgactgccgaagcagcggttcacgcggtcgggtgagtcgcgatgatgtgctggccgcggcgttgttactcgacgagcaaccgcagaccagccctgtgcaggagagtgccccggcaccctttgagagcatcccgatgtccggtatgcggcgggctatcgcttctcgcctgcaaacgtccaagcaacagtctccccatttccgtttgagcgtcgatctcgatctggagcgactgttagcgttacgtcaggacattaaccgcgaagtacccggcgtcaagatttcggtgaatgacctgctggtgaaggcctgcgccctggcgctggtggccgtgcctgacgtcaatatccagtttgatgaagcggcacaaagtatccgccgctttacggatgccgacatttcggtggccgttgcgctgcctgccgggctaattacccctattgttcgctcggcgaaccggaaatcgatcagcgacatatcgaacgaaattcactcgctggtgaccagagccaaagcgggcacgctgaagccggaagagttccagggcgggacctttagcctgtcaaatctggggatgctcggcgtccggcagtttgacgccatcatcaatccaccgcaaagcgcaatcctcgccattggcgccggagaggtccgggcggtagtacgcgacgggcaaatcgtcgcgcgccagcaaatgacggtatcgctatcctgcgatcaccgggtcatcgatggcgcggcaggtgcggcttttctccgggaactcaagcgactgattgaaaccccgaccttgatgtttatccaggagacgagctatgcacgataaatacgatgtgctgatcatcggcgggggtcctgggggatacgttgccgccatccgtgccggccagctagggcttcgtaccgtattagtggaaaaacaacatctgggcggcatctgcctgaactggggatgcattccaaccaaggcgctgctgcatggcgctgaggttgcgcacactatcacccatgccagtcagctgggcatcagcgtgggcgaggtgaacgtcgatctgcagaaactggtgcagtttagccgtaccgtatcgcaacagctcaccgctggggttgcgtacctgttgaagaaaaatggcgtgcaggtcattgatggcaccgcgcggctgcgcggcaaggggcaaatcacggtcgaggatgcccgaggggaggcgcgcgattaccgggccgatcacgtgatcctggcaaccggcgcccgaccacgcgcattgccaggcatagcgccagatggcgaacatatctggacctatttcgaggcgctgcggcctaagcttttacccaagtcgctcttaatcatcggttcaggggcaattggcgtcgagttcgccagcctctataacgatctgggctgtaaagtgacgctggtcgagctagcgtcgcagattttgccagtggaagatgccgaggtgtctgcagcagtgcgtaagtcattcgaaaaacgcgatattcagatccatacccagaccctggtgacgcaagtacagctcaccgataccggggtgcgctgcacactaaacaacaccggcggcgaatattctcaggatgtcgaacgtgtgctgctggcggttggcgtacagccgaatattgaagatctggggctggaagcactgggcgtcgagttagaccgcggttttatcaagacggacgcggcttgtcgcactaacgtattcgggctttatgccatcggcgatgtagccggcccgccgtgcctggcgcacaaggccagccacgaaggcgtgatctgcgttgagacactggccggtgtcgaaggcgcccaccctctcgatcgcgactatgtgcctggttgcacttatgcccggccccaggttgccagtctgggcctgacggaatcgacggccctggccaggggacggcccgtcaggatcggtaagttctcttatcagagcaatggtaaggcgctggccagcggcgagacagagggttttgtgaagacgattttcgatgctgaaaccggcgagttgctgggcgcgcatatggttggcgcacaggtcacggaacagatccagggctttggcatcgcccgtcacctggaggccacagacgaaagtctcctgtcgatgatctttgcgcatccgacactttccgaagcgatgcatgaatcaatcctcgcggcctgcgaccaaccgttgcatcaataaaaaataagggaggcgatagctgtgcgatacggagtaagttcccgttatccctcccgcactccccggcagaagatccccaacaacggttacggcaggatctattgatctgaaacgctaagcgccatgcgtaaattctgtatgtttagtagacaaccaaacgacaggaggagcgctctatgacacagcacgaaaggttttgccaggcctgcggaatgccgatgtccgcacccgatgcgcaaggggccagcgataaatattgcgcgtattgctgcgacagcgacggtaatttgaaatcctgggaagaggccgtatccggtctggcggcttttctcgacgcctggcaaaaggtgggcgtagcggaatcacggaaacgggcaaaacgttacctgacggcgatgcctgcctgggcgcacaaagcggacgagtaatttgcccgggcggctagaggaaatcatcccggggacagaccgccatgccgacaacattgctatagcgttttcgtacgccatccggacaggaataaatgcgcgtttggggatgacgacctgaaggctggagcatgcatggatgcgttcttcatgcggatgaaataaacgcctggcgttctccccttgtccggatgcgttattgcctggtttttaaggggtcggtttctgtatttaacccagaacttctcaggtaatacaacatattgatgtgatgaatctctcatttcaacgataccaactggacaataagttatcgcgtgtgttagttatttaatcacgcaagagaacagatttaatttaaacaaaagttaaacctttctcactttgctaaaaaattgtattgataatgctttggatccctgaaccattatcaaaagggtatgtgaacagaaagccctcagagacgcgagtctctgagggctttttttttgtttttttatctcaggagtaaacaaatgtctaaagaacgtcgtctctcaagaatattcgcaaaagacggtaaatccgtgaccttagcgctggatggctactatttttccacgaaaacaaatggtattgataatacgataaatcagctccctgctctggtggaacacggcctggattgcgcgcttgtcacgtacggcatgttgaagaattatcgggaagcactgaacagcgttcccgttgtgttacgcgtcgacagcacggtcagtatctttgacaataccgttcccgatactacccccgttttttccgtcgaagatgcgcttaaagtcgctgccgagggcgtggtctgcatgaccttccccggcgccttcaatgaagaaaaaacccacattatggcgatgcaactcgcacaggcagcggatcgctggaatgtaccgctgattgtcgaatcgctcccgtatggttatcccgtcaccagcgatgactctaacaatccggccatcatcgctgcatcggcccgcgccgcggtggagctgggcgcggacgtcatcaaaacgcgttttaccggttcaccagaggaccgactgatcgttgaagctgctggcgtgccggtgcttgccttaggagggccaaaaaccggcatcgacggttacttcaaatttgttcagcactgtatgcagatgggtgcgaaaggcgttgctgtgggaagaaacattacccaggatccgcagccggcgaaagtggtagcaggtctgaatgccatcatccatgaaaacgcaacagcggaagatgcatacagcctctacatggctaaataacatcggaaattaatatgatttcaaataacaccatcatcccttccatcaggaagtataaatactttgagaaagcattatcctgccagtcagaatatgtgctgctatccgaagcgaatatcggcaatctgcagtcgctgattggcaaatgccatcaaagcggtaagaaggtcctcgttcaccttgaattactgggcggctttaaaccggatcaggcggggatcaatctgctgaaaaattattacaaggttgatggtgttatttcttccaatctctccgcgctacgctacgccaaaaaagagggattgctgaccgtatatcgggttttacttatcgattcgcgatcgcttgatcagtcgctcgatattgttaaacacagtccaccggacgcaattgaaatcttacctgctgaatatgcctgccagtgtctggagttgattagccgaaatttgaaaggctttgatgtggtattcatcgccggaggctttgttaagcgcaaataccttgtagataaaatattccatgccggatttaaagggataaccaccagcgagcccggcttatggtaaccaataaggagtccacgcgaatgaaagatgaatacgtcatgggcatcgacaatggtggaaccgtcaccaaggcagccatctatgaccgtaaaggacaggtgctcgccatcgcctcaaaatccacgcagatgctgacacctcgggaattccacacagagcgcagtatcgatgagctgtgggccgcgaatgtcgaagtgattaaaaaagcgattgagcaatcaggtatcgacgccagccagataaaaggagtggccgtcaccggtcatggtaacggtctgtatctggtcgacgaagaaggtcacccggtgcgtaacggcattatatccaccgatagccgggcaaaagagtacgttgagagatggcaacgctcgccagaattccttaccgacattttgccaaaaacgatgcagtccatctgggccggacaacctgtcgccctgctggcatggctgaagaatttcgagcccgagacgctgcaaaaagcgcgttatatttttatggtcaaggacctgatccgtttttacctgaccggagaggcttttcttgagctgaccgatatctcagggaccaacctgatcaacgtacgtgactgcaagtatgacgatgaactactggcatggtggggacttgatgaactgcgggacaaattgccccccatcaaacgctcaacagaatgctgcggaaaaatcactgacgacgtggcccgtctgaccggtttatgcgcaggtacgccggtttctggcggggtgtttgatatctcggcctcttccattgcctcggggattaacagtctcgataagatggcgatcgtcaccggcacctggagcataaacgaatacgttaccgaccacccggttattgataaagatctgtttatgacctccatttatcccattgaaggtaaatggctcatcaccgaggccagccccacctccgcgagcaacctggagtggtttattaacaactttatggagagcgatcggaaaacctccgccgaacaaggatcgtcggtctatgacctgtgtaataagctggtttcatcaacgacgccggatgaaagccacctgctgttctttccgttcgtgtttggctctaacaccattcccgacgcctcggccggctttatcggtgtcaacagcttccataaaaaagcccattttctgcgggcgatttatgagggcgttgccttcagccatctctaccacaccgagcgcttacgcaatattaacccgaagctaagccgcactattcgtattgctggcggcgtcacgaactccccggtctggctgcagatattcgccgatatcttccaggccacgctggaaatcgttgacgtcaaagagcacgggaccctgggtaccgcgatgaccgccgccgttatggtgggctggtttgcggaggtatttgctgcctcaaacgacatggtccatgtctcacgcaccgtctcccctaatccggaaaaccaccgggtctaccagaccaaataccagctttataaaaacctgttatcagaaatgcagtcgccgtggaaaagctgcagcaactacatcgcgcactaagtgaggaaaaaatggatctgaatttaacgaatcgtacggccatcgtgacaggcggcgcaaccggcctggggaaagagtttgttctttctctcgccaaagaaggcgtcaatatctgctttacctatatgcgtgaggaagagcatcccgaacggctgatcgaaacggtgaaggccagcgcgaacgtagagatcatcgcggtcaaaaccgatctctctgacgaacagagccgggaaaatctgtttgccacctgtatcgacagactgggtaaagccgacattctggtgaataacgccgggatctggctgagcggctacgtcaccgagatcagcccgcaggactgggatctggtgatgaatgtcaatctgaaagccatcttccatctcagccagctgtttgtaaatcactgcctgcagcatgaccagatgggcagcattctgaatattacctcgcaggccgcgttccacggctccacgacgggacatgcgcactacgcggcaagtaaggccggcctggtcgcctttgctatctctctggcgcgggaagtcgccaaacaaaaaatcaatgtgaacaatatcgccgtcgggatcatggatactgcgatgatccgtaagaacattgagcaaaaccctgactattacgtcagtcgtattccggtgggccgcgtggcccagccgcaagaaattgccgacatcggtgtcttcatggtttctcctaagaccagctatatgacgggagcaactctggacgttaccggcggtatgttgatgcgttaatctagggagaatcattatgaaatgtctggcaattgccgatctgtttatcaatgcagcgatgatggaatcaggactgaaagcgctcagggataacgggattgaagtagaagtacgcgagtggtcacatggctccgttgagaaacttcaggaagataatctgcgggttgaacaggaaggagcagaagccgtggccttaccggaagcgctgcttcagggaacggatgatattgacatcctgatcactcagtttgccccggtcaatactgcggtgttcgataaactaccaaagctgaaatatgtaggcgtgctccgcggtggtgtggaaaacgtgaatcttcaggtggcgaacgcccggggcgttgaggtgatgaacaccccggggcgtaacgctcgcagcgtcgccgaattcacggtcggcatgatcctggcggaaatgcgcaatattgcccgttcacacgatgccctgcgtgacaaatactggcgtaaagacagcccgaaccatcaggcaatccctgagcttggcggaaaagtcgtggggctggttggcctcggtcatattgcccaactggtcgcgggatttctcagcggctttggcacggagattatcttttacgataagtacgttgcaggccatgaacgttatgagaaagtcgattctctggacgaactggtacaacgcgccgacgttatctcgttacatgctcgcctgacgccggaaaccgaaaatctgattaacgcacaccatttcgcgctgatgaagcgcagtgccatcattgttaacacagcacgctccgggttaatcaatgaaaaagagatgattgatgcgctcagatccgggcaaatcatgggcgccgcgcttgatacctttgatgacgagccgcttcctgacgacagtgcattctatactctgaataacgtgactattacgccgcatattgccgggagtaccattgacgcattcagtaattcgcccaaactcttcgctgagatccttttaaagaaactcagttaaatattaaaagaaccattaaaggtattaacagggcccaatgggcacgggtttactcgtgcccaattcgcccgccttttaaggaatcattatggatattatcaacagcattattagtctgggggcatcagtaatgatgccagtaatattctttattatcgcgctttgctttggcgttaaaatcggtacggcatttaaagcagggatgctggtaggcattggttttgaaggggtggggctggtgattggcctgctgctgacaaacctgggcccggcatcgcaggcgatggttgagcgtatcggcctgcagttaacggtcgttgataccggttggcctaccgcatcgaccattggttggggttcgccgctgatgctgcccgtcgtggtgggctttatcgtcatcaacctggccatgcttctgttgaaattaaccaaaacggtgaatatcgatatttttaactactggattttcctgatcatggggtctgtggtctatgccggaacgggaaattactggctttcggtcggtattacattcgctatttttgtgttgacgctattggcggcagatttaacggcgccgtatttacaaaaaaactataatcttaaagggatatcattcccccatcttacctgtatagcttacgtgccgtttggcattgcctgtaattacatcattgataagatcccgcttatcaataaaatcaatttcgacccggaaagtattaataaaaaattcggcgtttttggcgagcctgttaccctggggtttgtgctgggactgctgttggccttcctggctggatatgacgtttccgcggccgtttcactggccattaaggtttcagccgccatgctgctgctgcctaaaatgattgaaattctggtgcagggattgttgattgtccgtgatgccgctgaagcaaaactgaaggctaaattcccggggcgcgatttttacatcgggatggatacggcgttactgatcggtgaaccttcggtactggcgaccggtctgctgttaatccctatggctgtggtgctgtctatcattctgcccggcaaccgcgtactgccctttgtcgatctggcttcattaatgttcctgctggcaatggtcacgccgttctgtaaacgaaatatgttccgcatgttcataaccggaaccctgatcgtgacctgcatcctgtatgtcgggacggacatttcgcaagaatacactcaggcggcggtgaactcgcatattccggtgccggaagggatggccgagatcaccaatatcgtcggcggcgccacgacgcctgtcggctggctcgccgtcaaatttggcgagttttttagcgccacaccttagtacaaggccactcaagtaaacagagggcaaactgttgccctctgtttcttcctcttattctgtgcgctgaatagctggctcagctacgcccctggtttgaacatctgaccagcgcgtccgccccctgcgcggcgaggtggctcatttcttttgtaccccctcccgttttcaacccaacctgctatgctccttctttccctgttctctggagatcccgatgctgaccatctggggccgaaaaacctcctctaacgtgcaggcgctgatgtggtgtgttggcgagcttgggctggactatctccggttcgacgtggggcatcgctatggcggtaccgacagcgaggcgttttatcagctcaatcccaatcgtacggtgccagtgctgcaggatggcgataatccgccgctgtgggaaaccggcgcgatccttcgctatttagccagtcgctacgccgacgacgccttctggccgggcgacctgctggctcgtactgaggttgatcgctgggccgagtggtcaaagcagaatatcgccttcgcctttaccgcgccggtgtgccgccgcgtggcgacgccgcctgccgcccagctggacccgctggccagcgccgacgcgcggtagcccctcgggccaaaactgccgatgaccgaggagccgcgcgcggggggtcgctgcggg

SEQ ID NO: 168 - DNA, 40341 bp, Unknown
  source: /note="Description of Unknown: MKP2_2161_1 Mutant Bacteria sequence"
ccccagtccagaccgtaggcccggtaaggcgcagccgccaccgggcatcaggccggggcacgcaacctgaactctttgccgggcggcgctgcgcttgcccggcctactgagcttgtaccggcctgccgtaccccaggcccggtaaggcgtagccgccaccgggcaagcgcatccgacttaactttcgttgacaatttccgggcgctggaaacggcgcagctcgcgtagcagcccaaccagcagcacaccgacaagcgccagcgcccagccgctggcgctggcggatgccgccggcgtcattaccgcccctaagccgccgagcagcgccgcgccgatggcgtcgccggtgacgttttgcgcggtccacagaccgttaatccgcccgagcatatgttccggcgtctgggtctgaatcagggtgtactgcagcagcgagctaatagcgctcagccagccaaacagcgccaggcacagcgcgcccaatgcccagtgcggcatcaggctgaacagcgcaatggcgacaaacgatcccaccgtggtcgccagcatcagcgcgcccggccgcaccgtctgggccagctggccgctggtcaacgcccccagcgccgcaccgagcggaatagcggcgtacagcaggccaatctgtccggccgacatctgccagctaccggccagcgccggatagagcacccgcaccgcgctggccatggtcagcagaccgccaagcagcgcaatcccgccgataagcgggctccggcagaggaaggtcagccccgccagcagggagcgcagcggatgctcgcgcggctgcggaggcggcggcagctgcggcagacgcagcagggttaaggtggtgataaaggtccccgccgccgccaggccgaagttccacgccacgccgccggtggccagcagcaggccgccgatcatcggcgaaatcaccgagcccaggcgcaccgtcaacatagtgatggccccggcctgcatcaggttttcccgtcccaccagcgccggggtcgccgccagcagcgcggtcacccccaacgaggcgaagaacccgtcccagatccccagcaggtagatcgccgccagcgacggctccggcaacagggcgttcagacacaggccgacaaagcccacgccgcaggtgccgcgcgccagcaggatcaggcgtttacgttcatagcggtcagccagcacgccccccaccatcagaccaacaaacatcgacgccccggtcagcgtcaccgacagcccgacctgccaggtcgaatgggtcatcatctggatctgcaccgggatggccacgcccagcaggccaagcgacagaatagagataaagcgagcgataaaaacggcgcgaaacgccgggtgagttttcagcaggctgagattgagcagccaggattgtcggttcattacagcgccttgtcgttatttttaataccctttttactgtgggtcatgctaccatagctgaataaaatcgataacgataattactatcattatcatatcagggatgtcagttatgtcgttttctacgaccgcggtacgctctgtcgccgtgcccggattgttgctattactcgccttagccgccgcgcttagcctgaccatcggcgccaaatcgttgccgatcggcacggtattcaccgccttcagcggaacctgtcaaagcgctgattgcactatcgtgctggacgcgcgcctgccgcgcactctggccggtctgctggccggcgtcgccctcggcctcgccggcgcgctgatgcagacgctcacccgcaacccgctggccgaccccggcctgctgggggtcaactccggcgccagcttcgccatcgtcctcggcgcggcgctgtttgggatcacttccccgcaggagcagctgctgctggcattctgcggcgcgctctgcgcctcgctgctggtagcctttaccggcagccagggcggcggtcagctgagcccggtgcgcctcactctcgccggggtcgcccttgcggcggtactcgaggggctgtccaacggcatcgccctgctcaacccggacgtctacgatcagctacgcttctggcaggccggttcgctggatatccgcaccctgcaaacgctgaaaattgtcctgctgccggtagtggtggcggggatcgccgctctgctgctgagccgggcgctgaacagcctgagcctgggcaacgataccgccaccgccctcggcagccgcgtcgcccgcacccagctgatcggcctgatcgtcatcaccgtcctgtgcggcagcgccaccgccgtcgtcggccccatcgcctttatcggcctgatgatgccgcatatggcgcgctggctggtgggggccgatcatcgctggtcgctgccggtcaccctgctcgccaccccggccctgctgctgtttgccgacgtgattggccgcctgctggtgcccggcgaactgcgggtatcggtggtgagcgcctttctcggcgcgccggtgctgatctggctggtgcgccgccagccgcggggaggtggcctgtgattgccccgtcccgccgcctgatagccagctgtctgctgctaatggccgccagcctgctgatttccctgctcgggctggcgcaaggcccggtgcccctgacgattgaccaggtgttctcggcgctgttcggcgatgcgccgcgcaacgtcgcgatggtggtgaacgaatggcggctgccgcgggtgttaatggcgctgctcatcggcgccgcgctcggcgtcagcggcgccattttccagtcgctgacccgtaacccgctcggcagcccggacgtgatgggctttaacaccggcgcctggagcggcgtgctggtggcaatggtcctcttcggccagaacctgacggcgatcgccctggcggcgatggccggcggggtgctgacctcgctggtggtctggctgctggcctggcgcaacgggatcgaaaccttccgcctgatcattatcggcatcggcgtgcgcgccatgctggtggcattcaacacctggctgctgctgcgcgcctcgctggagaccgccctttctgcgggcctgtggaacgccggatcgcttaacggcctgacctggggtaaaacctggccgtcggcgccgctgatcctgttgatgctggtgggcagcgccctgctggttcgccggatgcggctgctggagatgggcgacgataccgcctgcgcgctgggggtgcaggtcgagcgttcgcgcctgctgctgatgctggtggcggtggtgctcaccgccgcctcgacggcgctggccgggccgatctcatttatcgcgctggtggcgccgcatatcgcccgccgcctgagcggcacggcccgctggggactgacccagtcggccctgtgcggcgcgctgctgctggcgctggccgattacggcgcccaacggctgtttatgccgtggcagctgccggttggcgtgttaaccgtcagcctcggcggtatttaccttattgcattgttgattcaggagtcccgcaaaaaatgagtgctgtcccctcccgtttgcgcggcgagcagttaaccctggcctacgggaacaagaccatcgccgagtcgctgaacgtgaccatccctgacggtcacttcaccgccattatcggccccaacggctgcggcaagtcgacgctattgcgcaccctcagtcgcctgatgacgcccgccagcggccacgtctggctcgacggcgcgcagatccagcagtacgccagtaaagaggttgcccgccgcatcgggctgctggcgcagaatgccaccacccctggcgatatcacggtgcaggagctggtggcccgcgggcgctatccgcaccagccgctgtttacccgctggcgcaaagaagatgaagaggcggtgaacaaggcgatgcgagcgaccgggatcagcgatctggcgctgcagagcgtcgacacgctttccggcggccagcggcagcgggcgtggattgcgatggtgctggcccaggaaacggcgattatgctgctggatgagccgaccacctggctggacatcagccatcagatcgacctgctggaactgttgagtgagctgaatcgcgagaagggctataccctggcggcggtgctgcacgatcttaaccaggcctgccgctacgccacccacctgatcgccctgcgcgacggcaggatcgtcgccgagggggcgccgaaggagatcgtcaccgccgatctgattgaacggatttacggtctgcgctgcacgatcattgaagatccggtggcgcatacgccgctggtggtcccgctgggccgccggtaatctcctctttccccggcttgcgctacgctgagccgggctacctgctgtagcccgaactcaaccgttaccccagaatctccctgaccaccggaccgatggcctcaaaggcctgcggggagatgatatcgacgtgggcgcagttctggctgaacacctccagttcccccaccccgggccccatacgacctgcggatccatcccctcctgccgcgtcttctccgccacgaacagcgtcgccttgccgtcaaacttcgcgctatgcgcggtggttaacagccgcaccgcatcggcatagttgccttcgatggcgctgaacagctcgccggaggcttgcccctgctgggtggcgaggaacgcttcgcgctcgcggtcgatctccgccagtacctcgggatccagcccgttggcctctttctctgcccagttttgcgtctccggcggccaggtatccagcaggccgaggaaggccaccgcttcgccgcgctggcgcaagcgggcggcaatcccctgggctaaggtgccgcccagcgaatacccgaacaggtaataagggccgtgcggctgctgcgccagcagcgtgcgcagatgatgctcgcacacctcgtcgaggctggcggcgctagccatcggcccctgcgggcgcggcgactgaataccggtaatcgaccagcgcgggctgagatagcgcgccagcacgctgaactgccaggcgaagccggaggcgggatggaagcagaacagcgtcgggccgtcgctctcgcgcagcggcagaagcgtatccagccccaggcgctgggcctgctcatcgctgagatcggcggccagcagcgcgctcagtttgcccaccgtcgaggccaccatcacctgccccggggtcacctgccgcgccagctggcggctgagctgtgccgccaggcgcatcgccagcagcgaatgaccgccaagggcgaagaaatcggcgtcgatatcgttcacctcgcagcccagcagctggctgaaggcggcggcgacaagagtttccatgccgggctccggcggccggccgctgcgctcgccgccgagggtcggcagcggcagcgctttgcggtccagtttgccgttggcgctcagcggcagctcagcgagctgcatcagcaccaccggcaccatatgcggcggcagctgttccgccagccgcgctttcagcgccgcggtatccagcggcaggccggagtcagagaccagatagcccaccagctgtcgcgcatcaccgccggtcgccgccgcctggttgaagacgcaggcgtgactcaccgcctgccccacgtccggcagggccaacatcacccgatcaatctcgccaagctcgatgcgctgcccgcggatcttcagctgatcgtcgctgcggccaaggtactccaccgcgccgttcgtcagccagcgcgctacgtcgccggtgcgatacatccgctcgccgggggcaaacgggtcggcgataaagcggctggcggtgagatccgggcgccccagatagccctgcgccagctggatgccggtgagataaagatcccccgccacccccggcggcaccgggcgcatcgcggcatcgagaatgcgcagcccggtgttccacaccggccagccaatcggcacgctgctgccggtcaccgccgccagctcagatccgcaggccgggtaccagctgacgtccaccgccgcctccgtcgggccgtacagattatgcagcggcgcgccggttaagcgctcccactcgcggcacaattccgtcggcagcgcttcgccgctgcagaatacccgccgcagcgtgcggcaggcggccacgctgtcggcatccagcgaggcgacaaacgccgccagcatcgacggcacaaagtgggtggtggtcacaccgtagcgggcgaagaactgctgcatcgcctgcgggtcgcggtgcgcctccggctcggccatcaccagctgcgcgccggcgataaacggccaccagaactcccacaccgacacgtcgaaactgcacggcgttttctgcgccaccacgtcgtcggcagataacggatagcgatcctgcatccacagcaggcggttgacgatggcggtctggccgaccatcacccctttcggccgcccggtggagccggaggtaaagatgatgtaggcggtatggtctggttttgacagcgccagcggcgcctcatccccggcggccagcggctgctggtagcagaggctttccagcccggggatatcgctgaagcgggccagttgatcctccgtggcgatcagcagcgacggccgggcgtcttccagcatcatccgcaggcggtcgtccggctagccggtgtccagcggcagccaggcggcccccgcttcgacaatgccgtgcagcgccagggtcaggaacaccgagcgcggcagggccaccgccacgctgtccccaggcttcacgccgcgctgacgcagcagctgcgcgagcgccaccacctgctgacgcatctcgcgatagctgaactgccagcgggcgtccgccagcgccggcgcatccggggtcttccgcgcctggtcggccaccagcgcgctgagggtggtggcaggcagcggcacaacggtatcgttgaccgccgccagccgggccagctcgtcggcggagagcatctctgcttcgccgcagcgcagcgccggatcggcggcgaactgcgccagcagcgcggtcagtcgcgccatgtggcgacggagctcggcttcgtcgtaccgggccttgttggcgaggatctccagcgacagcccgccggtctcatccgggaacagcgccagctcgagatcgttgaccgggccggtggcgagggtgtgggtcactgcctgcacaccatcgatatccagctggtagtcaaagactttgacgttcagcaccgggccgaacagcggttcgtcccctgccgctttgccgctgtcgcggacgatctgctcggcgtcatagcgctgatggcggcgcatctttttcagctgaccggcgaggcgcatcgccaggtccgccagcgtctcccgggcgtcaatatgcaccgccagaggcaggacattgagcaccggccccgtcgaggtcagcgcggctgaacccatccggcgcataaagataaagcccgccgcgtagtccatccggttgcacaggcggcccagccacagcgtggtgagcgccagcgccaggtcagcgggctgacactgcggcgcatggctggccaggcggcggaagccgtcggcgttcatctctagcttcatccgccagatatcgctcccggcggcgcgcccgcccagcggcgcggcagagagtgaggcaggcgccggtaacgcctggcgctgggcctgccagaaagctttatcccgctgccaggcctcgctgccggcgtagcgctggtactcgtccaccacctcggcgaagggggtgaaaggcgactcaggagtagcttccccccgctgccaggcgcgataaatggcggcgatctgccgggttatcgccgggaagctgaagccatccaccagcaagtggtgataacgctgataccagtaccagcagtcgtcgccgacgcgcagcagttgatggcacaccagcgggttgccgccgtcgacgcgcagatcctgcgccagatccgcctgcatccgctccgtggcggcgcgatgcggatccggcgccgtccgcaggtcaatgatcgacggttcgccaaaggtgcggtcggccgccagccactgccagacttccccctcctcttcctcaaagcgcaggctgagggtgtccgcctgctgcagaccggcgacaatcgcttttcccagcagcgtcgggtcgagggcgccgcgtagttcaacatagtgggccacgctccaggcgcctggcagagtggagaggcgctcggccatccagatccccggctgcgcggcaaccagcggtaaacgagtggtcattgtcagctccttatgacgcatgatgggcgggggtcagtgtcgaccagttggccgccagccaggcgttgcaggcctcggccgactgcggggggcacaccaccgtccagccggcaggcaggtcgcagtgcgccggccacaggctgtactgctgttgatcattgcgcagaatgtaaaactgcccttgcggattgtcgaaggggttactgaattgcatatcaaactcctgtcgtaaaacgcgatgctaagggtgcgacagcagaggctgccagagctggataagccctgccgtcagcccgccgcgccagcaaagcgcatcatgcccgccgtcaacctgacgccagaaaatcgtctgctgtgttgtggtgagttgcgccagtagcgcctggttcgcgcgaaaaatgatcggttcgcgttggcccgcttccagccagacgcgcagcccggccgcggacacctcaccctggcgaagctgttcgccgataaagcccatcccgcggccatcgcggtgcggccaccagtaggagcctgactggctgagcacgcagccaaagcgctgcggccagttgagagcggcgaacatcgccgccagaccgccgaagctttgcccggccaccaccgtccgatccgggcggtcgctgaacggggcatagccgtggaccagcggcaggagctcctcctgcaccgccagccagaaatcgcggtgacagggcagctcaaccccgcggcgctggttgtcgatcgcgtcgatcagcaggtagaccgccggtggcagtcttccctcgcgggtcagggcggccagcggcgaccacaccggcatgctctcggcccagaactggccgtcgagcaggatcgccagcggccgcgtttgcgggtcgacggcctcgccggtggtgtagatccagacccggcgatggttgcccagacgcgcgctgcgccactcaaggcaacgggcggcaggatgcgcctcattaagcgggtcccagccgggctgcgcgggggcctgcggcatctccagggcggacacgccatggccgcgtccgccccgccagctgtgcgggttcagcggatcggctatcgcccgcggcagcagtttgcgccagccttcgcgtagcagcgcgcggtcgggcgcatcagcgctgaacacctcaggggaaaaatcatcgtcacggtcggagggaataaaacagtagctgccgcgccaggtcggcgacagcgtagtgcgccagaaccaggcgtcggtcccggggagacgttgcagcgattgcggacgcgcattctgatggtggtcggtcacgccggtgatatagagccatacccgacgatggggagagcaggtttcatcccccgccgggtcccgccaccagaacgttacctcgatggtgtcatccactgcgcggcactgcggcccccgcagggttcgccaccactcctcgcttcctgtccttaacattctgtaattaaccctatgtatagcgtgacttttttaattaattgtcattatttattgataatattattgataactatttgcatttgcaatagcgtattagcgcgccgtgggaagcgcgtctttcatcagaacatgtcaaatcgggcctattcagccagcgacggagtgcctttgcccgcttttggcaacatttatgccgcctcccctcccggtgggaaggggcgtttggggaacgtggcgacaaaaagcaggaataacaatgaataacaggatcaaatccctggccttgctggtcaatctgggaatttacggggttgcttttccgttaagcgcagcggaaaccgccaccgacgataaaaacagcgccgctgaagagaccatggtggtcaccgccgccgagcagaacctgcaggcgccgggcgtctccaccatcaccgccgatgagatccgcaaacgccccccggcgcgcgacgtctcggagatcattcgcaccatgccgggagtcaacctgaccggcaactccaccagcggccagcgcggcaacaaccgccagattgatatccgcggcatgggcccggaaaataccctgatcctgatcgacggcaagccggtcaccagccgcaactccgtgcgccttggctggcgcggcgagcgcgacacccgcggcgataccagctgggtgccgccggagataatcgaacgtatcgaagtgattcgcggcccggccgccgcccgctacggcaacggcgccgccggcggcgtggtgaatatcatcaccaaaaaaaccggcgatgagtggcgcggctcatggaacacctatatgaacgccccggagcacaaggatgaaggctccaccaaacgcactaacttcagcctcagcggcccgctgggcggcgattttagcttccgcctgttcggtaacctcgacaaaacgcaggccgacgcctgggatatcaaccagggccatcagtccgagcgtaccgggatctatgccgatactctgccggccgggcgcgaaggggtgaaaaacaaaaacatcgatggtctggtgcgctgggaattcgctccgatgcagtcgctggagtttgaggccggctacagccgccagggcaacctctacgccggcgatacccagaacaccaactccaacgacctggtaaaagagaactacggcaaagagaccaaccgtctgtatcgcaacacctactcggttacctggaacggcgcctgggacaacggggtgaccaccagcaactgggcgcagtacgaacgcacccgcaactcgcgcaaaggcgaaggcctggccggcggcaccgaggggatctttaacagcaaccagttcacggatatcgatctggcggatgtgatgctgcacagcgaagtcagcattcccttcgactatctggttaatcagaacctgacgctgggcagcgagtggaatcaacagcggatgaaggataacgcgtccaacacccaggcgctgtcgggaggcgaaattccgggctacgacagcaccggccgcagcccgtactcgcaggcggaaatcttctcgctgttcgccgagaacaacatggagctgaccgacaccaccatgctgactccggcgctgcgtttcgatcatcacagcattgtcggcaataactggagcccgtccctcaacctgtcgcagggcctgtgggatgacttcacgctgaagatgggcatcgcccgcgcctataaagcgccgagcctgtatcagaccaacccgaactacattctctacagtaaaggccagggctgctacgccagtaaagacggctgctatctgcagggtaatgacgacttaaaagccgagaccagcatcaacaaagagattggcctcgagtttaaacgcgacggctggctggcgggcgtcacctggttccgcaacgactaccgcaacaagattgaagcgggctatgccccggtctatcaaaacaataaaggtaccgatctctaccagtgggaaaacgtgccgaaagcggtggtggaaggtctggaggggacgttgaacgttccggtgagcgagaccgtcaactggaccaacaacatcacctatatgctgcagagtaagaacaaagagaccggcgatcgtctgtcgattatcccggaatacacgctgaactccaccctgagctggcaggttcgcgatgacgtttcgctgcagtcgaccttcacctggtacggcaagcaggagccgaagaagtacaactacaagggtcaaccggtcaccggcagcgagaagaacgaggttagcccctacagcatcctcggcctgagcgcgacctgggacgtcaccaaatacgtcagtctgaccggcggcgtggataacgtcttcgataagcgccactggcgcgcgggcaacgcccagaccaccgggggcgccaccggcacgatgtacggcgccggcgccgagacctacaatgaatcgggccgcacctggtacctgagcgtcaacacccacttctgatagcgggttctccctcccccgcccttgctggacaaagggcgggggcaaccgcggtaaccttatcctatgcgccaccatcgcaccgttttgcctctggccggctataccatccagcagatcgacttcgacccggcgactttccagcctgaagatctgttctggctgccctatcacgccagcctgaccgggtggagccgcaagcggcaggcggagcacctggccggacgcatcgccgcggcatacgccctgcgcgaggtgggggagaaacggcttcccgccatcggcgatcggcgccagccgctgtggcccacgccctggttcggcagcataagtcattgcggccagcgcgcgctggcggtgatcgccgatcggccggtgggcgtcgatatcgagcgccggtttaccccacagctggccgcggagctggagagcagcattatcagcccggcggaaaaaacggcgctgctgcgcagcggcctgcccttcccgctggcgctgacgctggcgttttcggcaaaagagagtgggtttaaggcctggtcctcacacgcttccggcctgcccggcttccacagcgcccggattgtggcactcactacgcagcagatccatttacgttttaccgccagcttctccctgcaacttgctgatttcccccttaaaatcaatcatctgataaaagacgatctcgttattacctgtacctgcccgactcgcgaagcgtgatccttttcgctttttaagaaattacctgtgcaaaccgtagacagttctgactggccgctttatggttacattgaataataaatcattattgaatatatattcaatgcggagataataatgaaaactaccctgataaagtctgttctgtttgcctccatgatggccgcatctggctcacttttcgccgccgataatggcctgatcgcaatcattaccccttcacatgataatcctttctttaaagccgaggctgacggcgcagcggcgaaagcaaaagaactgggttacagcaccctggtcgcctctcacgacgacgacgtcaacaaacaaaaccaactaattgaaacggctattgcgcggaaagccaaagccatcatccttgataatgctggcgcggatgctaccgtcggcccgctggaaaaagcaaaagcggcaggtgtgccggcatttttaatcgacagggagatcaataaaaccggcgtcgccgtggcgcagatcgtctctaacaactatcagggcgcccagcttggcgcagaaaagtttgccagtctcctcaacggtaaaggcaagtatgtcgaactattaggtcgtcagtcagacactaacgccagcgtccgctcgcagggttatcacgatgtgctggacgactatccggaaatgaaaatggtcgcccagcagacggcgaactggagccagacggaggcctttacccgtatggaagccattctgcagacgaatccggatatcgtcggcgtgatttccggcaacgataccatggcgctgggggcggaagcggcgctgaaagccgcgggtaaaaacgacgtgattgttgtcggcttcgacggcagcgactacacgcgcgactcgatactcaagcagggcaacattaaggccacggttctccagcccggctggaagcaggcgcaaatggccgtggaacaggcggactttttcctgaagaacgggaaagcccagaaagaagagaagcagttgatggactgcatcctcatcgatagtggcaatgcgaaaaaactcaacatgttcaacctcagcgagtaaggcggaaatgatgcggttaaaacaatggggcgccgtgctgatgggctgcgccgccctgttgctgacggcctgcacggtggtggacttagatgagaatggcaagccagtgctgcctgccgacccgaacgcgaaacccagcttcgaccatctcaccccgcagcagatcgcgcaacaaacctggcaatctcgagtgattgacgcagcgaaccaacatgcgctggacgcgactgcgctggaaaaagtgcgccaggcgtctggcgctacgccacagagcgtctttgtccgcctgaacagcgaggtgaccgggactgacgtcagcaacccacgcgagcaaaagctcactcttacgctactgggccagccgttggtcgtgcagttgggtcctgtcatgagaggcaacgccattcgcgatgccagcggttttaaatttgaagactttaccaaccaggtgcagtttgcgcagctttcacgcgcctacaaccgggaggcaataaaatcgttgccgacagtggacgcgagctgggcaggcaaacctgtcgatattctctttgcggccacggtggttaacggcagcctgcaggatgcggccgctcttgcgctaaaacaggaggcgcgctgatggccagttcacccacagaggagatcattttacgcacccgtggtatttccatgctgttccccggcacggtggccctggataacgtcgactacaacgtctggcgtggcaaagttaacgtgatcatcggcgaaaatggcgcgggtaaatcaacgctcatgaaaattctcgccggtgtgcaacagccgagcctgggcgaaatggagctcaacggtaagcttgtccatttctccagcacccgcgaggccgccgcccacggcattggtatggtccatcaggagctgaacctgtttgaaaatcttagcgtcgcggaaaatatctttcttggtcgcgagctacagcgcgggcttacgccaattaacgaagcagagcaggaacgacaagccgcggagctgttgcagcgactcgatcagccgatctcgccgcgggagctggtgggtaacctgaaggtcggtcagcagcagttggttgagatagccaaagcgctggcggaaaatgcggacattctgatccttgatgagcctacatccgccttaagcaaaaccgaggtggatatcctgtttcgggtcatccgcgagctgacgcgtcagggggtgtccatcatctacatctcacaccgtctggaagagctgatggccatcggcgacgtcattaccattctgcgtgacggcaaattccaggcggaggccagggtgagtgaaattgatgtgccatggatcgtccgtgaaatgctgggaagcgatccggtaagtcattttcttcccccgaatcgccgcttcggtgccccactgctggaagtggagaacctgacctgcgtgaatgccgcgggcaatacggtggtggataacgtcagttttaaagcacatgccggtgaaattattgggatctacggtctaatgggcgccggacgaaccgagctgtttgaatgtctgctggggacagcgcgccactactttggcaagatctggctggacagcaaaccggttccccagcggttaaccacggccgaacgcatccgcatgggcatgagtctggtgccggaagatcgtaagcggaccgggatttttccgatctcttcagtcgccagcaatctgaccattgccagcctgtggcgtcgtcttcagcgcggggtaaccattgccaataaagaggaagaggccgtcgtcgccagcacaattggcaatctatccatcaaggtctcatcaccaggagtcgagatccaggcgctcagcggcggcaatcagcaaaaggtggttattggccgttcgctgttaaccaatccgaaggtgctgtttcttgacgagcctacgcgcggaatcgacatcggcgccaagggggatgtgtttcgcatgatggtgcaattgtcgcagcagggaatggcggtggtgttctccacctccgatttaaaagaaatcatggcggtctctgaccgtatcctggtgatgtcaggcggcaaactgaccgccgatatcgttcgtgaccaggccgaagagtcggcgctggtttcagcaagcgctcaggggttctaagatgaaaatgacacaatcggtcgcactggcgccgcgcggcggagcctctctctcccgtgaaaatatcctgctgttgttattaaaactgcgcacctttatcgcgctgttcctgattgtcggcttcttcacgatgaccgtgcccggttttttatccgctggcagcatggtgattatgattaaacacattgcgattaacgcctttctggcgttggggatcacctttgtcattatcactgccggtatcgacctttcgattggcgctacgctcggtctctgcggaatgatagccggctggcttatcaccaaagggatcgtcttgccgatgttcggcatcgccatttttccaagcgtgtgggtcattgtgcccctggtgctgctgataggcgcgctgattggcgccgttaatggctggatcattacccgctacaatgttgcgccgtttatctgcaccctcggtactatgtatgtgctccgcggagccgcgatgctgacctctgatggccaaaccttccccgggctcgcgggcaatccgcagctgggcaacacgggtttcgatgaaattggcgcaggtgcgctctttggcatcccgtgggccatctggctgatgatcctcctggcgctgatcatcgcctatatcgcccggcgtttgccttttggccgccatgtttatgcgatcggtgacaatgagcgtgccgccgagctatccggcgtgaaagtgaagcaaattaaagtgctggtctacacgctgtccggcttttgcgccgccatagccgggatcgtggtctccgcacagctgctggccagccatccggctaacggtaccgcttttgagatgaatgctatcgccgccgtcgtactgggcggaacatcgctggccggcggccggggaaccattctgggtacgctgattggtgcgtttgtcatcggttttctcgccgacgggctggtgatgatgggggtaagcgagttctggcagatggtcatcaaagggatcgtgattattgtggcggtcattatcgatcagatgcaaaaccggatgcagcagaaggcggcggtggtcgcccagaaagcggtcatggagaataagtaaccgcaagacctcctgtggctcaggccacagggggagcgggcctgactcacgatgcgcctttctccgaggcgcttcgcaaaatctcatcgaaaaatcctgcccgacggcaagcagtggtagcatcccgccattctgctctgccaggcaaggaagccatgaaaaaacgtcctcactcgaccccgcacgacagtctgtttaagcgctttctgcgcgacagcgaaaccgcacgcgattttctggatattcatctgccgcccgcgctgcggcaactgtgcgacttaagcactctgcacctggaatccgggagctttgttgaggacaacctgcgcgccagctattccgatattctctactctctgcataccagcaagggagagggctatatctatgtcgtcattgagcatcagagcaccccggacagccatatggcgttcagactcctgcgctatgccctcgcggccatgcaacagcatcttgatcgcggccataaagcgctgccgctggtaattcccatgctgttttatcatggcagcatttctccctatcccttttcactgtgctggctggacgagttcccacctgactcaccggcaaaacagctttatctcggggcctttccgctcgtcgatgtgaccgatattcccgacgacgccatattacagcatcggcggatcgcgcttctggaactggtccagaaacacatccgtcaacgcgatctcagccatatcctccagcagttggtggaggtggtgctgatgggatacactgaccaccagcagttcaaaacgttatttacctatatgtcgctgcatggcaatagcgccgacccggaaaactttatcgaccagctggtcgaacgtctgccgcaatatgaggataccctgatgacgattgccgagtacctgaagcagaaaggtcgcgaagagggaaaacaacgctggttacaggaaggcttgaacgaaggtttacaagcgggtgaacatcgcgaagcctgccgcatcgcgctgatgatgttagagaacggtatggacactgaaaccgtgttgcggatgactcgcctcagcgcggacgaactggcgacgctggcgcgccaggcacgcccgtcttcacccccgcttaacccttaattaacgcgcgcgcggtcgggaagtcggtgatcaggacatcaatatagtcgccctgcaacgcgccgcggatggcgttctctttgtccacgccgccagccagcgcaatcacctgcggacaacgacgaatttgctcaagctccataccgatcaccggatcctcatcctggctcagtaccggtttgcccgccgcattatagtaatgcaggcagatatcccccaccgcgccgcgcgccgccagcagctggagcatggtttcattataatagttaccggaatttttcagcagctgcgaaggctccagttcacctataccgacgatggccacatccacttcggcaaatttcgccaccaccgccgcgacgtccggactgtttaccagacggctgcgctcctccacggagtgctcaatactctgcgacggcaacagccaagccgggcagcctaaatgagccgccagctgctgggttaaaatggtagcctgcacgttgccgttgggaccgacgccgcccaacagctgaatcaccccggcggcgcgaatgttctgcggatgcatctcatccaccatgcagcggatcgtactgctccaggacgagatccccacgaggtcttccggccgcagccgcgtttcgacatagtgcgccgctgcgctgccgatggcatgctttacctgactgtaactggcgttctcgcccacatccacgactatcgcctgtcgaatgccaaaacgctcctcaatcgccttttccagatcgacaaaaatgtttgtcggctggaccacggtaattttcaccagcccctctttctgacagcgggtaagcgcccgtgaaacaaaagactgggacagatgcagcagcgaggcgatctcggactgctttttattctcgctgtagtaaagcgtggcgatcttcaccagcaaccgctgttcatcctgcttcgacatggcattcccctctgttttctgctcgttatttttatgcatcattgaatagataacaagcgcagcgcccttttcccgacgatccaaatgtgatcgttttctccttttttagaaaataggccgtacaaatcgtggacaaaccccgtcgcagggcatatcttaccaatgtgaataataaatcagtagtgaatatatattcaatcacttattaataccttgttttgtcgacgataaaaggtagtcaggatgggaagtgtttctttaccctgctggaatatttattcacacaagaatttactttcaagaggtgttttatgaatccgttttcactctccgttaaggagttagaacaaaaagcacgcgccatccgccgccgcatcatcgtcttaaatgcggaaagcccggctggcggccacaccggtgccgatctgtcacaagtcgaacttctgaccgccctctattttcgtatccttaactgctcccctgcgcgaaaagagagtgacgaccgcgatatctatattcagtcgaaggggcacgctgtcggtggttactactgcgtgctggccgaagcaggctttattcccgttgactggctggcaacctatcaacacgccgactcggctctgccaggacacccggtaaagcacaaaacgccaggtattgagctcaataccggtgcgctgggccatggtctgcccgtggcggtaggcattgcgctggcagcgaaacgcgataacaacccgcgtcgcgtatttgtcgtcaccggcgatggcgaactggcggagggcagcaactgggaggccgcgctggtcgccgcccactaccaactggataaccttattattatcaacgacaaaaataatctgcagctggccggtgcgaccaaagagatcatgaataccgatccgctggatgaaaaatggcgcgctttcggcatggaggtcacacagtgcaacggcaacgatatggcggaggtggtcgccacgcttgagcgcttgcagccgaacgggaaaccacacgtcgtgattgctaacaccaccaaaggcgcgggtatttcctttattcagggacgccccgagtggcatcaccgggtaccgaaaggagaagaaattgaactggcgctggaggaactgaaagatgagtaatagcgaacatctcgccacggtgatggtgaatgcctttattgatgccgtagaccgcggcgtggatctggtgccggtggtggccgactccacctcaacggcgaaaattgctccgtttatcaaaagattccctggccggctggtcaacgtcggcatcgccgagcagacgctggttggcgctgccgccggtctggcgctgggggggaaagtggccgtgacctgcaacgccgcgccattcctcatctcacgagccaatgagcagattaaggtcgacgtttgctacaacaacaccaacgtcaaactgttcgggctgaacgcgggcgccagctacggtccactggccagcacccaccacagtattgacgatatcgccattctgcgcggttttggcaatattgaaatttacgcgccgtccagtcccggcgagtgccggcagattattgattatgcccttgcccacgtcgggccagtgtatatccgcctcgacggtaaagcgctgccggaactgcatgatgaacgttaccggtttgttccgggcaacattgatgtgctgcgtctggggcgcgatattgcgctggttgccatgggctcaacggtacatgaaattgtggaagccgccgcacaactcgctgcagaaggtattgacgccaccgttatcagtgtcccatctattcgtccttgtgatacccaggcgctactggcggcaatccagtcctgtccggccgcgatcacggtggaagaacacaacgtcaacggcggcgtcgggagcctggtggcggaagtgctggccgaggccgggtgcgcgatcccgttgcggcgcttaggtattcctgacgggcaatacgccattgccgccgatcgcgccgccacgcgcgcgcgccatgaaatcgatgccgccggggtggtgaagcacgcccgcaagctgcacataaaaaaagcatcctgaaaaataacaagaacatcttactggagagaacgcaatgtcccgaattcctcaacaactcaccatgggcgtcattattggcaaccggggatttttccccagctatctggtcgccgaagcgcgcgaacaggcggtagccctgtttagccgtcttgggattaacaccattatgcttgatccatcccagacggaactgggtggcgtggaaacccggcaggatgccaaaatttgcgccgagctgttccgcagccaccgcgacaatattcacggtgtcgtggtgctgttacccaactttggcgatgagaaagccatcgccgaaacgctgcgcctctccggtctcaacgtcccggtgcttattcaggccgaagaggataatctggataaaatggggttgtcgacgcgccgcgatagcttctgcggcaaaatttccctttgcaacaacctgcgccagtacggtatcccgtttacgctgaccacccagcacgtctgcgcgctcagtggcgaagtgtttgagcaggatctgcggcgcttcacgcagatatgtcgcgtggtgaacagtatgcgcggcgtgcgcgttggcgcgatcggcgcccgtccagcgggctttaacaccgtgcgctacagcgaaaagctgctcgaacgtttaggcatcgcagtggaaacgttagatctatcagaggtgtttacccggattaaagccctgcgtgatgacgatattcgtgtggatgagaagcgccgcctgctgatcgataatgccgacgccagcggtattccggcagataaactggtcaccatggcaaaactgtttgtggtcctgagcgagtggattgttgccaacgacatcgacaccaccgcaattcagtgctggacctcgctgcaggaaaatctggggattaacgtctgctccatcatgagcgtgatgtccggacaactgatgccaagcgcctgtgaggtcgatgtcatgggcgcgctctccatgtatgcgctcgccagcagcaacctgagccccgcctcgatcgcggactggaacaataacttcggcgacgatcgcgataaatgtgtgctgtttcattgcgggaactttgcctcggccagccttgagtcgccgcacatgggaacggccgatattatcggcaccaccgtcggcaaagaaaacacctgcggtgccgtgcatggtcgcatgaaaagcggcgcgctgacctattttcgcctcagcaccgacgacctgactggcgaaatcaaagcctacgtcggcgaaggtcggtcggttgacgatcccctcgatacggtaggctgtcgggcggtcattcaggttccccacctggaaaatctgctgtcgtggatctgccgcaatggctttgagcaccatgtcgcgatgaaccattccgccagtgccgcaattttgcacgaggcatttacgcgctacctgggcgtgtcgacctatctccaccagtgaggccggaggccgctatgtcggtaaacaaggatattattattgccctcgatgagggcacaaccaatgccaaagccgttgccttcgacagccacgggcgggtaattacgcaattttcccgcgcgcttgagatcgctacgccgcaggaaggatgggtagaacagtcagcggagcttctgcttgccgcgtcgctggaggtgatttctcgcgcagtggccgccgttggcgcggagcgtgtagccgccctggcgatcagcaaccagcgcgaaaccgtcgtgggctggtatcgggaaacgggcgaggctatagcgcccgccctgagctggcaatgtgcacgtactgccgcattttgccacatgctgcgtgaacaaggtcatgagccgcagatcaaggcggtaaccggcctgccagtcgccccgctcttttccgcctcgaaaatgcgctggctgctggaccacactccggatggtctgaaccgagcgaaaaatggcgagatttgcctcggtacggtggatagctggctgctctggcacctgacgcaaggccagcatttttgttgtgattatgccaacgcgtctcgtacgcagctcatgaatttgcacacagcggactgggataccgatatgctcgccctgtttggcattccgcgtgcagcactcccggtgattaaaccttcgagcggcctgtttggttacaccgcgggtttagccaccctccctgatggcattccggtaatggcgatgattggcgattcgcatgccgcccttttcgcccacggtctgggcgccgccggttgcgttaaagccacttacggtacagggacctcggtgatggcgcccgttgattcggtggcgtgtcacgtcagtaatctcgcccccacggtggcctggcacgacggagaaaaactggtctatgcactcgaggggaatattccccataccggcgatgcggtggcgtggatggccgacagtaccggattgagcgaacgcgctcccggcgaactggcccaggcgctgaatgatctgccgcgctcggtcgactccaccttaggcgtcttttttgtcccggcgctcaccggcatgggcgccccctggtgggacgataaggcccgcggtttgatccatggattaagccggggcgtgaagcgggcccatctcattcgtgccgcgctagagtcaattacctaccagattgccgatgtaatcactgcgatgcgtgcccatcatggctttacgctcaacacgctgctggtggatgggggccccaccaaaaacgactggttaatgcagtatcaggccgacctgctggggtgtccggtgatgcgcagcgatgtggccgagctgtcggcgaccggtgcggcactgctggcgcgtaaagcgttgcacaagctgacggtggcagagcttcagccctttttaccagaacacatcacttatgcgccagacctgatccggcatcatcggcttgtgcagcgatggcagtcctggcaacacgcggtgacgctggcaagacgctgagcgcaacccagccgggcgataacgtcttcgtccggctgcaatccaacgccccctgccgctaacccagcggatactgttgaaacgccggcagcgcctcccccttctccgccagcgcgcgaatatgcggaaacgccgcggccgacaccaccgccgggatcatcaactggataaaggaccagaccaccgtgctggtgaccagcacctgatccggctgcgcggcggcggcgcggtctgccagccgggcgtcccactcccgacaggcggccagcagctggccggtcacccgggctatccacggctgatgctgcttctcttccggccgcagacggtgctcataaacatgctggaccgctttttcacaggcggcgaggatcacccccagcaggtgcagatcgcgggccagcgcctcgggatgcgcgggaagcagccggcgcccggccggattggtcgtttcgaaatagtggaggatcagcgtggagtccatcagctgcgtcccgttatcgagcaccaccgtcggcgccttgaccaccggattaatgcgggaaaattcgtcaaagccgctaaagaccgatagcggcaggctctcgaattccacgccatagagcgccagagaaaccgccacgcgtcttacataaggtgaatccatcataccaatgagtttcatcgtcactcctgcctgcgataaagaggttgcggctttaccttactggaaaaccgatgccgcgaatatcaccagatacttaccgcaatggttagtaaaactaacagataggcgactcgctgtagccctccagttccccttgtgctataccgactgaggcagcatttagcccctttttcagcctgttcgcggcggctataaaacccgctaacccggtagtaacgttaacgtatcgactcactgactaagagatcaccatggcagattttccccctgtcgccagcctgcgcagctttgaggcggtggcgcgcctcggcagcgtaacgcaggccgcccacgagatgagcgtgacccattcggcggtcagccagcacatcaaacagctggaagccctggtcggcgtcacgctctttatccgccacggccgcggagtgcgcatcacggaagaaggacggctctatgccctgcaaatccgcgaggcgttacagcacatcgccgacgccacgcgcatggtgcagatcaaaccccgcaccctggaagtgaccctggcgacgctcccctcctttggctgccactggctgctgccgcggctggcgcgctttcaggcgcggcatccgcagatcgcggtgcgcctgctgaccagcctggcggtggttaacctgcaacaggagggtatcgatctggccattcgcatggggcaaggcgactgggaggggatggaaagccggcatctgtttgccgatgaacagctggtggtcgccgcccccggctatcgcggcggtaacctgccgaccaccccgcaggcgatcgccgccagcgatattattttttccatggagtcctggaacgcctggtgcagccaggcggggctggaaaagccgatcgtccccgcgggcctgcgcctgaacgactctaatctggtgctggaggcggtccgcctgggggccggcgtggcgctggagcggcgctccctggtggcgggggcgatagcccgcggcgagctggtgcagctcaccgccgtcaccgtcccctacccctggcactactggctaaccgtctccccgcaggtggagaaccggccggaagtcgcccggttcatcgcctggctggaggaggagatcgccctctggcgccagcagatcagcgcttagccttcggccgacggcggcaggcccgtccgggcggcgtgctcctgggagagacgccaaaaatcgtgcccggcgggatactgatagaggcgcagggaaaactgtccggccaccgcggtaatgtactcaaatatcgccgactgggtgttttcgtagtctttccacagcgttgaggtggtgaagcagtaaatctccagcgggatgcccgacggcgacggtttcagcgttctcgccacaatgtacatctccttaataatatccggccgctcggcgagatagtgcatcagatagtggcgaaacagggtcaggttggtcagcccgttatcgataaaccagcggtcggccacgccgccgggatcccggccgtcaagcagcgtcgccagaggctcactcaccccgcggatggtcagcatcgaggagagcatctcctggtcgagaaaacgcaccgagtgctgatcgatggcgatactgcgcatgatccgccgcgccccggaggagaacatcgcctgccagttggtataggtctcggtggggaaattcttggtcgggatacgggagatggtattgtcccagttgcggatggtaatggtgtgcagcgcgatatccgtcacctcaccgctgaggttcttgtcaggcatttcaatccagtcccccagctggagcacgtcgttggacgacagctgaacgttcgccaccagcgacagcagagtatgctggaacacgatcatcagtaccgccgccacggcccccagactggagatgataatgatcggcgatttgttcgacatcacggcgaggatcatgatcgccgccaggatgtggactaagattttgcctatctggatatagcccttaatggaatgatttttacgtttggtctttcgcagataggagctgttgacaatatccagcatctcgttgaaaaacaccgacataaaaataaaaaacaagatcccgcagatagtattaatcgccgtcaccagcgatgccggcatcgccggcataaactgcagaacgtaatagacgataataaccggaatgaaattggacagcttttcggcgatgcgtcgatccttctccagcggcacatcctgtttgtggctactaaagaagaccttacgcaccactttaatcagcaagaacttgcataaaagatgggcaaatatgccggagagcagcagcagaataagattaaaccccaccgccagcgccggattactctcaataaacgtcagtagatgattcacatacgccatgctttatcgcctgaataactatgccacttcgctaactgctttatcccaagggcatatatttggaaaataaatcaatccgcatcatggcatatcgcttagcgtaacgtccatgcgcgcaccgcttctaatcattcacagaaaatatgtcagagtttgcattaatcattctctacgctcactataaagaggcttgttatgaggacggaataagtccaggaggaaacatgtttaaagctcttaccgctatcgtcgccttagccgcctccgccagcgttatggcgcaaggcgatgtcacgctgaacagtctggctcacgatgccgccacccgggcgtcgtttaaccagatggtcaaaggccatcagctgcccgcctgggtgaccaccggcggcaccggttcgcccgcgcagacggggaaactgggtagcgaatcctggcaggtgttaagcgcctgcaaaccccacgactgcggccatgaacgtatcgcggtgatctggtcggaaaaaagcaaacagatgtccggcgtttactcggtggtcgatgaaaaaaccgaccaggagaagctgacctggcttaacgtcagcgatgccctgtccatcgatggcaaaaccgtgctgtttgccgccctcagcggcagcctcgacaaccacccggacgcctttaactaccagtaacgaccatcgcccccgtcagcctttccccgacgggggcttccctgattagccatccgggaacatcacgctgttccccggcgcttcccgatgcagatggataaagttcaggtgccgctcgtactggtcgagaatatcggtgatcacctgctctttgctgtagtccatcaggtcgttaccctgactgccctccagcaggaaggtctccagccggtaataggtggatttcccgctgcgcgcccgataggtaaagcccggcaccgagtactgctgcggccagatcttgtagataaagttctgctcgtcgcccatgtgcaccagcagatcgaggtggccaaggttctcaccctcttccggcggcaggctcttcagttccactgccgcgccgcgcagccgcagctcctgggccacctcctccatcgccgggtagcacaccgtctccatcatcagtttggtatagcgcgtgccggggtaattcatcagccgcgacaggcgcttcttccagctcagacgatcctggaggcccatcgggcgcggggcggtgtcgcggctggcgctgacccggcggtaatcttccactttcagagatttatacagtccggccatcacgaagaaaatcacaaagctgaacggcagccccatgatcaccgtggtgttctgcagcgccgagatgccgttggtcatcagcatcccgagggtcaacagaccgatggccaccgaccagaagatgcgcagccagttcggggcgtcgctgttgatgtccttcagcttcgaggtgaagttccccagcaccagcgcgccggagtcggcggaggtaacgtaaaacagcagaccggtgatggtcgccaccgacgcgctaaaggtaaacgccggatactgcgccagcaggctgtagaagccgcgctccgggtgggccatcgcctcctgggcaaaggccgcgtcgccgtggatgatctcatacagcgcgctgttgccgaacaccgacagccacagcagggtaaaggtgaagggaataatcagggtgcccatcacaaactggcggatggtgcgcccgcgcgaaatgcgcgccaggaacaggcccacaaacggcgaccaggccacccaccacgcccagaaaaagagcgtccagttgttcatccattctaccggccggtcgaaggcgaagctgttcagcgtcatgcccataaagcgattgacgtagtcgccgacgttgagcactaacgcattgagcaggaaggaggtatcgcccatgaacagcacgaacaggatcagccccagcgcgagggcgacgttcagttcggagagcacgcggatgcccttgtccaccccggaggtgaccgagatggtggcgatgatcaccgacagcgcaatcagggccgctttcgccgccagcgagtccggaatatcgaacagcacgctcagaccgtagttgagctgcacgacgccgataccgagggtggtggcgatgccgaagatggtgccgatcaccgccgcaatatcgacgctgtggccgatgggcccattgatccgtttgccaaaaatcgggtacagcgccgagcggatggtgagcggcaaattataacgatagctaaagtatcccagcgccatgcccatcagggcatacattgaccatccggttaagccatagtgaaacagggtccagaccatcgcctggcgcgccgcctcgatggtctgccccgccccttccggcggctgcatatattgcgtcaccggctcggcgaccgagaagaacatcaggtcgatgccgatgccggcggcgaacagcatcgccgcccagctcagcaggctgaactcgggctttgactgctccggcccgagcttcaccgagccgaagcgcgagcaggcaatgcagacgacgaagacgatatacagcgtcgccgccagcagatagtaccagccgaaggttttcgacacccagtccagggtgcgcccaatccactcggcagaaaaatcgcgaaaaaagatcgtcatcagggaaaacaacaaaatcagtccggccgaggtataaaaaaccaccggattgattttgtccttttctctgctttgcgaaagatctgtcatccagtatccccactgtttttgtaactattaaaatccaaatccgcaacaattaagacacattttatattgaacgtccaatcaaaaaccgctttaatagttaaccaacgctgatgaatggagtggcaaaaatgcccaaactggggatgcagccgatccggcgcaggcagctgatcgacgccacgctggacgcaataaatgaagtcggaatgcacgacgcgaccatcgcgcaaattgcccggcgggcgggcgtatcgacggggatcatcagtcactatttcaaagacaaaaatggtctgctggaggcgaccatgcgcgacatcaccagccagctgcgcgacgcggtgctcaaccgtctgcacgctctgccggacggcagcgccagccagcgcctgcaggcgattgtcggcggcaactttgatgagacgcagatcagcagcgcggcgatgaaggcctggctggccttttgggccagcagcatgcaccagccgatgctttatcggttacagcaggtcagcagccgtcgcctgctgtcgaacctggtgtacgaattccgccgcgagctgccgcgcgagcaggcgcaggaggccggctacgggctggcggcgctgatagacggcctgtggctgcgggcggcgctcagcggcaaaccgctggataaaacgctggcgcagtcgctgaccagccactttattcgtcagcatttaccgaacccataaccgaggaggcgttatgtcccgaatggcagaacagcagctttatattaatggtggttatacatcggccaccagcggtcgcaccttcgagaccatcaaccctgccactggcgaggtgctggcgaccgttcaggctgccggacgcgaggatgtcgaccgcgccgtcgagagcgcgcagcgtgggcaaaaaatctgggcggcgatgaccgccatggaacgctcgcgcatcctgcgtcgcgccgtcgaccttctgcgccagcgcaacgacgagctggcgcgactggagacgctggataccgggaaacccctcagcgaaaccgccgccgttgatatcgtcaccggcgccgacgtgctggagtattacgccggattgatcccggcgctggaaggcagccagatcccgctgcgcgacagttccttcgtctacacccgtcgcgaaccgctgggggtggtagccgggatcggcgcgtggaactacccgatccagatcgccctgtggaaatcggcgccagcgctggccgctggcaatgcgatgattttcaaaccgagcgaagtcaccccgctgaccgccctcaagctggcggaaatttacagcgaagcgggcctgccggacggggtgtttaacgtcctgccagggatcggcgcggaaaccggccagtatctgaccgagcatccggacatcgccaaaatatccttcaccggcggcgtcgccagcggcaaaaaagtgatggccaactcggccgcttcatcactgaaagaggtcaccatggagctgggcggcaaatcgccgctgattatcgccgacgatgccgacctcgacctcgccgccgatattgccatgatggccaacttttacagctccggccaggtgtgcaccaacggcacccgggtgtttgtcccggcgaaacggaaggcggaattcgagcacaagatcctcgagcgggtggcccgcatccgcgccggcgatctgtttgccgatgacaccaacttcggcccgctggtcagcttcccccatcgcgacaacgttctgcgctatatcgagagcggcaaacgcgaaggcgcgcgcctgctgtgcggcggcgaggcgctgaaaggcgacggtttcgataacggcgcgtgggtcgccccgacggtgtttaccgattgcagcgacgagatgaccatcgtgcgcgaagagatcttcggcccggtgatgtcgatcctcagctatgccgacgaagcggaggtcattcgccgcgccaacgccaccgaatacggcctcgccgccggcgtggtgacgcccaacctcaaccgcgctcaccgaattatccaccagctggaagccggcatctgctggatcaacagctggggggaatccccggcggaaatgccggttggcggctacaaacactccggcattggccgcgagaacggcgtcatgacgctgcagagttacacccaggtgaagtccatccaggttgagatgggtaaattccagtccatattttaaccgggaggtttttttgcaatttgactacatcattattggtgccggctccgccggcaacgttctggcaacacgactgactgaagatccaaacaccaccgtcctgctgctggaagccggcggccctgactaccggttcgatttccgcacccagatgcccgccgcgctggcttatccgctgcagggcaagcgctacaactgggcctacgagaccgaacctgagccgtacatgaacaatcgccgcatggagtgcggacgcggcaaagggctcggcggatcctcgctgatcaacggcatgtgctacattcgcggtaacgccatggatctggataactgggccaaagagccgggtctggaacactggagctatctcgactgcctgccctactaccggaaagcggaaacccgcgatatcgggcctaacgactaccacggcggcgatggcccggtgagcgtgacgacgccgaagccgggcaataatccgctcttcgaggcgatggttgaagccggggtgcaggcgggctatccgcgtaccgacgatctcaacggctaccagcaggaaggctttggcccgatggaccgcaccgtgacgccgcagggccgtcgcgccagcaccgcccgcggctatctcgaccaggcgcgcggtcgcccgaacctgaccatccgcacccatgcgctgaccgatcacattatttttgccggcaagcgcgcggtgggcgtcgagtggctggagggagagagcacgatcccgtcaaaagcgacggccaacaaagaggtgctgctgtgcgccggggcgattgcctcgccgcagatcctgcagcgctccggcgtgggtaacccggagctgctcaggcagttcgatatcccggtggtgcacgatctccccggcgtgggtgagaacctgcaggaccatctggagatgtatctgcagtacgagtgcaaagagccggtatcgctctacccggcgctacagtggtggaaccagcctaagatcggcgccgagtggctgttcggcggcaccggcatcggcgccagcaaccagttcgaagcgggcggttttatccgcagccgcgcagagttcgcctggccgaacattcagtaccacttcctgccggtggcgattaactacaatggctccaacgcggtgaaagagcacggcttccagtgccacgtcggctcgatgcgttcgcccagccgcggccacgtgcgcctgaagtcgcgcgacccgcacgcccatccggcgatcctgtttaactatatgtcccatgagcaggactggcaggagttccgcgacgccatccgcattacccgggagatcatgaaccagccggcgctggataagtatcgcggccgcgaaatcagtccgggaatagaatgccagagcgatgccgaactggatgagtttgtgcgcaaccacgccgagaccgcgttccacccgggcgggacctgtaagatgggttacgacgagatggcggtggtcgatggcgagggccgcgtccacggtctggaaggattgcgggtggtcgacgcctcgatcatgccgcagatcatcaccggcaacctcaacgccaccaccattatgatcggcgagaagatggccgacgccattcgcggccgccagccgctgccgcgcagcaccgcgacgtattatgtcgctggcgacgcgccggttcgccgctaacaggtcaatgccgggcggcgactacgccttgcccggcctaccctgaggcgatgtaacgtagccccggtaagcgcagcgcgatcggggtgccgttccgggttttggccccataggttgatgttagcgaaacgcctccaggcgcttaatctgctgaccgtcggcagtaaagttctccgccgccagccacgcccgcagcgccgcatcgcgcgcaggccactcgccgtcgatgatggacagcatatcgctgtcgcgcgtccgccctttacgcaccagcctctgccgcagacgtccttcccagctaaagcccagccgctcggcggcgcggcgcgaggcgacattcatcgaatcgcatttccactccagccgacgatagccatggtcaaagccgtttttgagcagcagccagaccgcttcggtacccagcggggtgtttttcatccgtcgcgaccaggtgacatggccgatctcaaccgtgcccatttcccgttcgatcgccatatagctaacgatgcccaccgcctgctcgctacgcaggtcaaccaccgcatacggcaccagggcatcatcattcaccttgcccgcgatccagtgggcggtcgccgccacgctctccggccgcgtagacgccagccacgtccagtcgctgttgtcgccgagcgcataggcggcaaacagatccgccgcatgacggtcaacgtccagcggctccaggcggcaaaaacggccatttaacgccgtccggcgcaggacttgcgccccctgccagccagggaccaggtcgttcacctgctggccatactcattgatttccggcacacccacctcctcgcaatagacaatgcgttatagcaagaaccccgcagcggagaaaggcgcttctgcgcgaccggcaataacctgtcgttcttgaatatgcatttttagcataaggatatccttattttgactttacgccttatggcaagcggcctaacgtagcgaggcataaaacaataaaataaccattcttcagggattgcacatgaccaaaaaactgttgcctttactgctactgtcggcgctctccgccgccgcgcatgccgccacgccgcccaacacgctggtggtcgcccagggtctcgacgatatcgtcagcctcgacccggcggaagcgaacgaactctccagcattcagacggtccccagcctctatcagcgtctggtgcagcccgaccgcaacaaccctgaaaaaatcgtaccgatcctcgccgaaagctggcaggccgatccggcggcgaaaaccctgaccattaaactgaagccggatgccaaattcgcctccggtaatccgctgcgcccggaagatgtgattttctcttacacccgcgcggtgacgctgaataaatcgccggcgtttattctcaacgtgctcggctggcagccggacaacatcgccagccagctgaaaaagattgatgaccataccctgacgctgcactggaccgccgacgtcagcccggcggtggcgctgaatattctctccacccccatcgcctctatcgttgatgaaaaacaggtggcgccgaacgcgaaaaataacgacttcggcaacgactggctgaaaatgcactcggcgggcagcggggcctataaaatgcgcgtctaccagccgcatcaggccatcgtgctggaggccaacgccagctcccccaccggcgcgccgaagatcaagagcatcattattaaaaacgtccccgacccggcttcccgccgcctgctgatccagcagggggatgccgacgtggcgcgcgatctcggcgctgaccagattgccgccctgcaggataaacccggcgtgaaggtgctgagcatcccgtccgccgagcagaactacctggtgtttaataccgccaacagcgccaacccgctgctcaataacccggccttctgggaggcggcgcgctggctggtcgattatgaaggcatcaccaaaaatctgctgaaaggccagtactttattcaccaaagcttcctgccggccggcctgccgggggcgctggagactaatccgttcacctttgatccgcaaaaagctaaggctatcctcgataaagcgggcattaaggatgcccacttcaccctcgatgtggagaacaaaccgccgtttatcaccatcgcccaatcgctgcaggccagctttgcccagggcggggtgaaggtggatctgctacccgccgccggcagccaggtctatgcccgggtgcgcgcgaagcagcatcaggcggcgatccgcctgtggatcccggactactttgatgcccactctaatgccagcgcctttgcctggaacgatggtaaatccagcaccgtggccgggctcaacggctggcagatccctgagctgaataaagccaccctcgccgcggtggcggagccggacccggcgaaacgcctcggcctgtacaaaacgatgcaggaaaccctgctccagcattcgccgtacgtcttcattgaccagggaaaaacccagatcgtggtgcgtgacaacgtgaagggctatcagcagggactgaacgccgacatggtctggtacgataacgtgaccaagtaagcgggttttgtcaccgggtacggcggccttgtctgcccggatgaccgactcctcacccaggcccggtcggcatcgcgccgccgggtacaatgctgatataccaggaatttccattttccatgccatcgtttcccactcaccttacccgcctgctgcaggggctgtttacgctgctgctcacgctgttcgggctgttgctggtcaccttctcgctctccgcgctgtcgcccgtcgaccgcgtactgcagatcgtcggcgaccatgccagccagtcgacctatgaccaggttcgccatcagctgggtctcgaccagccgctgccggtgcagttctggcactacctggtcaacctggcccatggcgatcttggcatcgccagcgctaccggccagccggtgctccacgacctgctggcggtctttccggcgacccttgagctggcgaccctggcgctgatcgtcggcgcggtactgggcatcgtcgccggggtgctgtgcgcccgttacgccggttcgccgtgggatctggcggttcgcacctttaccctgttgggcaactcggtgcccattttctggctcggcctgctgatgctggccctgttttacgcccggctgcagtgggcgccgggcccgggtcgcctcgacgatatttatcagtacaccgtcgagccacgcagcggttttgcgctgatcgacacctggctctccggcgataccgcggcgtttaaaaatgcgatcggccatctggcgctgccggtgctggtgctggcctattactcgctggcgagcatcacccgcctgacccgctccgcctgtctgagcgagatgaacaaagagtacattctgctggcgcgggccaaaggggccggagagatgacgattctgctgcgccatgtcctgcccaatatccgcggcactctgctgacggtaaccgctctagcctggacctccatgctcgaaggggcggtgctcaccgaaaccgtcttctcgtggccggggatcggccgctacctcaccacggcgctgttcgccggggataccacggcgatcatgggcggcacgctgctgatcggcgtgagttttgtgctgatcaataacctgaccgacctgctggtacggttaaccgatccgagggtgcgctgatgccgacttatctgtttttacgccgtctgcgccgctcacccgccgccttcagcggcctgaccctggtgatcctgctggtgctgaccgcgctgttcgccccgtggctggcgccgcacgatcccaactggcaggatgccgccgctcgtctgcaggggcccggggcgggacactggctcggcaccgacagctacggccgcgacctgctgtcgcgcttgctctacggcgcccgcccggcgctgggtctggtggcgctggtgaccgccattaccctgcccgtcgggctgctggtaggtatcctctccggttactatggcgggtggctggagcggatactgatgcgctttaccgacgtggtgatgtcgatgccgcgcctgatcctcgccttcgcgttcgtggcgatgcttggcccggggctggtcaacggcgcgctggcgttagccctgaccacctggccggcctacgcccgtcaggcgcgcagcgaaattcagcgcctgcgccatagcgactacctcgccgcggcggagatgctgggcattcgcggcgggcggctgctggtcggccatattctgccgctgtgtctgccgtcggcgattgtccggctggcgctcgatctggcgggcattatcctcgccgccgccgggctcggctttctcggcctgggcgcccgcccgccgatggcggagtggggagcgatgattgccgacgggatgcaggtgattttcgaccagtggtggatcgccgccatccccggcgcggcgatcctgctcgccagcctggcgtttaacctgctgggcgatggcctgcgcgatattctggagccgcaacatgactgacatccgactgaccgtccagggactcgccgtcgactatcccaccgcccgggtggtggacaacgtcagcttcaccctcggcaacgagcggctggcgctggtgggcgaatccggctccggcaaatcgatgaccgcccgggcgctgatgggcctggtgcgcaagcccggggtggtgagcgctgaacggctggaggtgctggggcgcgatgtgctgaccctcagcgcccgcggctggcgcgcgctgcgcggcaacgatatcgccatggtgctgcaggacccgcgctatgcgctgaatccggtgcagaccattcagacgcagctggaggaggcgttaaccctccatcagcgtctcagccgccgcgcgcgcgccgaggcggtcaaagacgccatcgccgccgtcggtctggatctgccggtcctcagccgctatcccggcgaactctccggcgggatgggacagcgggtgatgatcgccctcgcgctgctcaataacccgaaggtgctgatagccgacgagccgacctcggccctcgacgcccgcctgcgcaaccagatcctcgagctgctggtggagcagagcgcgcagcggcagatgaccatgttactgatcagccacgatctaccgctggtagccgcgcattgcgatcgcgtgctggtgatgtaccaggggagacaggtcgacgagatgccggcgcgggcgctgccgagcgcgacgcacccttacacccgcaccctgtggacctgccggccaaatgcgcacacctacggccagatgctgccgaccctcgacagaacccaggactttacggagacagcccatggcgatcgttaatcttcaggatttacaggttacattcggcgcgaagacggcggtctccgccgccagtttccgtgtcgacgccggggaaaccttcagcctgatcggcgcctcgggctgcggcaaatcgacgattttgcgcgtgctggccggattgcagcgtgaatggcgcggcagcgtggatctgctcggccaggccattatgccgggcgcccgctttcagggcgatctgcggcgcaacgtgcagatggtgtttcaggatccgtacgcctcgctgcatcccaaccataccctgtggcgcaccctggcggagccactgcagatccacggcatccgcgacgttgccccgcgagtaaccaccgcccttgagcaggtgggtctggccgccgacgccgtgcgccgctatccgcatcagctctccggcggccaacggcagcgcgtggccattgcccgcgccctgctgctgcgcccgcagatcctgctgctggatgagccgacctcggcgctggatatgtcggtacaggcggaaatccttaatctacttaatcgtctgaaacaggagcacggcatgacctatctgctggtcagccacgatgccgacgtcatcgcccatatgtccgatcgggcggcgtttatggcggagggcgtgatccagcgctttttcgatcgcgaagcgttggtcaacggagagcaccggatgaggtgaggtcagcggatgtgcggttgttttgtcgggtggcgcttcgcttacccgacctaggattcgcgcaacctgtcgttaatttattcaccagtcttgctgaaactgccggtgttgcggcctcaacatcgctgagacgttcccggaaggccggggcagcccgcatggatgcgggctgagggccgtgttttgcacggacgctgcctcggcccgacccgaagcctgc

SEQ ID NO: 169 - DNA, 40291 bp, Unknown
  source: /note="Description of Unknown: MKP2_2161_1 Mutant Bacteria sequence"
gtggggcggggggcgcgcgacccccgcggccgcccctgcggcccgcgtcggcggcgtcggctgggtatacgcgacggatgccggccagccggaaagtaaacaggcggcggtggcgatcgccgcctggcaaccggcctggcacagcgagcttttttgccgcgaaccgctaccatttcctgcggcctggcactggcggcggcgggcggcgccaggcgtgctgcactactcgctggccggggaggcatctgcccgacagtggctcagcgcgtggtgcgcccggcgcggctggcagttacaggtggctgacggcggtgcggtgtggaacctgctggcctggcatcagggaaggctgatgctcggctggtggagcgatgcgcgcgagccggcggtggattgcgcatggataagcgctgcctttgccgcgccgccgtccgatgctgtccaacgacatgccttgcttagcggccgaccgggcgccgccgtcgcgccgcgggggcggatcgtctgcagctgctttggggtgggggaatggtcaattaacgaggccatcgccagcggctgcgccagcgtcggggcgctgggtgggaagctgaaatgcgggaccaactgcggctcttgcgtgccggagctcaacgcgctgctggcggcgcagcgaacccgggcgtaacggtggcgcgcggcgacgcctccggttgggcggcaccttacccaaccggtttcagcttattcctggaattgcccacagggctgcgggagcagggaaaaaacgataaactaacacttctatccatttttgtgagcttgcgcaaactctgttaatgcctgtgtcgttccgtttgttgccaacgttgacctttctcctgctgttgccgggcgttcccgtctgggcgctgaccgccagcgacaccacccgccctgcgcaagcgcaagatccgctgcccgatatggggattgctccccaggttgatgacgacgcccggcactttgccgaagtggcgaagaagtttggcgaggccagcatgagcgacaatggtctgacggcgggtgaacaggcgcagctgtttgccatcagtaaaatcggcaatgaagtgagtcatcagctggagagttggctctcgccgtggggcaacgccaatgtcgacctgctggtcgataaagaggggaaattcaccggcagtaaagggagctggttcgtgccgttgcaggataacgaccgttatctgacgtggaaccagtactcggtgacccggcgcgagcacgatctggtgggcaacatcgggcttggccagcgttggcgggtcggcggttggctgctgggctataactcgttttacgataaagtgctgagcgaaagcctggcgcgcggcagcgttggcgccgaagcgtggggagaatatctccgcctgtcggcaaactattaccatccgcttggcgactggcagctacgcgataatcagactcaggagcagcggatggccgcagggtatgacgtcaccgcccaggcgcggctgccgttctaccagcacatcaacaccagcgtcagcgtcgaacagtatttcggcgatagcgtcgatctgtttcactccggcaccggctaccataatccggtggccgtctccgttgggctcaattacaccccggtcccgctggtcacggtgaccgctaagcataagcagggggaaaatggcgtcagccagaacaatgtgggcctgaagctaaactaccgctttggcgtaccccttaagcagcagcttgcggcagacgaggtggcgatcagcaactcgctgcgcgggagccgcttcgatagtccggagcgggataatctgccggtggtggagtatcgtcagcgcaaaaatctgacggtctatctggccacgccgccctgggatctgcagtccggggagacggtgcagttgaagctgcagatccatagtctgcatggcatcaaggcgctgcactggcagggagacacccaggccctcagcctgacgccgccggtagatgccagcagccccgatggctggagcatcattatgccggtgtggaacagtgaaccgggcgccgcgaaccgctggcgcctgtcggtggtggtggaggataaacaggggcagcgcgtctcctccaatgagatcgccctggcgttgaccgagccgctggtcaagtttaccacgccaggcgtctcctggacggactcgccttagaagattcgctcctggtggacccataccgccgcttccacgcgggatttgagcttcattttcttcagcatgtgcttcacgtgtactttgacggtgctttcggtgatatccaggcgacgggcgatcattttgttcggcagtccctgggctatcagcttgagaatgtcgcgctcgcgcggggtcagctggctgatgtcgcgatcggaggtggcgcggttggcgcgcaggctggcggccagcaccggcgttaacgcttcgcttaataccatctctccggcggccgcctgctgcagcgctttcagcagatcttccggttccatgtccttcagcaaatagccatcggcgccgcgcttcagggcggtgacaacatcctcttcatggttggagacgctgaagaccactacccggccagaaagggatttctcacgcagcttatccagcgtctccagaccgttcatgcccggcatattaaggtccagcaggatcaggtcaggatccagcgacccggccagctcgataccttgcgcgccattgctggcctcgccaatcacctggatgtccggcgccatgctgatcaactgtttcacgccggtgcgcagcatcggatggtcgtcaatgagaaggatagttgcccgttcctgttgactcatgagggtctccttattggatggaaaacgttttttccgggataaacgtgacgatcacttcggttccaccggtttcccggcgtcgtacctgacagtcaccgcgcaagctctgggcgcgatcccgcataataattaaaccgtaatggttactccgttcggcgtggtccggtacgccgcggccgttatccgctaccaccagacgaacctgattatcgcgttgtgacaccgtcacggttacttcggttgcgctggcatgcttcagagcgttgctcaacgcttcgcgagcgatctgcagcaggtggatcgcctgatgcgagggcacaaagcgcggcgggagctggtaatcaagctgcaccgtaaagccgaagtgggcgctgtactcctgacagctggcctccagcgccgggcgcagccccggctcggtcaactgcaggcggaaggtggttaacagctcccgcagctgggcccacgaggtattcagttcgttacggatctgccccagcagctggcggctttccgtcggcaaggcgtcgccttgcatctgcagacagctaacctgcatcttcatacaggatagcgactgggcgatggagtcgtgcagctcgcgggcgatagtggcccgttcttccatgacgatcagctgctgctgcttctcctgatggcggtccagcgccagggtgctggtcagctgttccaccagggtatccaccagctgctgctgatcgtggctgagatggcggccaaccggcagcgtcgccagcaggatgccgtactgactatgcgcatctgacagccgccacttcagcgttgttcccccatccggcagcggcggcagattgcgtggacagaggtagcagcctttatcatcacagtcatcatccgagtggcaggtaaactcctggtgattatcttcgtcttccaggtcgtaaacccgtacctcgatatcgcgcagcagcgtcagcccctgcaggccattcagtaccggcgaaatacgttcgcagagcggggcgctggagtgcagccggcggttggcctgccataagaaagcaaggatctcgttcttctgctccagtccggcggtcttctcctgcacccgccgctcgagcaccgcgtagctttccgccagctcttccgacatgttattcagcgccatgccgagggtcgccatttcgttgcggccgctgatgtgcgcccgctgggtgaaatcacgctggctcaccgcgcgcgccatgctcagcagctgtttccacggccgcagcaggcgggcgcgtaaccagatgatagtgaagatcagcagcagcgccataccaatggcgaggatgcgatggatccagaccacccgttcgatacgctgctcggtggtgtggtcgaatgcggtgaccaactggtcgatacgatcgacaaagtcggcgacatcctgggccacttccgcctgattgactgcgcgctgcatcccgggggccagcgccagctgccagtactgctgcagggctttaagctggatttcctggccgtcgcggcgggcggaattttgcagctccgggctgaagacggtggcggtcatgtccgccaccagtttttgatcgttttcattcagcgggatcgccgccagcagccggtagctttgcatacgcaatgaaccggccttgttaatggcgtgcgcgctgccctgcacgccgttcaccaggcgcgcggagatcgccatgccggcgacgccaataatcgtggcgagcagcacgattaacgccagttgattgaccagcgtcagcggggtaaaaagacgttttaacatggaatgcgtggctcctgaccggtcatgtctccgggagtggcgcttattctcgactatcccctggagtatacccatacccctaaagagttactccttaattgtcggtggtaggcgatgttaggggggggattatacgcaacccggcagcagcgtgaaaaaccacacttttttccccgccattctctactcacttggaggcatggtttatttttgcacaaattagctcgcgcttttcctttgatttatatcaacttaccgccccgggtaacccctaaggtagcggcaggaaatatgaataatcagaggtatctatgagtcaatcttccctcccggagaaggctaaccgctcggtcataaccgactggcggcctgaagatcctgaattctggcaacagcgcggccatcgtgtggcaagccgcaatttatggatctccgttccctgtctgttactggcgttctgcgtttggatgttgttcagcgcggttgccgttaacctcaacaaagtaggctttcagtttacaaccgatcagctgtttatgctgaccgcgctgccggcgctgtcaggcgccttattacgcgtgccttacgcctttatggtgccgctgttcggcggccgtcgctggacggcgttcagcaccgggatcatgattgtgccatgcgtctggctgggcttcgcggtccaggatacctctacgccgtttagcatcttcgtgattatctctctgctgtgcggcttcgccggagccaactttgcctccagtatggccaacatcagcttcttcttcccgaaagcgaagcagggcggggcgctcggcgttaacggcggacttggcaatatgggcgtcagcgtgatgcagctggtcgcgccgctggtggtctcgatctctatctttgccgtttttggcggtaacggtagcgagcaaccggacggctcgatgctgtatctggaaaacgccgcgtggatctgggtacctttcctgattattttcactctggcggcgtggttctttatgaacgacctgtcggcttcgaaagcgtcgctgagcgagcagttgccggtacttaagcgcctgcatctgtggattatggcgctgctctatctcgcgaccttcggctcctttatcggcttttccgccgggttcgcgatgctgtcaaaaactcagttcccggatgtgcagatcctgcattacgccttcttcggcccgttcattggcgcgctggcgcgttcgatgggcggggcgatctccgaccgcctcggtgggacccgcgtaacgctggtcaactttgtggtgatggctgtcttctgcgcgctgctgttcctgaccctgccgaccaacggccagggcggtaactttatcgccttcttcgcggtgtttatggtgctgttcctgaccgccgggctggggagcgcctccaccttccagatgatctccgtgatcttccgtaagctgactatggaccgcgtgaaggcccagggcggcagcgaagcgcaggcgatgcgcgaggcggcgaccgataccgcggcggcgctgggctttatctccgccattggtgctatcggcggcttctttattccgaaagcgttcggtatctcgctggatctgaccggctcgccggccggggcgatgaaagtgttcctcgtgttctatattgcctgcgtggtgatcacctgggcggtatacggtcgtaagcgtcagtaatcggccgcggtaacgttggcgtataaaaaggcgcgctccccacggaggcgccttttttaaccgcttaattagttacaacatactgttggagaatattgtccgcatcgaccgctgagccagaacaggtgggcttgccagtgaaatggctctaccccttaatacctccgttgttaacaaatcccgatgaggcgccgctttttgaggtgaaaatcattaaaaaacaataatttaaaaaataacatcttataccaccttggtggtaatcgaggttttgctgcacagtaacaagccagttcggattgatcgctatcaattctcgccctctttcatagcgttaccttcgctgcaaatccagcaatgtcgatttatcagagagccgtcaggctccatatcaggagaaacccgatgagtaaattcctggaccggtttcgctacttcaaacagaagggtgaaacctttgccgatgggcacggccagcttctaaacaccaaccgggactgggaggatggataccgtcaacgttggcagcatgacaaaattgtgcgttccactcacggtgtcaactgcaccggctcatgcagctggaagatttatgtcaaaaacggtctggtgacctgggaaacgcagcagactgactacccgcgcacccgcccggacctgccgaaccacgaaccacgaggttgcccgcgcggcgccagctactcctggtacctgtacagcgctaaccgcctgaaatacccgctgatgcgtaaacgcctgatgaagatgtggcgggaagcgaaagttcagcatagcgatccggttgaggcatgggcgtcgattatcgaagacgccgacaaagctaaaagcttcaaacaggcccgcggtcgcggcggttttgtacgttcctcctggcaggaagtgaatgagctgattgccgcctccaacgtctataccgtcaaaacctacggtccggaccgcgtggctggcttctcgccgatcccggcgatgtcgatggtctcctacgcgtccggcgcccgttatctgtcgctgatcggcggcacctgcctgagcttctacgactggtactgcgacctgccgccggcttcgccgatgacctggggcgagcagaccgatgtgccggaatccgccgactggtataactccagctatatcatcgcctggggctccaacgtgccgcagacccgcaccccggatgcgcacttctttaccgaagtccgctataaagggaccaaaaccgtagccatcactccggactacgccgaaatcgccaaactctgcgatctgtggctggcgccgaagcagggtaccgatgccgcgatggcgctggcgatgggccatgtgatgctgcgtgaattccacctcgataagccgagccagtatttcaccgactatgtgcgccgctataccgacatgccgatgctggtgatgctcgaggagcgcgacggttattatgccgccggccgtacgctgcgcgcatccgacctcgtggattcccttggtcaggagaacaatccggaatggaaaaccgtcgcctttgacgagaagggcgacatgaccgtaccgaacggctccctcggattccgctggggcgacaaaggcaaatggaacctcgaacagcgcgacggtaaaactggcgaagagattgagctacgtctgagcctgctgggcagccatgatgaagtggcgaacgtcggcttcccgtacttcggcggcgaaggttctgagcacttcaacaaagtcgatctggaaaacattctgctgcacaaactgccggccaaacgcctgcagctggccgacggctctaccgccctggtcaccaccgtgtatgacctgaccatggctaactacggcctggagcgcggtctgaacgatgacaactgcgccgccggctacgatgaagtgaaagcctacaccccggcgtgggcggagaagatcaccggcgtctcccgcgcgcatatcatccgtaccgcccgtgaatttgccgataacgccgataaaactcacggtcgttcgatgattatcgtcggggcgggcctcaaccactggttccacctcgacatgaactaccgcggcctgatcaatatgctgatcttctgcggctgcgtcggtcagagcggcggcggttgggcgcactatgtgggccaggaaaaactgcgtccgcagaccggctggcagccgctggcgttcgcccttgactggcagcgtccggcacgtcacatgaatagtacctcgtacttctataaccactccagccagtggcgctatgaaacggtgaccgcgcaggaactgctgtcgccgatggcggataaatcccgttacagcggccacctgatcgactttaacgtgcgcgcagagcggatgggctggctgccgtcggcgccgcagcttggcgtcaacccgctgcgtatcgctgacgaagcgaaaaaagccggcatgaccccggtggattacaccgtgaagtcgctgaaagagggctcgattcgctttgcggccgagcagccggaaaatggcaaaaaccacccgcgtaacctgtttatctggcgttccaacctgctgggctcctccggtaaaggccatgaatacatgctcaagtacctgctgggtaccgagaacggcattcagggcaaagacctgggcaagcagggcggcgtgaagccggaagaagtcgaatggcgggataacggcctcgacggcaaactggatctggtggtgaccctcgatttccgtctgtcgagcacctgtctctactccgacatcgtgctgccgaccgccacctggtacgaaaaagacgacatgaatacctcggatatgcatccgtttattcacccgctgtcggccgccgttgatccagcctgggaatcgaagagcgactgggagatctataaaggtatcgcgaagaaattctctgaagtgtgcgtgggccacctcggtaaagaaaccgacgtggtgaccctgccgatccagcacgactccgccgcggaaatggcgcagccgctggatgtcaaagactggaaaaaaggcgaatgcgatctcatccccgggaaaaccgcgccgcatattattccggttgagcgtgattacccggcgacctacgagcgtttcacctcgatcggcccgctgctggaaaccatcggcaacggcgggaaaggcatcgcctggaacacccagagcgagatggatctgctgcgtaagctcaactacaccaaggcggaaggcccggcgaaaggccagccgaagctggaaacggccatcgacgccgcggaaatgatcctcaccctggccccggaaaccaacggtcaggtggcggtgaaagcgtggcaagcgctgagcgagatcaccggtcgcgagcatacgcacctcgcgctgaacaaagaagacgagaagatccgtttccgcgacattcaggcgcagccgcggaagattatctccagcccgacctggtctggcctggaagatgagcatgtctcctacaacgccggttacaccaacgttcacgagctgatcccgtggcgcacgctgtccggccgtcagtcgctgtatcaggatcaccagtggatgcgcgacttcggcgaaagcctgctggtctatcggccgccgattgacacccgttcggtgaaagcggtgatgggcgagaagtccaacggcaacccggagaaggcgctgaacttcctgaccccgcaccagaaatggggtatccactcgacctacagcgataacctgctgatgctgaccctgtcgcgcggtgggccgattgtctggatgagcgaagcggatgcgaaagatctgggtatcgaagataacgactggatcgaagtcttcaacgccaacggcgccctgacggcgcgtgcggtggtgagtcagcgcgttccagccgggatgaccatgatgtatcacgcgcaggaacgtatcgtgaacctgccgggctctgaaatcaccggtcagcgcggggggatccataactccgtcacccgtattacgccgaaaccgacccacatgatcggcggctacggccacctggcctatggctttaactactacggcaccgtcggctccaaccgcgatgagtttgtggtggtacgtaagatgaagaacattaactggttagacggcgaaggcaacgaccaggtacaggagagcgtaaaatgaaaattcgttcacaagtcggcatggtgctgaatctcgataagtgcatcggctgccacacctgctcggtgacctgtaaaaacgtctggaccagccgggaagggatggaatacgcctggttcaacaacgtggaaagtaagccgggcgtcggtttcccgaacgactgggaaaaccaggaaaaatggaagggcggctggatccgcaaaatcaacggtaaactgcagccgcgcatgggcaatcgcgcgatgctgttgggtaaaatcttcgccaacccgcatctgccgggcatcgatgattactacgagccgtttgattatgactaccagaatctgcataacgcgccggagagcaaacatcagccgatcgcccgtccgcgctcgctgatcaccggccagcggatggacaagatcaccagcggtccgaactgggaagagatcctcggcggcgagtttgaaaaacgcgccaaagatcagaacttcgacaacatgcagaaggcgatgtacggccagttcgaaaacaccttcatgatgtatctgccgcgcctgtgcgagcactgcctgaacccggcctgcgtcgcgacctgcccgagcggcgccatctataagcgtgaagaagacggcatcgtactgatcgaccaggacaagtgccgcggctggcggatgtgtatcaccggctgtccgtacaagaagatctatttcaactggaagagcgggaaatccgagaaatgcatcttctgctacccgcgtattgaatccgggatgccgacggtatgctccgaaacctgcgtgggtcgcatccgctatctcggtgtcctgctatacgacgcggacgcgattgaaaacgccgccagcaccgagaacgagaaagatctgtatcagcgtcagctggacgtgttcctcgatcccaacgatccaaaagtgatcgagcaggcgctgaaagatggcgtaccgcagggggtcattgaagctgcgcagcagtcgccggtttacaaaatggccatggactggaagctggccctgccgctgcacccggaatatcgcaccttgccaatggtctggtacgtgccgccgctgtcgccgattcagtccgccgccgatgcgggtgaactgggtagcaacgggatcctgccggacgtggaaagcctgcgtattccggtgcaatatctggcgaacctgctgaccgcgggcgatacccagccggtactgctggcgctgaaacgaatgctggcgatgcgccactataagcgtgcggaaaccgttgacggcgtcgttgatacccgcgcgctggaagaggtggggctgagcgaagcgcaggcccaggaaatgtatcgctatctggcgatcgccaactacgaagatcgtttcgtggtgccgagcagccatcgtgaacaggcgcgagaagcgtttccggagaaaaacggctgcggctttagctttggcgatggctgccatggctctgacagtcagttcaacctgttcaacagccgtcgcatcgacgccatcgacgtgaccagcaaaacggagccgcacgcatgattgaactcgtgattgtatcgcgtctgctcgaatatcctgacgctgccttatggcagcatcagcaggagatgttcgaggcgctcgcgtcatcagagaaactcagcaaagaggatgcccacgcgctgggcgttttcctgcgcgatttagtggctcaggatccgctggacgcccaggcggcctatagcgaactgtttgaccgcggccgggccacctcgctgctgctgtttgaacatgtccacggcgaatcccgcgatcgcgggcaggcgatggtggatctcatggcgcagtacgagcgccacggcctgctgctggatagccatgagctgccggatcatctgccgctatatctggagtatctggcgcagctgccggaagaggaagcgcttggcggcctgcgggacgtcgcgccgatcctcggtctgctcagcgcgcgcctgcagcagcgcgaaagtcgctatgcggtgctgttcgagctgttgctgaagctggccaatacgcaggtcgacagccagaaggtggcggagaagattgccgacgaagcgcgcgacgatacgccgcaggcgctggacgccgtctgggaagaagaacaggtcaaattctttgccgaccagggctgcggcgagtcggaaatttccgctcaccagcgtcgttttgccggagccgtggccccgcaatatctgaatatctctaacggaggacagcaataatgcacttcctgaatatgttcttctttgacatttatccgtacattgcgggttcggtgttcctgattggcagctggttgcgctatgactatggccagtacacctggcgcgccgcctccagccagatgctggaccgtaaggggatgaacctggcgtcgaacctgttccatatcggcatcctgggtattttcgccggccacttcctcggcatgctgaccccgcactggatgtatgagtccttcctgccgatcgatgtcaagcagaagatggcgatgatcgccggcggcgcctgcggcgtgatgaccctggtgggcgggttactgctgctcaagcgtcgtctgctgagcccgcgcgttcgcgccaccaccaccggagcggatattctgatcctctcgttgctgatggtgcagtgtgcgctcggcctgctgacgatcccgttctccgctcagcatatggacggcagtgaaatgatgaaactggtcggctgggcgcagtcggtggtgacgttccacggcggcgcgtcacagcatctggatggcgtggcgtttattttccgcgttcacctggtgctgggcatgaccctgttcctgctgttcccgttctcccgtctggttcatatctggagcgcgccggtcgaatacctgacgcgcaaataccagattgtccgcgcccgtcgctaactggcccgcgactgctcactgaccccgccgcggcggggttttttttcgccccagccgagattattccctgcggcggcaaacagaataagcatcccaccgagcaattgcaccgcggataacgcatggttgaagaccagatagtcgaccaccatcgccaccagcggataaataaaggagagcgaaccggtaacgggcgtcggcagtttctgtatcgcgctatataaaagctgatacatgatcccggtatggacgatgccgaggatcagcagatagcgccaggggaagctggccgtcaattctggggcatgcaccagcggcagcagcatcacgacgccgacgagaacctgaatgaaggcgatatgctgcgcggggagcggatgcagtttgcgcgcgatgatggcggtcagggcatagaagaatgccgcgcccagcgccagcaacacgccggtggtaagcccctcttcgtgtgcaggcgtcagctcgctcgacagcaggatcactaggccgccaaaggccagcagtaaccatccccatttcacggcgctgacccgttcccccagcaccatccccatcagtaccagcataaacggctgggtgttatagaccacggtggccataccgattgagatccgcgaataggcggcaaacagcagcagccagttgacgaccagcgccgcgccgccaatcaccgccagagcgagagtgaaacgcgttagccggctgaagggctggcggcttaacacgataaacaccagcagggttagcgcgccaatcaggcagcgccagaacaccacatcagtcaccggcaaaccagagagcagcacgaacgcgccgatcgagccggagattatcattgccaggctcatctgccagacgccgcgggtaagttgcatttttcacctccaccattttttagttattgtgcgaaaaaccctgacagggtgatatggctgaattaaggtagaaggggggaaatgccttttataattaggtgaaatatatgaatgacgtacttgatgaaattgacagggcgatcctcacctgcctgactcaggatgccagagtttcgctcaaggtcctgagcgcgcgagtggggctgacctcgccgagcaccgccgagcgggtgaagcgcctggaggagcggggtgtcattcagggctatggggcgcgggtaaatctcgccgcgctgggctatagcctgcaggcgctggtgcgggtccggccgctgcctgggctgctgcagaaggtggataaatatatccaggcgatgccggaatgtattgaaagtgacaaggtgaccggggaagattgttttgtaatgcgtctcgtggtgcgcgatattgcccagctggataccctgctggacggtctggcggagtatgcgcagtgtaacacctcggtggtgaaaagctcgccggtaaaaaggcggttgccaccgctgtgagtttttccggaggcggtgctgcgcacctgtccgggctaccagacggcaccacttgtagcctcgctaagcgaagcgcgagcgatgagacagcagaacaggtggctgagagtgcaggaatgtgtagcctcgctaagcgaagcgcgagcgatgagacagcaggaccggtggctgagagtgcaacagtggtgggggaaggattactcggcgctaaagcgcctcgccttcgggccgttgcctgcggcaacgttctctcgcttcgctcaagtcgaaccttagtcgaagcttctcatccttccccgtggggcagaatatagcgtatcgcaggtggaataagctgggcaatacatgaagagatgatggtgggggaaggattactcggcgctaaagcgcctcgcccttcgggccgttgcctgcggcaacgttctctcgcttcgctcgagtcgaaccttagtcgaagcttctcatccttccctgtagggcagaatatagaataccgtaggtagattatgctgggcatgacatggggagatggtggtgggggaaggattcgaaccttcgaagtcgatgacggcagatttacagtctgctccctttggccgctcgggaaccccaccaggggtaaaatcacattgtaggctattcagcaaaatgaatggtggtgggggaaggataactcgtcgctatctttcctcgcccttcgggccgttgcctgcggcaacgttctctcgctggcgctcgagtcgaaccttagtcgaaggttcttacccttcccgctaagtgcaaacatcgtttacgcttgtcggggaaaccatatcactgtagtgaataatggtggtgggggaaggattcgaaccttcgaagtcgatgacggcagatttacagtctgctccctttggccgctcgggaaccccaccacggggtaatgcttggtactggcctgcttccttctcgggaagcggggcgcatcataccaaatgatgcgcccctgtaaagcattcgtttgacaaaaataaactggttgcctgatttttacacgtaacgccgtaaagctaaccaattcatttctcagtcgattaaagaataatcgtccggttaccgtaaacgaagacgcgctgcgccagtacctgatacagcgctcggctcaagacgtttttttcgacatcacgcccagcgcgcatcatatcttctgcggtataagtatgatcgacgtgaatcacgtcctgcatgatgatcgggccttcatccagattgtcattcacgtagtgggcggtagcgccaatgattttcacgccgcgctcataggcctgatgatagggacgggcgccgataaacgccggcaaaaacgaatggtggatattgatgattttgttcgggaagcgggcgacaaattctggcgtcaggacgcgcatatacttggccagcaccacgtaatccggttcgtgggcggcgatagcatcgcccatccgctgatcgtgttcttcgcggctcagtccttcatggctgaccagctcaaacggaataccaaagcgctccaccaacgagcgcagggtgtcatggttgccgataaccgcggcaatatcgacatccagcccgccgtagttggctttcatcagcagatcgcccagacaatgcgcctctttcgtcaccagaatcaccacccggcgacggcctgccggattcagctcgcggatggagccttcaggcagggcgctgtcgagatcggccagcagagtagcgtcgttaaaaatgccttccagttcggtgcgcataaagaaacgaccggtacggtggtcaacaaactcattgttctgcacaatgttgagttcatgcttgtagcagatattggtgatacgcgcgatgaggcctttctgatcagggcaaatagtgcgtagtactttacgttgtaatgaatgcatcgcgaggaaaatcctgtaatgtttgcaagcgctgtgccagcgttactggccgcagcattttttaaattttttacctgagccgcaggggcaggggtcgttacggccaatcagcggtcgtgtcccgtcgatatagtaccactgtccattttcttttaagaatctggaacgttcaataatggcgccagggcggttattgtcattaaagcgggcgacaaagctgacaaaaccttcatttggagctcgcccctcatcactggcgaacagggttaagcccagccattcggtctgggaaaaccctttctccagttcggcgcgaaattgctgcgcctgacaggacgggtgccaggttttgattagatagtcagcgtctttcatgacgaacgcgctataacgggagcgcataagctgtgacgggcccggcgcaagctcagcgccggacagatatcgctggcaacatgagctatactccagtgcgctgccacaggggcataattgcgacaaaactgcctccatggaagaaagagtaacggcgcttctacgccaaagggcattatgttaactgagccgtgacaatgttgccacgctcagagtggaaggatagttattagtactaatgagaaagcttaaaattggtctggcgctaggtgcgggagccgctcgcggatggtcgcacattggcgtcatcaacgccctccagcgggccggtattgagattgatatcgtagccggttgttctatcggttcgctggtaggggcggcgtatgcttgtaaccgactcccggcactcgaatcatgggtctgctcattcagcaactgggatgtcctgaagctgatggatctctcctggcgccgggggggactgctgcggggggaaaaggtattcaatcattaccgccgcattatgcccgtcaccgagattgaacgctgcgagcgccggtttgccgctgttgccaccaatttaagcaccggtagggagctgtggtttaccgaaggcgatctacatttagccattcgcgcctcctgcagtatgccggggttaatgtcgccagtaaggcataatggttactggctggtcgatggcgcggtggtcaatccggttcctgtgtcgctcacccgggcaatgggagcggatattgtgattgccgtcgacctgcaacatgatgcccatcttatgcagcaggatttgttctcccttgaaacgccgcggcaggaagcggaagagaaggaggggccatggcatactcgtctgcgcgcgcgcttgacgcgaatgagttcccgccgtacggccgtgacgccgacggcgatggagatcatgaccacatctatccaggtactggaaaaccgtcttaaacgcaatcgtatggcgggtgacccgccggatatcctgttgcagccatactgtccgcaagtttcgacgcttgattttcatcgcgccggagaggcgattgccgcggggcaactggcgggagaaaagaaaatggatgaattattaccattagtgcgtacagccgtttgacgtacgagttactgacttaagcaaattctgacaggcgatagtgagaatagcgtgccactattgaattatcgtcagccaggggagatatcatgacgcagccattggcgggaaaacagattctgatagttgaagacgaacccgttttccgctcactcttgcatggatggctgacctcgctgggagcaacaaccttccaggcggaagatggcaaggatgccctgcataaaatgacggaggtgcatccggacctgatgatttgcgacatttctatgccgagaatgaacggtctggagctggtggaaacgctgcgtaaccgcggcgaacagttaccgatcctgatgatctccgccaccgaaaacatggcggatatagctaaagcgttgcgacttggcgtccaggacgtgctgttaaagccagtaaaagatttcgatcgcctgcgcgagaccgtttacgcctgtctctatcccgcgatgttcagttcgcgcgtggaagaggaagagcgtttatttgaggactgggatgcgctggtcagtaatcccatcgccgcttcaagattattgcaggaattacagccgccggtgcaacaggaaatgtcgcactgccgtattcattatcgacaactggtgtcggcagacaagcccggtctggtactcgatatcgcgccgctttcggaaaatgatttggctttctattgtctggatgtcacacgcgcaggcgataatggcgtgttggcagcattattgctgcgcgcgttgtttaatggtctgctgcaggagcaactggcgcaccagggacaacggctaccagaaatgggaagtttgttaaaacaggtgaatcaactgctgcgtcaggcaaatcttccgggccagttccctctgttagtagggtattaccacagcgggctgaaaaatttaattctggtgtcagcgggacttaatggcacgctgaatacaggggagcatcaaattcagattagtaatggcgttcctttggggacgctgggtgatgcttatcttaaccaaattagccaacgctgcacctcgtggcagtgccaaatttggggggctggcggtcgtttacgcttaatgttgtctgcggaatgagcaattgcgtttatatctaagcagacgggattacctcttgccctttagcggtggtaacatcgagctgttttatgcgtaaaagtcctaattcgaggctatcggcagcttttcagaccagtaaatacgcggttgactgatatactcgacacgttatttgtaacgagaagtttaaaaaacaaacagtccaggagatttcaatggctgcccttaattctaaagtcagaaaagcggttatcccggttgcgggattaggcaccaggatgctgccggccaccaaagcgattccaaaagaaatgctgccgctggtagataagccgttaattcagtacgttgttaatgaatgtatcgctgcaggaattactgaaattgttctggtaacgcactcgtcgaaaaactctatcgaaaaccatttcgataccagttttgagctggaagcgatgctggaaaaacgtgtaaaacgccagctgctggaagaagtgcagtctatttgcccgccgcacgtgactattatgcaagttcgtcagggcctggcgaaaggtctaggtcacgcggtgctgtgcgcccatccggtagtgggagatgagccggtcgcggttattctgccagacgttattctggatgaatatgaatccgatctgagccgcgataacctcgctgagatgatctctcgcttcgatgagactggcgccagccagattatggttgaacctgtcgaagacgtaaccgcttatggcgtggttgactgcaaaggcgaatccctgaagccgggcgaaagcgtaccgatggtgggcgtggttgagaagccaaaagctgacgttgcgccgtccaacctggcggtggtggggcgttatgtcctcagcgccgatatctggccgctgctggcgaaaacccctccgggcgctggtgatgaaattcagctgactgacgccattgatatgctgatcgagaaagaaacggttgaagcttatcatatgaaaggcaagagccatgactgcggtaataagcttggctacatgcaggcgtttgtcgaatatggtattcgtcacaaaacgctgggcgacgattttaaagcctggctggaaacggcggtagcgaagtaatccgccgcgcggttgaaagcacaaaccgggagcgcatctgcgactcccggtttttttatatcggccctgagggcaaaaaaaatcccgccgcagcgggattttttatagcgatcaacggagattagatcaggaaatcgtccagtgatttaccttgctcatccattgcttttttgatcacagccggggtacggccctgaccggtccaggttttggtttcaccattttcgtcaacatagctatatttagccggacgtgcagcacgcttggttttggtaccggctttaacggcagccatggtgctcagcagttcattcggatcaataccgtcagcaatcagcatttcacggtattgctgcagcttacgcgtacgctcttcaatttctgccgcggcagcgttttcttcttcacggcgctcgttaacgacgacttctaatttttccagcatttcttcgagcgtttccagggtgcattctcttgcctgcgcacgaagagtacggatgttgttcaaaattttaagtgcttcgctcattgtagtaatctcaaacttatattgtggggtggtttgttgaactaataatagagcgataaaatgcgttgtgcaataggggggaatgtaaggaattcaaaattactggttatttgtcgcgagaattaattaatttaagttaaaattcccgtgccgcttcacatctttcatcgcttatagcgatgaggcgaaggcaagctaaaacattgagacggtatgctttttgagaggttcagtgagagaaatgatcctttacatgggtaaataaccctcgtcagtattagcgcatttttggttacaaggcttaatataaaacaaccggcagccctgcttatagcccctgggcaaccggtctataagcacgaaaagacaatggttagcgcgccagtagcgtaacggggcgtacaaatagtggccctgaaaattcaattcatcttcttaatcctttcggtttgcaggcccttcagcttcgcgacaatacccctgctgaaagcgcggctgtgcgcataaaatatggtacaatcgtcgccgcgataaaacactttgattggggtcacgcagccgatggcacaactttatttctactactctgcaatgaatgcaggtaagtcgaccgctctgttgcaatcttcgtacaattaccaggagcgggggatgcgtaccgtcgtttataccgctgagattgatgaccgctttggcgccggaaaagtcagttcgcgtatcgggctctcctcgccggcccgattgtataatccacagacctcgttatttgacgatattgcggcggagcaccagctaaagccgattcactgcgtgctggtggatgaaagccagtttctgacgcgtgaacaggttcatgagctgtccgaagttgtcgatacgctggatattccggtgctttgctatgggttgcggacggactttcgcggtgagctctttaccggcagccagtatttactggcctggtcagataagctggttgagctgaaaacgatctgcttctgcggccgcaaggccagcatggtattgcgcctcgatcaggaggggcgtccttataatgagggtgagcaggtcgtcatcggcggtaatgagcggtacgtatcggtctgccgtaagcattataaagaggcgctgagcgtcggttcgttaaccaaggtacaaaaccagcaccgtccctgctgataccctcagaagctcgtacaggcgcctgtgggcgcctttttaatgtctgctataggttgcgtagctggcgataaagaatggctgatagcggggataaaaaaagccccgtcaggtgacggggcttgtcgcgatgctatcgctgttggttaagcggattttttcgcttttttctcagcctttaccggagcaacttcggctttcgcaccggcttcgccttcgacgaattcgcggccgtagtaggtatccagcaggatctgtttcagttcggagatcagcgggtagcgcgggttagcgccggtgcactggtcatcgaatgcatcttcagacaatttatcaacgtgggccaggaagtcagcttcctgaacgccagcttcgcggatagatttcggaatacccagctcagctttaatgctttccagccatgccagcagtttctcgattttcgctgcggtgcggtcgcctggtgcggagaggcccaggtgatcggcgatttcagcgtaacgacgacgagcctgcggacggtcgtactggctgaacgcggtctgcttggtcgggttgtcattcgcgttatagcggataacgttgcagatcagcagggcgttggccagaccgtgcggaatatggaactgggaacccagtttgtgcgccatcgagtgacacacgccgaggaaggcgttagcgaacgcgataccggcgatagtcgcggcactgtgtacgcgctcacgggcaaccgggttcttggaaccttcgtgataggaagccggcaggtactctttcagcagtttcagcgcctgcagcgcctggccgtcagagaactcagaagccagtacggaaacgtaagcttccagggcgtgagtcaccgcatccagaccaccgaacgcacacagcgatttcggcatatccatcaccaggttggcatcgacaatggccatatccggggtcagcgcatagtctgccagcgggtatttctgaccggtcgcgtcatcggtcaccacggcgaacggcgtaacttcagaaccggtaccggaagtggtagtgatcgccaccatcttggctttgacgcccattttcgggaacttgtagatacgtttacggatatccataaagcgcagcgccagttcttcgaagtgggtttccggatgttcgtacatgacccacatgattttcgccgcatccatcggggaaccgccgcccagggcgatgatcacgtctggtttaaaggagttcgccaggtcggcacctttacgtacgatggtcagcgtcgggtcagcttcaacttcgaagaagacttccgtttcaacacccgctgctttcagtacggaagtgatctgatcggcatagccgttgttgaacaggaagcggtcagtcacgatcagcgcgcgtttgtgaccatcggtaatcacttcatccagtgcgattggcagggagccacgacggaagtagatagatttcggaagtttgtgccacaacatgttttcagctcgcttagcaacggttttcttgttgatcaggtgtttcggaccaacgttttcagagatggagttaccaccccaggaaccacaacccagagtcagggaaggcgcgagtttgaagttgtacaggtcaccgataccaccctgagaagccggggtgttgatcaggatacgcgcggttttcatcatttggccgaagtaagccacgcgagccggctggttgtcctggtcggtgtacaggcaagaggtgtgaccgataccgcccatggcgaccagtttttctgctttggctaccgcgtcttcgaaatcttttgcacggtacatagccagcgtcggagacagtttttcgtgagcaaacggctcgctctcgtcaacgttggtcacttcaccaatcagaattttggtggtggccggcacggtgaagcctgccagttcagcgattttggccgctggctgaccaacgatagccgcgttcagcgcgccatttttcaggataatgtcctgaacggctttcagctctttaccctgcagcaggtagccgccgtggctggcgaaacgttcgcgaaccgcgtcatagactgaatcaaccaccacaacggactgctcagaagcacagatcacgccgttatcgaaggttttagacatcagtacggacgctacggcacgtttgatgtcggcggtttcatcaatgactaccggggtgttaccggcgccgacgccgatagcaggtttaccggagctgtatgctgctttcaccatgcctggaccaccggtcgccaggatcaggttgatgtccgggtgatgcatcagcgcgttagacagttctacagacggctgatcgatccagccaatcaggtccttcggcgcgccggccgcgatggcagcctgcagcacgatatcagccgctttgttggtggcttcttttgcacgcgggtgcggagagaaaatgatggcgttacgcgttttcagactgatgagcgatttgaaaatggctgttgaagtcgggttagtggtcggtacgataccgcagatgatgccgataggctcagcgatagtgatggtgccaaaggtgtcgtcttctgacagaacgccacaggttttttcgtctttataagcgttgtaaatgtattcggaagcgaagtggtttttgatcactttgtcttcaacgatgcccatgccggattcggctacggccattttggcgagagggattcgagcatctgcagcggccagagcggcggcgcggaagattttgtcgacttgttcttgagtgaaactggcatattcacgctgggctttcttgacacgctcaacaagcgcgttcagttcagcgatattagtaacagccataatgctctcctgataatgttaaacttttttagtaaatcagtcgctcgattcgacattatagacaggccgttaacagcttgcatgtaaatgtttatgtagaaaaatcagggcgctgtttcaccgatttactaaaaaagctttatctctttcgctttcaggtactgctgccttccactctgttggtgtcatcaagattactcacttctgagtacaaattacgtgatttagatcaagtattgtcgctgctgatacctttcagctggctgctttttgaccggttcgatcaagtgtgatgggagggttttgaaattaaaaaaacgattagcattaaatatacaaatggctaacattcgatacatatcaccgggttatgcatatttataatgaatattgcaggtaaaaagcgtatgtttcgcgcagttattttatgctgttaacagtcaaccgccaattttgatgatgctgcggagcccaatgtgactcaatcactgttcgatttttctgcatatttcaagtttttcatcggcttatttgccctggttaacccggttggcattattccggtattcatcagtatgaccagctatcagccggctgcggtgcgtaataagaccaacctcaccgccaacctgtcggtggcgatcatcctcctgacgtcgctgttcctcggcgatggcattctgcagattttcggtatctccattgactccttccgtatcgccggcggcatcctggtggtgaccatcgcgatgtcgatgatcagcggtaagctcggcgaagataagcagaacaagcaggaaaagtcggagacggcggtccgggagagcatcggcgtcgttcctctcgcgctaccattaatggccgggccaggggcaatcagttcaactatcgtctgggggacccggtaccactcctgggtgcatctggtcgggttctcactggcgatagcggtatttgccctctgctgctgggggattttccgtatggcgccgtggctggtccgtttgctggggcagacgggaatcaacgtcatcacccgtattatgggcctgttgctgatggctctcggcattgagtttattgtgaccgggattaaagcgcttttcccaggactgctgagttagttcgtcgccagcaggcggggagtctcgcttcacgcctgcgcgattattagcaaaacctattagccagcgcggaactggcggtagggataatattttgcgatatcgctattaatttcatatttttcattaagatatgaaatatttctcttaacattctcctcacgcctcccactcctgtgatgttattttcttcacatcattctctggtacttgctgtcggatcatcgaaatgatattagtaattttaacaaggcggcagatgaatgtgctaaaaagtaatctattgttaaatttttgtacaaaaaaccatcttgcggtcgctgctcagtatgtcggctgatgaaattatcgtaatgctctgataaataataatatttttacatcgacgttttatggcaaacgcttgtcacgctggcaaaaccggcaataaaagagaattcggtaacatatttgcaaattgcattggcggaggtgtttaccttttggtactttccgccgttatcgtctgctgaattatgtacgcaaatgagaattatttttaattaactcatttcgccagaacgaccctccagcgagggcaacgaatcgacgttaagactgccgttcgagcggtcgtaataaataagtcggtgatagcaatctgccaatcgcaaactcctgcgttggacagaacccgaaaacgggaaaaacaggctggttaaaaaaccagtaattataatgactggagttacaacacaatgaccatcatcactaaaaagcgtttaatcgccgcgggagtgctatccgcactgatcgccggcaatatggcaatggcagcggatgtcccggctggtgtgcagctggcagagaagcaaaccctggtacgtaatagcggcgccgagccgcaatcgctggacccaaataaaatcgaaggggtgccagaggccaatattagccgcgacctgttcgaaggtttgctgaatacttcgccgaaagatggccacccgatccctggcgtggcggagagctgggataataaagattttaaagtctggaccttccatctgcgtaaagatgcaaaatggtctaacggcgagccggttaccgcccaggacttcgtatacagctggcagcgtctggtggatccgaaaaccgcgtctccttatgccagctatccgcaatatggtcatatcgttaacgtcgacgaaatcattgacggcaagaaagcgccgagtgagctgggcgtaaaagccattgacgaccacacgctggaagtcaccctcagcgaaccggtaccctatttttataaactgctggttaacccggcgatgtctcccgtctacaaaccggccatcgaaaaatttggcgaaaagtggacgcagcctggcaatatcgttaccaacggcgcgtatactctgaaagactgggtggtcaacgagcggatcgtgatggagcgtaacccgcactattgggataatgctaaaaccgtcattaacaccgttacctggctgccgacctcttccgaagtgacctatgttaaccgctaccgcagcggtgaactggacatgacttataaccagctgccgatcgaactcttccagaagctgaaaaaagagatccccaacgagctgcacgttgacccctatctgtgtacctattattacgaaatcaacaaccagaaggccccgttcaccgacgtgcgcgtgcgtaccgcgctgaagctgggtctggatcgcgatattattgctaataaggtgaaaggacagggcgatctgccggcctacggctacaccccaccgtataccgatggcgcgaagctgagcgagccggaatggtttacctggtcgcaggaaaaacgcaacgaagaagcgaagaaactgctggccgaagccggctatagcgctgataaaccgttgaccttcaacctgctgtataacacctctgatttgcacaagaagctggcgattgccgccgcctcgctgtggcgtaaaaacctgggcattgacgtgaagctggtcaaccaggagtggaaaacgttcctcgatacccgtcatcagggcacctatgacgtggcgcgtgcgggctggtgcgccgactataacgagccaacctctttcctgaacaccatgctctctgacagttcaatgaacaccgcgcactataagagcccggcgttcgacaagattatggctgaatccgtaaaagcatccgatgaagcgcagcgcacggcggcctatgcgaaagcagagcagcagctggacaaagacagcgcgatcgtaccggtctattactacgttaacgcccgcctggtgaaaccgtgggtcggtggctataccggtaaagacccgatggataacgtctataccaaagacctctacgttatcaaacattaatggcaatacgtggagcgggtctcggctcgctccatcgtgtcttatttgagagcagtgcaaaggcacacgccagaaggtacgggcaatgttaaaatttatcttacgtcgctgtctggaagcgattccgacgctatttattcttatcaccatctcattcttcatgatgcgtctggcgccgggaagtccttttaccggggaacgcacgctaccgccggaagtcatggcgaatattgaagcaaaataccatttaaacgaccctatcatgacgcagtacttcaattatctgaagcagctggcgcatggcgattttggtccctcttttaaatacaaagattattccgtcaacgatctggtggccgccagcttcccggtttcagcgaaactgggcttcgccgcctttttactggcggtggtgatcggcgttgccgccggggtgatagccgccctgaagcaaaatacccgctgggactacgcggtgatgggggtagccatgaccggcgtggttattccgagctttgtggtcgcgccgctgctggtgatgatctttgccattaccctgcactggctgccgggcggcggctggaacggcggggcgctgaaatttatgatcctgccgatggtggcgctttccctggcctatatcgccagcatcgcgcgtatcacccgcggttcgatgattgaagtgctgcactctaactttatccgcaccgcgcgggcgaaggggctgccgatgcgtcgcattattctgcgccatgcgctgaagccggcgctgctgccggtgctctcctatatggggccagctttcgtgggcatcatcaccggctcaatggtcattgaaaccatttacggcctgccggggatcggccagctgttcgttaacggggcgcttaaccgcgactactcgctggtgctcagcctgacgatcctcgttggcgccctgactatcctgttcaacgccatcgttgacgtgctgtacgccgttatcgatccgaagattcgctactgaagccggagttcgccatgatgttaagtaagaaaaatagcgaggcgctggaaaacttcagtgagaagctggaagtggaggggcgtagcctctggcaggatgcgcgtcgtcgctttatgcataaccgcgccgcggtgaccagcctgattatgctggtgcttattgcgctgttcgttaccttcgcgccgatggtgtcgtcgttctcctacttcgataccgactggggcatgatgtccaatgccccggatatggcctccggccactacttcggaaccgactcctccgggcgcgatctgctggtgcgcgtagcgatcggcgggcgcatttcgctgatggtcggggtggcggcggcgctggtggcggtgatcctcggcacgctgtacggttcgctctccggttatctcggcggcaaagtggattcggtgatgatgcgtctgctggagatcctcaactccttcccgtttatgttcttcgtcatcctgctggtgaccttttttggtcagaatatcctgctgatctttgtcgccatcggcatggtgtcctggctggatatggcgcgtatcgtgcgcgggcagacgctaagcctgaagcgcaaagagtttatcgaagccgcgcaggtcggcggggtctcgacggcgagcatcgtgctgcgccatatcgtccccaacgtgctgggggtggtggtggtgtatgcctcgctgctggtccccagcatgatcctcttcgaatccttcctcagtttcctgggactggggacgcaggagccgctcagcagctggggggcattgctcagcgatggcgccaactcaatggaagtttcgccctggctactgttgttcccggcgggtttcctggtggtgaccctgttctgtttcaactttatcggcgatggtctgcgtgatgccctcgacccgaaagaccgctaaggagcgctgccatgaccatgattgaaacggcaaaagcgccgcaagcgcagagccacagcgggctactgctggacgtgaaagatcttcgcgtcacctttaaaacgccggatggcgacgtcaccgccgtcaatgatctgaacttcaccctgcaggcgggcgagacgctcggcattgtgggcgaatccggctccggtaaatcgcaaaccgccttcgccctgatgggactgctggcggccaacggtcgcatcgggggttccgccacctttaacggtcggcaaatcctcaatttgcccgagcgtgagctgaacaaactgcgcgctgaacaaatctcaatgattttccaggatccgatgacctctcttaacccctatatgcgggtgggcgagcagttaatggaagtcctgatgctgcataaagggctgagtaaagccgaagcgtttgaagagtcggtgaagatgctcgacgcggtaaaaatgccggaagcgcgtaagcgcatgaaaatgttcccgcacgagttctccgggggcatgcgtcagcgcgtgatgattgccatggcgctgctgtgccggccccggctgctgattgcggatgaaccgaccactgccctggacgttaccgtgcaggcgcagatcatgacgctgttgaatgagcttaaacgcgaattcaacacggccattatcatgatcacccacgaccttggggtggtggcagggatctgcgataaagtgctggtgatgtacgccgggcgcaccatggagtacggtcaggcgcgcgatgtcttctatcaaccgtcgcacccatactctattgggctgttgaatgcggttccacgtctggatgcggaaggcgatgcgttgttgaccattcccggcaacccaccgaacctgctgcgattgccaaaaggctgtccattccagccgcgttgcccgcatgccatggagcagtgcagcagcgcgccgccgctggaatcgttcgcgccaggccgcctgcgcgcctgctttaaaccggtgggggatctgctatgaacgccgtaactgaacaacgaaaagtcctgctcgaaattgccgacctgaaggtgcacttcgatatcaaagatggcaagcagtggttctggcagccgtcgaaaacgctgaaagcggtggatggcgtgacgctgcgcctttacgagggtgaaaccctcggtgtggtaggggagtcgggctgcggcaaatcgaccttcgcccgcgccattattggtctggtgaaagcgaccgatggcaaagtggcctggctgggtaaagatctgctgggcatgaagcaggaagagtggcgcgacgtgcgcagcgatatccagatgatcttccaggatccgctggcctcgctgaacccgcgcatgaccatcggagaaattatcgccgaaccgctgcgtacctatcatccgaagatgccccgtcaggaagtgcgcgatcgcgtcaaagcgatgatgatgaaagttgggttgctgcccaacctgatcaaccgctatccgcacgagttctccggcggtcagtgtcagcgtatcggcatcgcgcgggcgctgatccttgagccaaagctgattatctgcgatgagccggtctccgcgcttgacgtgtcgattcaggcgcaggtcgtcaacctgctgcagcaactgcagcgtgagatggggctatcgctgatatttatcgctcacgatctggcggtggttaagcatatctccgatcgggttctggtaatgtatctgggccatgcggtggagctggggacctacgacgaggtgtaccataatccgctacatccctataccaaagcgctgatgtcggcggtgccgatccccgatcctgatctcgagaaaacgaaaactatccaactgctggaaggcgaattaccctcgccgattaatccgccctcaggctgcgtattccgcacccgctgtccgcttgccggaccggagtgcgccaaaacccgcccggtgctggaaggcagtttccgccatgcggtttcctgccttaaggtagacccgttataatctcaggggctgacgcaggtcagcccttttttttgcgaggttaacgaagtgggtatgctttctgccgctcgtctgcggctttatcatttacttttcgatcagaaccgacgttccggccgccgctttgaagggctgtgcggacttttcgccctgctcagcgtactggtgatatttatcgagtcgggactgggcacgcaatatcacctgacattagatgaatggcatattttcgtctggctggagctgctggtgaccgcggtctttaccctggaatacctgctgcgtatcgctacctggcccaatccgctccactatattttcagcttttgggggctgattgacctggcgacgattttaccgctgtatatgatgtggctatggccggaaattagcctcaattatgtattcgcctggcgggcaatgcgggcgatccgcgcgctgcgtattctcaaactactgcgctttatgccttcgctcaacgtgttctggcgagcgattgtcagcgcgcgccatcagctgatcctgttttattcgtttatcgccattgtgatggtgattttcggctcgttaatgtatctgattgaggggccggaatacggctttaccacgcttaacgcctcggtctattgggccatcgtgaccatcaccaccgtcggctacggagacatcacgccgcacacgccgttgggtcgcatcctggcctccattcttatcctgatcggctactccattattgccataccgaccggacttatcaccacgcatatgaccagcgccctgaatcgtcgacgacagcagcgcctgtgtccgcagtgtcagcagggcgaccatgacgataacgcccgtttctgccatgcctgcggtcatgccttgccgaagtaagctggcgacgtaaaaaaagcctgccgggagaaccgcggcaggctttttactggatgttaaaggttattcacgccacagaatatggcacagcttatgatctttctcgcggcacagcagaacgcgggcgaagatatcattgatttccccgccgtcggtatccgccagaccaatcaccacttcggcgaagaaatccgggttgagatcgtaatccacatgctcttcccagtctgccgaagggtcgaacagttcggcgccgccgcgctcctcaaactgcaggttaaacagaatgatgtccgccgggtcgagattgtcggccgccagttcgaggaagatatcgtaagcctgctcgagcgtttcgtcttcggtcaggcggttgtttaaatccatatccatgattgctactcattcggtatctgatgggcacgttttacagcaacgggctgaagaagtaaaacagtcgctcggcgatccgctgccacagcggacgttttaaccagagacgggcatccagcaggcgcgagcgcgagatataatcatcctgaaccgccgccagatcgctgccgaaaccggcgtcatcgatgaccagggtaatctcgaagttgagccacaggctgcgcatatccaggttgacggtccccaccagacttagctcgccatcgaccagcacgctcttggtatgcaacagtccgccctcaaactgatagattttgaccccggccgccagcagctcggtgaagaaggcccggctggcccagcctaccagcagcgaatcgttcttgcgcggtaaaataatgctcacgtcaacgccgcgctgggcggcggtacagatcgcatgcagcaggtcgtcgctgggtacgaagtagggggtggtcatgatcagatgctctttcgccgcataggcggcggtgaggagagcctgatgaatcagatcttccggaaagcccggtccggaggcgatcgtgtgaatagtatgtccgctggcctcttcgaacggcatgatattgacgtccgggggcggcggcagaatgcgcttgccagtctctatttcccagtcgcaggagtagacgatgcccatcgaggtcgccaccgggccttccattcgcgccatcagatcaatccactgtccgactcctgagtcctgtttaaagtagcgcggatcgaccatattcatgctgccggtgtaggcgatatagttatcgatcatcaccattttacgatgctgacgcaggtccatccggcgcaggaacacgcgcatcaggttaaccttaagagcttcgacgacttcaataccggcgttacgcatcatcgccgcccatgggctgcggaaaaaggccacgctgcccgcggagtcgagcattagccgacagtgaactccgcggcgagcggcggccatcagcgattcagcgacgctgtcggccatgccgccgggctgccagatataaaagaccatctctatcttgtgacgggccagctgaatatcgcggatcagggcctgcatcacgtcgtcagattccgtcagcagctgtagctggttgccttttacgccgccaatgccctgacgccgttcacacagcttgaacagggattcggccaccgggctgttatcttccgcgaagatatgtttgcaggctttgaggtcgtttagccatttggccgtggagggccacatcgccctggcgcgctcggcccgacgcttgccgagatgcagttcgccaaaggagagataggcgataatccccaccagcggcaggatataaatgatcagcaaccatgccatggcggacgggacagcgcggcgtttcattagaattcgtaatgttacaccggcgatcaacagccagtaccccagaatgaccagccagttcaccaccgtgtaaaaggttgtcatagatgtaaaatccttttgaatgacgatatgtgatgagtttacgcatcagtatttttctggcaaataaaaacgcagcgaaagcggtagtcagttgctggcagaggtttataatgggggctgttttcactcgtagagtcgttgcaatgaagcgtagtagaacggaagtagggcgctggcgcatgctgagacaggtgaatcgccgtaaagcgcgctggctggaagcccaatcgcgccgcaatatgcggatcctcgctatcaggaaggggctagtgaaacggcagcgtcatgccctgctgtttatcttccctgacagctaagcgagcaggcaaacggcaccgtacgcggtgccgttgtcgtttttctctctgcgctaaattcccgttgcacatctccatagggcaatgatggtttttcatgctgcgatgcgacgacaaaacagagctcccgcctcagtgaaagagagatgctacgcctggcttgtaatgacggacgacaagatccagagccaagtcgtttgcggcgcgacaggaattaaccgtcagatagcatttattgccgctcagggtttattgccgctcaggaagggcatggcgctgttaaatgcttaatgatatgaccggccagctgcggtaaccaggcgggagctgagggaatgagaaaacagactcagacaggcaagggggttattaagcggtccagcgcgttgaagctaaatgaaccgaccgatcctgaccatgaataatctgagcctgttatattatccagagaggccatgcaataagcatcctgaataaaaagcaatcgttgcgccagcttttacttattttgcataagcttccgtggataacgtgatggtgacgttatcacttaccgccggcacatatttatcaagcttaaagtctgaacgttttatcacaccggtggcatcaaatccaatggcctcttttttcaccattgggtgcatatcctgcttattcaggacggcatgcaggaccaccggtttggtgatgcctttaagggtcaaattaccttccacatcatatttattgtcgcctttgctttccactttggtactctggaaagtggcttcgggaaacgttttaacatcaaaatactctttgcctaaaaactcatccgttaacgccttgacgtgagcgtcaatggttttcactggcagcgtgacgttcaccgaggatttctccggattctctttatcaaaggccagtttccctgaaacatcagagatataggcggtagggtttgagaagccgaaatggttccaggagatcacaaccgaggtatgctgtggatcaagactgtattccttagccgcggcttgcgacacaggaatatataaggcaagtacagaaagcaatgcggtttttttcagggtattcacacaataatcctcaaaatcggcaggtacataaatgttagcccaaaaaaatacagggcttattgaaaacatttgttattccctttcaaattttttaatcaagcagtgatgcccctactatcactctgcgtgaagtttacgcaacgaaattaataggctttaaaaatgatgctcagcaacttaacgctggcagcgtagttaatatccctttatgcctgccaggtaatcctttgtctacaagggggttatttccacgtgctttcaagcggctacggtcctgaatatagcaagatgggctacgttcggttccgcggcatccgcagtggatgcccaataatatttttttcgggctttcatatctgtcgttaagcaactatctttcagttatttttttcattctattgcactgtagatttatagggctatatcaggatgtgctgacattaaatgcaagcgctaaataacaacgcgatcctccctaacagccttacacaaggtattagtaattcactatcacgcgcggcgtcgatgttttgtcagcattttccattgccgaaaaaagcgaggcgatggtcgatgatggggtagcaggagaaagtgcgtgctcatcttccaggcttctcaggcggataacagtcaacgctttcgcgaggttaaaaagggcgacacttcaatgtcgtgtaccaaaatgcgcccttcattctgatgacctgggtgtttttgtggttagccagaaaaaggaaagggtattttcaaaaaacctttttgtatggcttaacagagacctggcggtaaaccccggcggcgatatacggatcgtcattggcccaggcctgggccgcttccagcgattcaaactcggcaatcaccgttgagccgctgaatcctgctgcgcccggttcgttactgtcaacggccggcattggcccggcggtaagcagtcggccttcatcgtgtaagagttgtaaacgcgcgagatgcgcggggcgaaccgacagccgcttttccagagaatcggcgatatcttcagcgtagataacgtaaagcacggcaaagctccttatcaataatcaggcgaattacgttaagttaaacagcgatggactgcaatgcaaagatgcgctctggagtggaaagcactgccgacgcagcttttttctgcaaatggcggcaaaaattgactcaggttaagacgccttattgaatatgattgctatttgcatttaaaatcggagcatcatttttcaacagaaacgactatgagcgcaatgacccttgatttacctcgccgctttccgtggccaacgctgctgtccgtggctatccacggtgccgttgtggcggggctgctttatacctcggtacatcaggttattgaacagccttctccgacgcagccgatagagatcacaatggtggcgccggccgatcttgagccgcctccggcggcgcagcctgtcgtggagcccgttgttgaacccgaacctgagccggagccagaggtagtgcctgaaccgccgaaagaggcgccggtggtgatccataaaccggaacctaagccgaagcccaaacctaaacccaagcctaagcctaagccggagaaaaaggttgaacagccgaagcgggaagtgaagccggcagcagagccgcgtccggcctcgccgtttgaaaacaacaatacggcgccggcgcgtacagcgccaagcacctcgacagcagcggctaaacccaccgttactgctccgagcggcccgcgggcgatcagccgcgttcagccgtcctatccggcgcgcgctcaggcgctgcgcattgaagggacggtacgggtgaagtttgacgtttcgcctgatggccgcattgataatctgcagatcctctctgctcagccggcgaatatgttcgaacgcgaggtgaaaagcgcgatgcgcagatggcgttatgagcagggaagaccgggtaccggcgtaacgatgaccatcaaattccgcctgaacggcgtcgagattaactgataaaacgctgcggcggaccggcaaggtccgccgtgaagcttgtttaacgcattttctccatcaatacatcatccagcgcctgctgggccgttaccaggtgctggccgccaaacaaaatcgctctgttcagcagagtataaagctgataaatcggctgacgatcgagaaaacccgacggcagaggcgaaacggactgatagccgtcatagatttgcgggggctgttccggatgcatcggcagcatggctaaatcgcactcgcggtcgccccagtagcaggcgggatcgaatatataggggccatccggccctaaggcgcagttgccggaccacagatccccgtgcagcagcgaaggctgcggctgatggttggccagtcgctgctgtaccatatcgactaaggtatcgatatcgccaaagtgcaatcccttctccgccgcgagctccagctgccagccgatacgctgctcggcaaaaaaaaccgaccagcgacgctgccaggcgttgggctgcggcgtggtggaaagatcgttatcaaaatccagaccgaactgcggctgatcgctccactgatggaggtgggctagctgctggccaagcagaaacgcattgtgcgcatccagcggacggggagggaggtactccatgaccacgaagctatagtcgcgatcgctgccgacggcaaagacctgcggtacgcgaacggttttgcttcgcgacagcagctccagctgatcggactcggcggtgaagataggcagaagttcccgttcgtcgcatttcacgaagtaatctttcccgccgaagcgtaaatgccaggcggaatggatctctccaccgggcagctcggttttcagttcgatttcagcgtcttcggtatgccaatcgcgtaaaagagtactgattgcttgccacatgctgtctctccccatgttttccaccatatcataaggttagcgcattactaccgggtaaacctggaactgacgcacaactgacgctttccgttgcgctaaacgcacttattgagcttttaaccactcggcgactgtggccacagcgatttccgccgggcggccaagggccgcttccgccaggccagcgctgagggccttaacttcctcggccgtctggccgctcagcaggccgaaggtgttggtacccagctcatggggcgtgccctcttcatcattgagcgtcagtacaaacccggcacgggtaaaatggttgctgacctcattgatctccgtcagcgcctgttcatggaaggtcacgctgacgacccaggcggtaatctcattgctcatctctacaccccgttgttatgatggcctttccagcatagaccatcctgcttatattgtgattcccctccgccggcgcggagggggcagggaagatcaacgcccgcagagataatcatagattttttgcgtattggcccgcgagcagaggcgggtgccctggttgtgggtcccctccgtcccttctactactcccacgcctgccacgtcttcccttcggtcgatttcggccggccgcactgtcacgcccacccccagcctcgcccccactcccacgatgcgctgcgtcttcctcgcaggcgtccccacccgccacccgccgctgcgctcccccgctcacgtctcccc

SEQ ID NO: 170 - DNA, 39753 bp, Unknown
  source: /note="Description of Unknown: MKP2_2161_1 Mutant Bacteria sequence"
tcggccttttccccggtcggcgcgccagggccgtctgtgggccgtgggcgcctgggctttgggctggggttgtgcgctgtgtcgggtggacagagcggacggacgccctgggcttgacggcgccggtgttctggcgcgtggtgcgcacgcctgccgccgagcgggatccgcaggccatcgccgcggcggtgacggccctggagcaaaagctggcgattgccgaggcacgtctcgccggcagtcgctatctggtgggcgatacgttcaccctggccgacatccagtttggtcatgtgctgtaccgctactttgccatcgatatcacccgtcgtcccctcccccatcttgcggcgtattatgcacggctaaccgcacggcccgcctttcgccagcacgtcatggtcagctacgacgaactgaaggtctgaaggtggtcggtagcgcctcctgacgctaccgacatgccggttaacgcgccatcagaacaaacacgccccagccgagatattcccgggtccaggtgacatggtgcagcggcgcggtggtcaactgctggcgaacctccggtgcgaagtcatcgtgcggattggcctccagccagcggcgcattgtcagccatttcgccgcttcataacgatcccagccctcctggtcggccagcaccatctccaccacgtcatagcccagttcgccaaagtgggcgaccagcgccggtagcgttaggaagtcatcgggtgactgcgcgccgcaggcaatcgcctcttctgccgtggccggacgtttgcgccaccatggctcgccgataagcaacatgccgcctggggtaaggctctgcttcagcagctcgattgtgcctgccaccccgccgccgatccacgtggcccccacgcaggtggcaacatcgcacggctggctggcgacatatccgctggcatcctggtgcacaaaggttacccggtcgcttaccccgagctcctctgcccgggcggccgcctgctgactgaacagcaggctcatgtctacgccggtgccgactatctgatgatcgcgcgcccagctacagagcatctcgccggagccgctgccgaggtcaagaatggtggtgcccggcgccattcgcagcgcccgtcccagcgtggcgtacttttccggggtaaaagggttatggatacggtgctcgctttcactgatggtaaaaatgcgagggatatcgatcatgaggttttctccttgagagccaaacgcccgggcagcgaccctgcccgggtcgctatttcagcggttgtccgcttgcgcgcgaacgttattcaaaccggtcgtgttgatccggtacggctggccgttcaccgacttaatcagctttttggttttgagctttttgaagaccgcaagggtgcagtcgctcagcaacagcccttcgcgggtgtagcattcaacggcggtaatgcggccggaggtatcgcggacgtgcgcaatacggccacctttggcgagaacgtgtaaggtccgttgttcctgacgggataaattcatactgaaacctgttcattatcatgtgcgaaaacatgcctacacccgcaggtgtgtgcgtaaggtttaagcgcagcgataatcagtccggcctgggcaggtcgggaaactgattatctgataatgacattctccagcatcgaagcctcagtgagcattgaaaggtatttaccggctgaatattaacaccgtcatctggtaaggatattgtgcagattaaaaactgtgaccggtattacgatttccctcggccttatccccattttgcgctatccgccacccgctctgttccgcaactttcaccaccaccttatcccccctcccgcattgttaaataattgttgtcagatcacaaaatggaaacaaaaaggccatttcgtacgcattttataaaaatgtagatatttttaatttatggctacgaaatgaacatcaccctgaccttacagcgaggaacgatcctgatgaacgccctgaccgcagtaaaaccgacacccgcgccggtagcccagcaataccctggcttttctttcaccccttccgcccagtcgccgcgcctgctggagctcaccttttccgccgaaacgaccacgcagttcctgcagcaggtcgcgcagtggccggtgcaggcgctggagtacaaatctttcttacgcttccaggtcggcaagatcctcgacgatctgtgtggcaatcagctgcagccgttgctgatcaaaacattgctcgatcgcgcggaaggcgcgctgcttatcaacggcgaagggatcgatcacgtcagccaggccgaggagatggtcaagctggccaccgccgtcgcccacctgattggtcgttccaacttcgacgccatgagcggtcagtattacgcccgcttcgtggtgaaaaatgtcgataactcagacagctacctgcgccaaccgcaccgggtgatggagctgcacaacgacggcacctacgtcgaagagcaaaccgactacgtattaatgatgaagatcgacgagcagaacatgcagggcggcaattccctgctgctgcatctcgacgactgggagcatctcgacgaatttttccgcgacccgctggctcgccgcccaatgcgttgggccgcgccgccgagcaaaaacgtcagcaaggatgttttccacccggtgttcgacgtcgattcgctgggccgcccggtaatgcgctatatcgaccagttcgtccagccgaaagatttcgaggaaggcacctggctgagccgcctctccgacgcgctggagaccagcaaaaacatcctttccataccggtgccggtgggcaaatttctgctcattaacaacctgttctggctgcacggccgcgaccgctttacgccgcacccggacctgcgccgcgagctgatgcgccagcgcggctactttgcgtattccacgaatcattaccagactcatcaataagggttttcaggcgaaggaattgagcggatgtatgatttcgtgattatcggcggcggcatcatcggcatgtcgaccgccatgcagttaattgagatttacccggacgcccgcattgcgctgctggaaaaagaggccggcccggcctgccatcagactggccacaacagcggcgtgatccacgccggggtgtattacacgcccggcagcctcaaggcgcagttttgcctcgccggcaaccgcgccaccaaggccttttgcgagcagaacggcatccgctatgacgtctgcggcaaaatgctggtcgccacctcaccgctggagatggagcggatgcgcgccctgtgggatcgcaccgccgccaacggcctgcagcgcgagtggctaagcgccggggagctacgcgagcgcgaaccgaacattaccgggctcggcgggatcttcgtcccttccagcggcatcgtcagctaccgcgaagtggcggcggcaatggcgaagaacttcgaagcgaaaggcggaacgatcgtctacaacgccgaagtcagcgccctgaaagaacatgccagcggcgtggtgatccgcacccgccagggcggagaatatgaggcctcgacgctgatcgcctgttcgggcttgatggccgatcggctggtaaaaatgctcggcgtcgaccccgggtttatcatttgtccgttccgcggcgagtatttccagctggcgccgcagcacaaccagatcgtcaaccatttgatctatccgatccccgatccggcgatgccgttcctcggcgtccacctgacccgcatgatcgacggcagcgtcaccgtcggccccaacgccgtgctggctctgaagcgcgaaggctaccgcaagcgcgatatctcgctggccgataccctggagatcctcacctcgcccggcatccgccgggtactgcaaaacaacctgcgctccggactgggcgaaatgaagaattcgctgtgcagaagcggctatctgcggctggtgcaaaaatactgcccgagcctgacgctgagcgatttacgcccgtggccggccggcgtgcgggcgcaggcggtgtcgccgcagggcaaactgatcgacgattttctctttgtcaccaccgcgcgttccattcacacctgtaacgcgccatcgccagcggccacctccgctatcccgatcggcgcgcatatcgtcagcaaggtgcagaccctgctggccagccagagcaatcccggacgcacgctgcgtgcggcacgtagcgtggagacactacacgccgcttttacccgttaaccaccctgaagacaggaagcgtttatgcaactcaacgatatgacactgtttcgccagcaggcgatgatcgatggccagtggcgcgatgcgcccaacggcgacgtgattgcggtcaccaacccggccaacggcgagcagctcggcagtgtgccgaaaatgggcgccgatgaaacccgcgaagcgattgaagccgccaatcgcgccctacccgcctggcgcgccctgaccgccaaagagcgggcgaacattctgcgccgctggttcgatcttatgatggagaatcaggacgatctcgctcgcctgatgaccctcgagcagggaaaaccgctggcggaagccaaaggcgaaatcagctacgccgcctcctttattgagtggttcgccgcagaaggtaagcgcatctacggcgacaccattccgggccaccaggccgacaagcgcctgctggtgattaagcagcccatcggcgttaccgccgccatcacgccgtggaacttcccggcggcgatgatcacccgcaaagcgggcccggcgctggccgccggctgcaccatggtcctgaaaccggccagccagacgccgttttccgcgctggcgctggccgaactggcgaatcgcgccgggatccccgccggagtattcaacgtggtcaccggctccgccggcgcggtcggcggcgaactgaccagcaacccgctggtgcgcaagctctcctttaccggctctaccgagattggccgccagctgatggagcagtgcgcgaaagacatcaaaaaagtctccctggagctgggcggcaacgcgccgtttatcgtctttgacgatgccgacctcgataaagccgtcgagggggcgctggcgtcgaagttccgcaacgccggacagacctgcgtctgcgccaaccgcctgtacgtccaggacggggtgtatgaccgtttcgccgagaagctgcagcaggcggtggaaaaactgcgcattggcgacggcctgcaggacggcgtcaccaccggcccgctgatcgacgagaaagccgtggccaaagttgaagaacacattgccgatgccatcgccaaaggcgcgaaggtggtcaccggcggcaaaccgcacgccctgggtggcaacttcttccagccgaccatcctggtcaacgttcccgacagcgccaaagtggcgaaagaggagaccttcggcccgctggccccgctgttccgctttaaagatgaagccgacgtcattgctcaggccaacgataccgagttcggtctcgccgcctatttctacgcccgcgatctgagccgcgtcttccgcgtcggcgaagcgctggagtacggcataatcggcatcaataccggcattatctccaccgaagtcgcgccgttcggaggcgttaaggcctccggcctcggccgcgaagggtcgaagtacggcatcgaagattacttagaaatcaaatatatgtgcattggcctttaacaggagcgacggatgaacagcaataaagcaatgatggcgcgtcgcagcgacgcggtcccgcgcggcgtcggccagatccaccctatcttcgccgaacgcgcggagaactgccgggtgtgggacgtggaaggccgggaatatctcgattttgccggcggtatcgcggtgctcaataccggccacctgcatccgcaggttgtcgccgccgtcgaagaccagctgaaaaagctgtcgcatacctgcttccaggtgctggcctatgagccttatctggcgctgtgcgaaaagatgaaccagaaggtgccaggtgatttcgccaagaaaaccctgctggtcaccaccgggtcggaagcggtggagaacgcggtgaagatcgcccgcgcggcaaccgggcgcagcggcgctatcgccttcaccggcgcctatcacggccgcacccactacaccctgtcgctgaccggtaaagtgaatccttactccgccggtatgggcttaatgccgggccacgtctatcgcgccctctacccgtgcgcgctgcacggcgtcagcgatgacgaggcgatcgccagcatccatcgcatcttcaaaaacgatgccgcgccggaagatatcgccgccatcattatcgagccggtgcagggtgaaggcggattctatgccgcctccccggcctttatgcagcgcctgcgcgccctgtgcgacgagcacggcattatgctcatcgccgatgaggttcagagcggcgcgggccgcaccggtaccctgttcgccatggagcagatgggcgtcgcggcggatatcaccaccttcgccaaatccatcgccggcggtttcccgctggcgggcgtcaccggccgcgcggaggtgatggacgccatcgcccccggcggactgggcggcacctacgccggcaaccccatcgcctgcgccgccgccctggcggtattgcagattttcgagcaggaaaacctgctggaaaaagccaaccagctcggcgataccctgcgccagggcctgctggcgatcgctgaagatcatccggagatcggcgacgtgcgcggtctgggggcgatgatcgccattgagctgtttgaagagggcgaccgcagcaggccgaacgccaggctgacggcggatatcgtcgcccgcgcccgcgacaaaggcctgatcctgctctcctgcgggccgtactacaacgtgctgcgcatcctggtgccgctgaccatcgaagaggcgcagatcgagcaggggctcaagatcatcgccgactgctttaacgaggcgaaacaggcatagagaaacaggcatagaacagaacacatgcggaagcgaagtacgttcgtaagggaatgaagacgagacctgcaaaacaacaataatacgcgtgccccggcgcgggaacgtcggggcgctctcccaggtgacacacttcgagagggtaaatgatggggcaactgtcgcaatcacaggatttaggggcggggctgaagtcgcgccacgtcacgatgttatctatcgccggggtgatcggcgcgagtttatttgtcggctccagcgtcgccattgccgaggcaggcccggcggtgctgctggcctatctgtttgccgggctgctggtggtgatgattatgcgtatgctggccgaaatggcggtcgccacgccggatactggctccttttccacctacgccgataaagccatcggccgctgggcggggtataccatcggctggctgtactggtggttctgggtcctggttattccgctggaagccaatatcgcggcgattattctgcattcgtgggtgccgggcgtcccggtgtggttgttctccctggtcatcactctcgccctcaccagcagtaacctgctgagcgtcaagaactacggcgaattcgagttctggctggcgctgtgcaaagtgatcgctattctggcgtttatcgtactgggcgcggtcgccattaccggcttttatccctatgccgaagtgagcggcatttcgcggctgtgggaccacggcggctttatgcctaacggcttcggcgcggtgctgagcgcgatgctgatcaccatgttctcgtttatgggcgcggagatcgtcaccatcgccgccgccgaatcggataccccggataaacatatcgtgcgcgccaccaactcggtgatctggcgtatctctattttttatttgtgctcgatctttatcgtcgtcgccctcatcccatggaatatgccggggctgaagagcatcggctcctaccgctcggtgctcgagctgctgcatattccctatgccaagctgattatggacggcgtgatcctcctgtcggtcaccagctgtctgaactcggcactgtataccgcctcgcggatgctctactccctgagccgtcgcggcgatgcgccggccattatgggccggaccaaccgcagcaaaacgccatacgtggcggtgctgctctccaccggcgcggcgttcctcaccgtagtggtgaactactatgcccccgcccaggtgtttacatttctcatcgacagctctggcgccatcgccctgctggtctatctggtgatcgccgtttcacaactgcggatgcgcaaaatccttcaggcgcaaggcggcgagatccgtctgagaatgtggctctatccgtacctgacctggctggtgatcgcctttatcaccttcgtgctggtggtgatgctgttccgtccggcacagcagctggaggtgatctctaccggcctgttagctttgggaattatttgtacggtaccgattatgtcacgctggaaaaagctggtattgtggcaaaaactgccgctgcaaaatacgcgttaaccctgttcccggcgcccgccgggaagagtattcaggagtaagaacatgaccgccattccccaggcgacggccattgacgggtaccgttggttaaaaaacgacatcatccgcggggtttaccaccccgatgagaagctgcggatgagcctgctgacgtcgcgctatggcctgggggtcggtccgctgcgcgaggcgctttcgcaactggtggccgagcggctggtaacggtggtcaatcagaaaggctatcgggtggcgcccatgtcggaacaggagcttctcgatatcttcgacgcgcgcgccaacatggaggccatgctggtgcgtctcgccattgagcgcggcggcgacgagtgggaagccgagctgctggcccgcgcccatctgctcaacaagctggagtcgtgcgaagcgagtgagcacctactcgatgaatgggaccagcgccatcaggcgtttcacaccgccatcgtcgccggctgcggttcgcagtatctgctgcagatgcgcgaacggctgttcgatctggcggcgcgctaccgcttcatctggctgcgcaccaccgtgctgtcggtggagatgctggaagataagcatgtccagcatcagaccctggtggacgctattctggcgcgcgacgccgaacaggccagcgcgctgatgcgtgagcacttactgactccgatcccgattattcaacaggcgatggctggcaagctgtcgccgcaggcagggtgaggcagatggaggggtggaaattacgggtatggcggcacgcatctccacgccgcacgggcgtggagaaatcgtatccgtagatcaatcaggcccgcaggcgaaccggctcgctgaaatcgtcggccggttccagcttcagattaaaggtggtcagcagcgctgctgcgcgctcgtgaaactcgcgcagcgttttttccagcctgtcgctcacttccgggtcgtcaatgtcgaccgcctgccatgatccttccttattgaacaggccaaactggtagctataggtgaaacgtgactcttgtgcttccatttccatccaccagccccagaattcacgcttctccggtgcgggcttaacattgacgcaaactgccaggcaatcgaaaaagaaacggttatcatggcactgctcttcgcgaatgtaaggccccagcgccgtgaatttcttgatcaacttacttttcaggtgtccactcggtaacgtcattgcgatctcctttagtgatgcaactgttttaccaaaccaatagaatttagcaataaattaaccaaatctatgattgatccagcgggcgatctgtcgcaatgcgtgatcaaaattgcgatacaccgggttaaacgggatctccagcagtttgccatcggcagatgacgaggtgattaaccgcgactcctcttcggggctgaacggatcgtccttccagaagccggagagcatcggcgtcgggcaacggcgccccagcagtccctgggtttttaacgaatagcggttgagctccacgcgtagcgcttcatcggacgcgtcatgcatgcccagccgcgaagccagcacgtcaagatacatctccggcacgcgcccctgatgcaggggatccaccagcagaccatgaacgaccgggcccagacaggctacagccttcagccgctgcggctccagatagcccagacgcaccgcgatattggcgccaaagcggaagccgaaagcggcgacccgggtatggtcaatccacggcacattttccagatggcgcagcgcgtgctgatgcagcaggctggtgtcctgatttagcgtccattttgacgagaagccgatggagggcatatcaatggtcagcatggcaatgccgagcggtgagaagtagttctcatacaggttgtaataatcggtctgcagcgagtccagccccccgcacatcagcaccgtcggaaacggcccctcgcctttcggcatatgcaaaaagccggttatcggcgagccgccagggatggtgaactccagctcgcgcagcgagcccggcagccgctgggcggcttcttcatacgcccggttggctaaagcctgcgcctgttccgccagctcatcgcctttaatatgcggataagcggcaatgctatacaggttcgaggcatgcagccagtggcggccgctcagcaaagaatcggcttcctgcccggccttttgctgccactgcatggcttctttcgcccactcgaagatccagttgccgccgcgataaccgatgacggtatcgaacagctcaggatcggttcgttcggcctcgctcatcacaatgcgcgcttgcacatcgaggatctcctgcggagttacgccgcgccagatccacatcaaacggttgatcagacggtaccagtgatcgacgtgattgccgctcagcgccgactgcatcgcctggggttttccggcagaaaaccgacgcaccagcgtagaagtttcgggatgtttgaagcgaggtttaaacagcgtttcgctgaggttagcctgtgacatgtgcagtctccgtcgtagtgccactccggatattgtaacctgctaaaggataaaaaaaaccacgcccggcaagccgggcgtggtaaatagcactgtcctgaagaattaacgacctgcgataggcggtacaaacaccacgcccatatcccacggctgttcaatccaggtatcctgcggaatatccacaacgtaatcgtccaccagcgggcggcctgccggcttggcgaaaatggtgacaaagtgcgctttgggatacatttcgcggatcgccacggcggtaccgccggtatccaccagatcgtcgatgacgataaagccttcgccatcgccttccgcacgtttcagcactttcagctcgcgctggttatcatggtcgtagctggagatgcatacggtatcaacatgacgaatgcccagttcacgcgccagtaaggctcccggtaccagtccgccgcggctaacggcaataatgcctttccattgctcaaccggcagcagacggctggccagtttgcgggcgtgaatctgcaacatgtcccaggtgacgacgtatttttcgctcatgtgaagtgtcccagcctgtgtaatacggcttaaataatgttcgagggggaaaatggttgcgcgagattatagagatctgacgcactaaaaaccagtgttaagcggtttgcgcaacgctttttgcgttgtttacactacctgcggcggtggaaagtggtattctcaaccccatcgcgcaagcccgggcttgttgtgtattttaacgctaaccctcgtcctgcaaccgctgtatgcaggagtctgtaaggagacttaccgtgtctgaactgtctcaactatccccgcagccgctttgggatatttttgccaagatttgctccatcccgcacccgtcctatcacgaagaacagctcgccgagcacattatgggttgggcaaaagaaaaaggcttacatgcggaacgcgaccaggttggcaacattctgattcgtaaaggcgcgactgccggtatggaaaaccgtaagccggtagcgctgcaggcgcacctcgatatggtgccgcagaaaaataacgacaccgtccacgacttcgttaaagatccgatccagccgtacattgacggcgaatgggtgaaagcgcgcggcaccacgctgggcgcggacaacggtatcggaatggcgtccgcactggcggtactggccgacgatagcgtcgctcacggcccgctggaagtgctgctgaccatgaccgaagaagccggcatggacggcgcgttcggtctgcaggccaactggctacaggccgatatcctgatcaacaccgactccgaagaagaaggcgaaatctacatgggttgcgccggcgggatcgatttcacctctaacctggcgctgacccgcgaagcgattcccgccgggttccagagctttaaagtcaccttaaaagggctgaaaggcggccactccggcggtgatattcaccttggtctgggtaacgccaacaagctgctgtcgcgcttcctcgccggccacgccgatgagctggatctgcgtctggtcgatttcaacggcggcacgttgcgcaacgccatcccgcgtgaagcttacgctactgtcgccgtcgccgcggataaagccgatgcgctgaaagcgctggtgaatacttaccaggcgctgctgaaaaacgagctggaggccaaagagaagaacctggtggtgctcgcggaagcggtcgataacgacaaagcggcgctgactcaggcttcccgcgacactttcatccgtctgctgaacgccacgccgaacggggttatccgcaactctgacgtggcgaaaggcgtcgtggaaacttcgctgaacgtcggcgtcgtcaccatgaccgatgacaacgtacagatccactgcctgatccgctcgctgatcgacagcggcaaagactacgtggtcagcatgctggattctctgggtaagctggcgggggcgaaaaccgaagccaaaggcgcctaccctggttggcaaccggacgccaattcgccggtgatgcacctggtgcgcgagacttaccagcgtctgttcaataagacgccgaacatccagatcattcacgccggtctggaatgcggtctgttcaaaaaaccgtatccggagatggacatggtctccatcgggccaaccattaccggtccgcactccccggatgagcaggtccatatcgagagcgtcggtcagtactggacgctgctgaccgagctgctgaaagccattccggctaaataagccccacaaccggcggcggcccgccgccggttttaccccgcatcaccttagcgccacgcgtttttccatccggtaattaataaaccactccccgcgcgccgccacccgctgcttagccaccaccttaaaaccatgagccgtaaaacagggctttgcggtaatgctggcgtccaccgtcaggatttgcgctggatactgagcgcagagcgcctcgataagcgcgccgccgataccctggcgggcacgatccggcgagacgaacagcaaatcgatatgcgtcccaatggcggtgataaagccaaccggctggctgttgaccacggccaccaggccgattgagtcggccagcttttgtcgccagcgcgtctcatccacctgcgcccaggccgcgatctgccccggggtatagtcccgactggcggtttcccgcaccgcgcgcagaaagatctggcagagcagtggcaaatcgctgtcgcggtaagcacgaatatgcatggctaaatccctaataaaagctgcctttccagctgcggatcgagcaacgtcacgtggagcccaaccaggcgcacgccccgtccgccgcggcgctcatcccaggctttgtgcgcggtggcgatcagatcctctttgttcagccgcggccagacgtgctcctgggtggtcagctggaaatcattgaatttcagtttaatgccctggcgggcgatcagcagatcaggtttgaccttcgccagtcgcctctccagctcgggatagaggttttcgataatcgcttcgcactccggccattcatggatatcttccgctaagatgcgctccacgcccaccgatttacgctgccgatcgttatgaatttcccgctcatcaatcccgtggctgcgctcccacagaatacgcccgaatttaccgaagcgcttaagcagcatggccagatcgctgttctgcacatcgccacaggttcgcaggcccatattttccagcttcgctgccgataccttcccgacgccgggtattttcgccagcggcagcgcccgcacaaactctgccacctgatggggggcgataacgaactggccgttgggtttattcatatctgaagcgattttagcgagaaacttcaccggcgccacccccgccgaggcggtgaggcgcaactcccgttcgatggtctggcggatctcctgggctatcagggtggctgacccgtgacaatgctcgctgtcgctgacgtcaagataggcttcatccagcgacagcggctcaatgcgcgaggtatagcgggagaaaatttcgcggatatggttcgaggcttctttgtaggcatcgaagcggccgggaagcaacgtgagatgcgggcacagcttgagcgccgtcgccgtcggcatggcgctgcgcacaccaaacttacgcgcaggatagttcgcggtactaatcacgccacgttgtacccgactgccgcctatcgcgaggggaatatcgcgcaacgctgggttgtcgcgcatctccaccgccgcaaagaaacagtccatatcgacatggataattttacgcatcgtcagactcaacactgtatacccatacagcatagcaaaaacagatgcgaattttatgctttttttatttcatcggctaaaaaagcggttaaaacataaaactgcaataaattatgtttattttcattgagttaaaagataaatcaggaagatataatcatgaagaaaatacttaccgcgctttgcctgctggccaccgccagcgcctgggccgctccacagctgatagcccaccgcggcggcaccggcgatgcgccggaaaataccctgccggccattaagctggcgctggagaataacgccgaagccatctgggtcacggtgcagttaagccgcgacggcgtaccggtgctctaccggtcaagcgatctttccgcattgaccaatagcgagggcaaagtttccagtttgaccgccgccgagctggcgaaagtcgacgccggctggaaatggggggatgacagccacccgtggcgcggtaagcaggccaccattccgaccttgcaaagcgttttacagcaatggccgcacacttttttctatatcgatatcaaatctccggatgccgatccgaccgtgatgggccagcgcctgcttgaagtgttaaaaaccaccgatagcctcgatcgcgtgcgggtctattccaccgaagaccgctatatcgccgccctgccgccagccatccctcgctttgtcactcgcagtgaaacccgcaccaggcttgccaatatttcgctcagccatcagtgccagccagcgagtcaacgcgatggtgagcagtggtatggactggagctgaagcgcaaagtcgaggtggtggagaaattcacccttggcgaagggatctccccggcgacgctcacctgggataaagaggcaatggattgcttccgctcgcaggataaagcgcacattatcttcttcggcatcaacagtgcggaagactaccgcacggcgatagaactgggcgccgacggggtgatggtggattctccggcgcaggcgaaaagctggcagtaagggagtcaacggctaaaaaagccgcgaaagcggcctcacattgctggcatgttgttgccgggtggcggttggcgccttacccggcctacaaaaccgaagcagcagccccggcatgcgcagcgccgccgggcacggagccgctttatgccgggtggcggctggcgccttacccggcctacaaaaccgaagcagctgacccggcaagcgcagcgccgccgggcacggagccgctttatgccgggtggcggctggcgccttacccggcctacaaaactgaagcagcaggtccggcatgcgcagcgccgccgggcattacaaaatacgccgctgctgacgctgcgcctcgcgggcgaggcgctttttacgcgcgtcgcacggttccggacaatcgcagactttctccagccccagcgcggagatcccaccgcagctgccctggatgctcttgcgcttcaccaggtagcccagcgacatgccgaggatcaccagcgcaaaaatcacaaaggtcgcgataaataccgtcagcatcgtcagcctccaaagtcgtcgaggagaatattctcgtcctcgacgcccagatctttgagcatcttaattaccgcggcgttcattaccggcggcccacacatatagaactcgcagtcttccggcgccgggtgatcgcgtagatagttctcgtacagaacgttatggataaagccggtatgcccggtccagttatcttccggcagcggatcggagagcgcgacgtggaaggtaaagtttggattgtcgcgcgccagctgttcaaactcctcatcgtagaacatttcgcgcagcgaacgggcgccgtaccagaagctgattttgcgcgtgctgtgcaggcgcttgagctggtcgaaaatatgcgaacgcatcggcgccatcccggcgccgccgccgataaacaccatctcggcgtcggtttctttagcaaagaactcgccaaacggcccggaaatcgtcaccttatcgcccggcttcagcgaccagatataggatgacatgatccccggcggcgcatccgggaccttcggcggcggcgtcgcgatgcgcacgttgagcataatgatgcccttctcttccggatagttagccattgagtaggcgcgcagggtcggctctttcacctcagagacatagcgaaacaggttgaacttatcccagtctgaacggtattcatcgggaacatcaaaatctgcataggccactttatgcggcgggcattcaatctgaatatagcccccggcgcgaaacggcaccacctccccctccgggatccgcagcttgagctctttaatgaaagtggctttgttatcgttagagataacttcacactcccattttttgacgccgaaaatctcttccggcagttcaatcttcatgttctgcttcaccgccacctgacaggccagacggcaaccggctttggcatcccgcttggtaatatgcgaaagctcggtcggcaggatatccccgccgccctctttaacagttacccgacactggccgcaggagccgccgccgccgcaggcggaggagacgaagatcccgttgctggacagcgtgttcagcagtttgtcacccgccggggtgcggatctgtttatccgcttcgttattgatctcaataaccacgtcgcccgcgttcaccagctttgagcgcgctgccaggataagccccgacagcaccagcacaatcagcgtgaacatcacgacgccaagaataatttccatacttattcgcccttatagctgcacgccggagaaggacataaagcccagcgccattagtccggtggtgataaaggtgatccctaacccgcgcaaaccggcgggcacgttggcgtacttcattttttcgcggatccccgccatcgccacgatcgccagcatccagccaataccggagccgaagccgtagacgatggactccgggaagttgtaatcgcgctgcaccatgaacgacacgccgccgaaaatcgcacagttaaccgcaatcagcggcaggaagatgcccagcgcgttgtacagtgccggaaaatacttatcgaggatcatctcgaggatctgcaccagcgcggcgatcactccgataaaggtgatgaagttaagaaagctgagatccaccccctcaaccagcgcgccgtcgcgcagcaccaggttatagaccaggttattgattggcacggcaagccccagcactaccgtcaccgcgacgccgaggccgaaggcggtggagacctttttcgacaccgcaagaaaggtgcacatcccgaggaagaaggccagcgccatgttctcaacgaacaccgcgcggacaaacaggctgatgtaatgagccatcaccgattactccttttcctgctgctcaggcttccagctacgcagggcccagatcagcaaaccgataatgaagaacgcgctcggcgccagcaggaacaggccgttcggctgataccagccgccgttctgcaccgtctccagcaccgtgataccgaacagcttgccgctaccgataagctcgcgcaggaagccgacgataatcaggatcgcgccatagccgagaccgttgccaataccatccataaagctcgccagcggcggcgacttcatggcgtaggcttcggcgcggcccatcacgatgcagttggtgatgataagcccgacgaataccgacagctgtttggaggtctcataggcgaaagcccgcagcagctgatccaccacgatcaccagcgaggcgatgatcgccatctgcacgatgatgcgcacgctattgggaatatggtggcggatcatcgagataaacatgctggagaacgccgtcaccagggtcaccgcaatggtcatcacgaaggcggtttccagtttggtggttaccgccagtgcggagcagacgcccagcacctgcagggcgatggggttattggcgatgagcggccccaccagcacgcgcttcacctctttcatatcgctctgttcagccattattcagctctccctcacgaacctttttcaggaacggaccaaagcccagttcgcccatccagaaatcaaagctatgctgtacgccattggacgtcagcgtggcgccggataaaccgtcaaccgcgtggagatcgcctgcgcgcgcgccgcctttcaccaccttcagcgccggcatgccgttgtcatccagcacctgcttgccgacaaactgctggcgccagttcgggttttccacctcgccgcccagccccggcgtttcgccctgatcgtagtaagtaatgccttttaccgtgcggccatcgacgtccagcgccacgaaggcatacatcatcgaccacaggccgttgccataaatgggcagcaccaactgctcaatcttctgctgcgcgtcgcgcaccaggtaaatttccgccagattactgcgtcgctttataccagccggatcctgactggcatccagggccatactctgctgcggatccttcagcgcctgagcctgattaaatttacccgggtctttctccagcagttcgccggtggccagattcaccagtcgcggggtaatgcgcgccgcgaaggtgtccgctaccgcatccgcatccatatcggggtgcatcagccctgacactgccaggatattgcgctgcttatccaatgcccgctgcgcctgctggcgggatttcagccccacggccgagcccgccaccacgatggagcagaccagacaaagcaccagcaccaccagcagcgttttgccgatgctatcgttacttttcttctcagccacgcgacttcctccgcttaatattggcctgcaccaccagataatcgaacagcggtgcgaagaggttggcgaagaggatcgccagcatcatcccttccggataagccgggttcaccacgcggatcagcacgcacatcacgccgatcagcacgccgtaactccatttccctttatcggtaaacgaggcggataccgggtccgtcgccataaacatcatcccgaaggcgaaaccgccgagcaccagatgccagtaccatggcatagcgaacatcgggttggtgtcggagccgataacgttaaacagggtggcggtggcgatcatgccgatcattaccccggcgacgatgcgccaggacgcgacgcggccaaagaggatgatcgccccgccgatgaagatcatcagcgttgacacttcgccaattgagccgggaatattgccgaggaaggcgtccatccagctcaccggcacgccagtcgccacgttcaccagcgcttcaccgccgccgctggcccactgggagagcggcgtggcgccggagaaaccgtccgccgcggtccatacgaggtcgccggaaatctgcgccggataggcgaagaacaggaacgcgcgccccgccagcgccgggttgaggaagttgcgcccggtgccgccgaaaatctctttggcgatcaccacgccgaaggagatccccagcgccgcctgccacagcggcagcgtgggcggcacaatcaacgcgaagagaatagaggtaacgaaaaaaccttcgttaatctcatgcttgcgcacaatcgcgaacagcacttcccagaagccaccgacgataaaaacggtgatatagatcggcaggaagaagaccgcgcccagggtcatcatgctcagccagccggcgtcggcactgaagctcacccctaaccactgggcgacgctgtagtgccagttgttggcgatcgcctgctgcagctgttcggcgccgtatagcttgtgcagcgccggaatggtctgcagcccaacgttgtacatgccccagaacatcgccgggaatacggcaaaccacacgaggatcatcatccgcttcaggtcgatggcgtcgcgcacgtgcgccgcgccgcgggttacctggcccggcgtgtagaagatggtcgccgccgcctcatacagcgggtaatatttttccagcttgccgccatgcgtgaaatgcggctcaagtttctcaatcaggtgctttaagcccatctcttatccttcctgctcaatccgggttaacacgctgcgcagcgccgggccatattcatactttccagggcaaacataggtgcacagcgccagatcttcttcatccagctccagacagcccagcgcctgagcgctgtcggtgtctccggccagcagatcgcgcagcagtatggtcggcaggatatccagaggcatcacccgctcgtagttgccgatcggcaccatcgcccgctcgccgccgttggtatcggtggaaaaatgaaagcgcttgcgcttgaagaaatggcccagcgtggtgcgggtaatcgagaatttctctttgcccggcatcacccagccgaagagctctttttcccgcccttctttgaccacgctcacctgcagatggaagcgccccaggaaggcgtgagggccatgggcgcgggtgccgctaagcaccgagccggaaatgaccctgttttccccctcctgcaactcacctgccagcagatcctccaggctggcgccgagcgtcgttttgaccagccgcggagatgttacctgcgggccgccgagcgcaattatccgttcgcagtagagctccccgtcgaggaaaagcttaccaatggcgatcgcgtcctgataattgaggtgccagacctgcttattcaggctcaccggctccagaaagtgaatatgcgttcccggcagccccgccgggtgcggcccgctgaactgattgaaacagacctggccgagaggatgaccgcccagcttgccgccgctgggctggcagacgtgcactttcccgtcggtcaagcgcgtgagcacggtaagaccggcgtcgaaggcggcacgttcggccagaataatcggctgcggctccgccgccagcggattggtgtccatggcgttaacaaagatagcggcgggcgtgctccccgggagcggcgttttgctgaacggtcgggtacgcagcgccgtccattggcccgacgccagcagctgctgctgtacggtgtcgcgcggcagttcggccagcgcgtccgcggcgtaacgggtaaacgccaccgcgtcattgccctcgatatcaatcaccaccgactgcaacacgcgccgttcgccgcggtggatcgcgctgacgatcccgctcgccggggcggtaaagcagacgccagggatctttttatcttcgaacaggatctgaccttttttgacccgatcgccttctttaaccgccatcgcggggcgcatgccaacgtactcttcgccgagtagcgcgacgcgcgtcaccgctggcgcgggagaaatctgctgtaatggcatgccagctatgggcaaatccagccctttcgtgattttaatcatatcgttagcaggtatccgtaacctcaaccccgacgcaggtcagggccagcttattgacagaatggcagagaagaaagggcgaaacggcgccagtagcgctcaggacggaagagaagcatcctttcttactctgatgatgaaccggcgcaagtgtaacatttcgtgagcggcggctgtagcgcaaggggcgataagtgcttctaaaatgcgagctattgcgcaaagttctcactgtgttttcgtcgctggcagggtataaagtgaggctgatttgtaaacgccgccacgtcgcccttgcgaaaaaatgccgtgatgctaatgtgagcgctctaaatccagaaaactctgatttcgggtctctcttgccgtcctggcaatgtggctattttgttttatcaaggaacaagcagtatgcgcaaaatcgcattatttattgcgatgcttctgttgccgtgcgtgtcatttgccgggctgctcagcagcaacagcccgacgacgccggttagcaaagaatataagcagcaattaatgggttcaccggtttacattgagatcttcaaagaagagcgcatgctcgacctttacgtcaaaatgggtgaaacctaccagctcctcgacagctaccggatctgcaactactccggtggcctcggtccgaaacagcgccagggcgatttcaagagtccggaagggttctataacgtcacccgcagccagctcaaacccgacagccgcttctataaagcgattaacatcggcttcccgaacgcctacgatcgcgcccatggttatgaagggaaatacctgatgatccacggcgactgcgtctcagtcggctgctacgccatgaccgacagcggtatcgatgagatcttccagttcgtgaccggcgccttagtcttcggccagccaagcgtgcaggtgagtatctatccgttccgcatgaccaacgctaacatggaacgccacaaatactcctactacgcggatttctggaaacagctcaagccaggctatgactatttccagcagacccacaaaccgccggtcgtatcagtgaccgacggccgctatgtggtgagcaagccgctcagccacgaagttgtccagccgcagctggcctcaaactacacgctccccgagacaaaataacgcccactcgcctggcatgatcttatgccaggtttcattggccgtcagcggctgcgtggcgataaccgtgaccacatcgttgggtgtggtctcgcgttgaaagtcgatctccacatcctggtccagcagttttgccacgccgaacggcgctcgccgggtgatccagtgcagattggtcgagcagaacgccattacgtagcgcccgtccgacagcagcatgttgaacacccctttctcacgtagttcacccgcgagggtggcgatatacttgaaaacgcccagcatattgcccggcgtgcgcggatagcgctcggttaaacggtgcagcagccagcaaaacgctttttcactgtcggtttcacctaccggatgaaaattaccggttttcagcgacttatagccttttagctgcccattgtgcgcataggtccagttgcgcccccacagttcgcgggtgaagggatgggtgttctccagggccaccctcccgcggttggcctgacgaatatgggcgacgacggaacaggacttaatggggtaatcctgaaccagtttcgcgatcggcgactgaaagctcggctggggatccttgaatgtgcgacagcctttaccttcatagaaggtgatgccccagccgtctttatgcggccccgtcccgccgccgcgctgcaccagcccggtaaagctaaaacagatatcggttggcacattggcgctcatcccgagcagttcgcacatagatcacctcaccctcacaaatcacgacggcgccggagcgaggccaccgtcaacagtacacactcacctgcctgttagcctttcgccatctctttttcgatcagcataatcagaatgtggatcactttgatatggatctcctggatgcggtcggcgtagccaaagtgcggcacgcgaatttccacatcagcgctaccggccattttaccgccgtctttaccggtcagggtgatcactttcatcccctgcgcccgcgcggcctcaatggccttaatcacgttgccggagttgccagacgtggagataccgagcagcacatcgcctgcgcggccaacggattcaacgtagcgggagaacacatactcatagccaaactcattgctcacgcaggagaggtggctgacgtcggagatcgcgatggccgggtaacccgggcggttttcgcgataacgtccggtcagctcttccgcaaaatgcatcgcatcgcaatgggaaccgccgttaccgcaggacagcactttcccacccgccttaaagctatccgccagcaggacagcggcacgctggatagcatggatattggcttcgtcctgcagaaagttagccagcgtttccgcggcttcgttcagttcgttacgaataagatcctggtacatgaggataatccttcagtatgagtggaataaccccggcagtgtaccggatagccgtcgaagcgagaagcagcaggcagcgttatccctcgctcttttgattttatgtgccgcttttgcatacaacaatgtgagcaaggttgtaattattttgtaaacacattgctaaataaaaacgcatgcactacaaccaatacatcacaagtggtcagacctcctacaagctcagggagcatttctctatgatgattttgagtattgttgcaaccgtcgttttactcggcgcgctcttctatcaccgggtcagcctgctgctcagcagcgtgattttgctcgcctggaccgcggcgctcggcgcggccggagtgtggaatatctggctgctactgccgctggcgatcatactgttgccgtttaactttgcgcctatgcgtaaatccatgatttccgcaccggcgtttcgcacattccgcaaggtgatgccgccgatgtcgcgcacggaaaaagaagccatcgacgccggcaccacctggtgggaaggcgatctgtttcgcggcaatcctgactggcaaaagttacataactatccgcagccgcggctgaccgccgaagagcaagctttcctcgacggcccagttgaagaagcctgccggatggctaacgacttcgccatcacccacgaaatggccgatttgccgccggagctgtgggcctatctgaaagagcaccgcttcttcgcgatgatcattaagaaagagtatggcggacttgagttctccgcttacgctcaggcacgagtactgcagaaactctctggcgtctccggcatcctggcgatcaccgtcggcgtcccgaactcgctgggtccgggcgaactgctgcagcattacggtaccgaagaacagaagaatcattatctgccgcgtctggcacgcggcctggaaatcccttgcttcgctctcaccagcccggaagcgggctctgacgccggcgccatcccggataccggcgtggtgtgcatgggcgactggcagggtcaacaggtgctggggatgcgcctgacctggaacaaacgttatatcacgctggcgcctatcgccaccgtgctggggctggctttcaaactctctgacccggatcgtttgctgggcggagaagaagagctgggtatcacctgcgcgctgatccccacctccaccccgggcgtggaaatcggccgtcgccacttcccgctgaacgtgccgttccagaacggtccaacccgcggcaaagatatcttcgtgcctatcgattacatcatcggcggcccaagcatggccggtcagggctggcgcatgttggttgaatgtctatcggtcggccgcggtattactctgccgtccaacgccaccggtggtctgaaatccgttgccatggcgactggcgcttacgcccatattcgccgccagttcaaaatctccatcggcaaaatggaagggattgaagaggcgctggcgcgtatcgccggtaacgcctatgtgatggacgctgcggcgtcgctgatcacctacggcatcatgctcggcgagaaacctgcagtgctgtccgctatcgtgaaatatcactgcacccaccgcggccagcgctccattatcgacgcgatggatattaccggcgggaaaggcattatgctgggcgaaggcaacttcctcgcccgggcctatcagggcgcgcctatcgccatcaccgtggaaggcgcaaacattttgacccgcagcatgatgatcttcggtcagggggcgattcgctgccatccgtacgtactggaggagatggccgccgcgcagaataatgacctgaacgcctatgacaagctgctgttcaaacacatcggccatgtcggcagtaataaagtgcggagtttctggctgggcctgaccggcgggcgcaccagcagcgcgccgacccgtgacgccacccgtcgctactatcagcaaatgaaccgtctgagcgccaacctggcactgctgtcagacgtctcaatggcggtgctcggcggcagcctcaagcgacgcgaacgtatctccgcccgtctgggggatgtgttaagccagctgtacctggcctcggcggtgctgaaacgctatgacgatgaaggacgcaatgaagccgatctgccgctggttcactggggggtacaggacgcgctgcaccaggccgagcaagccattgacgatctgttggacaatttcccgaaccgtctggtggcaggcgtaatgcgcctggtcatcttcccgaccggccgtcatcatcatgcgccgtcggataggctggaccaccaggtcgccaaaattctgcaggtgcccagcgccacgcgctcccgcatcggccgcggtcagtatctgacgccgagcgagcataacccggtaggcctgctggaagaggccctgctggaagtgatggcggccgatcctatccaccagcggatctgcaaagagttgggtaaaaatctgccgttcacccgtctggatgagctggcccacaacgcgctggccaaaggattaatcagtcaggatgaggccgccattcttacccgtgcagagcatagccgtctgcgcagcattaacgtcgacgactttgcgccagaggagctggcgacaaagccggtaaagctgccggaaaaagttcgtaaagttgaagctgcataataaaaccactaccacatcacacgccgggcggggaactttccccgccttttttcgccctctcctcccctttcgtttccatcagtagcatttttttaacaaaatattccgcggaccgccgcgcggctgatatggtgttacagttaacctaaccccctcatgagaatggagttgaccattgtgcctggcctgaaaatttcgctgttgcaacaaccgctggtctggatggacggccctgccaacctgcgccattttgatcgccaactggaaggaatcaccgggcgcgatgtgattgttttaccagagatgtttaccagcggctttgccatggaagcggcaaaacagtctttacccgaggccgacgtggtggagtggatgcatgcccgggctgcgcaatcccaggcgctgattgccggcagcgctgcgctgcaaactgaacacggcgctgttaaccgcttcctgctggtcgagcctgacggtacggtgcaccattatgataaacggcacctgttccgtatggccgatgaacatcatcactatgaggccggaaaccagcgcgtggtctttgaatggcgtggatggcggatcctgccgctggtctgttacgacctgcgctttccggtatggtcgcgtaatcagaacgactatgatttggcgctgtatgtcgccaactggccggcgccacgctcgctgcactggcagtcgctgctgatcgcccgcgcgattgaaaaccaggcctatgtcgccggctgtaaccgggttggcactgacggcaacggccatcattaccgcggcgatagtcggattatcaatccccagggggagattatcgccaccgccgatccgcatcaggccactcgtcttgatgccgagctgtcgctgagcgcccttcaggaatatcgtgaaaaattccccgcctggcgcgatgccgatcctttcacgatcggctaatcacccttcgggagccgctgcgctccctttttattccaccacgatccgcacagcacagtagaccaataacgcagccagcatccagttcagttgccgcccgtacagcaaaaacaggcgttgaaacagatgccccgccagcgcccggcacagatttcccagtgcgccaatcgccgccagcagcagactcacgctgataagccaaacaggctcgcgagtaacgggcagaacaaaggtagaaagcgcggtgatgccatacagaataattttaacgttgacgaactgtagccccagactcgcccaaaagcctaccggttctacactcggcatccctgtcgccggtttgcttttggcaatctgccaggccagccacaggatgtacgccgcgccaatccatcccaataccagggtaaagcgtgagtcgagttcaaccagcgaaaaggttaaagccgcgcaaatcaacatagtgataataaacccgacgctcatcccggccagcacccgcaggctgcggcgtagaccatgggaggtgacgctgctcagcgccaggatattgttgggcccgggtgtcagggcggtgatcaaagtgtaagttaaaaaggcgctaatcagggtaggtgtcacgggttttctcctcttgtctggcagacactacccgaagctgataatttaaaaaaatgaatattttttcattctcgcttcgataacatcgatacaaagaggaaatatggatctgcgacgcttcatcaccttcaaaactgttgtcgaagaaggttcctttctgcgcgcggcgcagaaactatgctgcactcagtccaccgtgacttttcatatccagcagctggagcaggagcttgccatcccgctgtttgagaaaatcggccggcggatgtgtctcaccgccgccggtaagaagctcctgccgcatgtctacgacctgactaaagtgatggcctcgattcgtcaggcggcacgccaggacgatgagcccggcggcgaacttcgcgtcgccactggcgaaacgctgctggcgtataaaatgccgcgggtgctgcagcgttttaagcaacgcgctccgaaagtgcgcctgtcgctgcagtcgctcaactgctacagcatccgcgatgcgctgcttgccgacgaggtcgatttgggtgtgttttaccgggtgggtaacgatgacgcgctcacgataatggagcttggccagcagtcgctgacgctggtcgcatcggtcgagcaggcgccggtagacttcatgcgcccgcggcagcatatcccgctgagctttatcatcaacgaaccccagtgcgtgttccggcagatttttgaaagcaccctgcgccagcgcgaaattactctggagaacaccattgagctgtggagtattgagagtatcaagcagtgcgtggcgggaaatctgggagtgagttttctgccacgctttgcggtggaggacgagctcaagcgcgggacgctggttgagctgccattcagcgagacgccgttgacgatccatgcgctctgcgcccaccatgccgggaaggctatcagtccggcgatgcgggtatttatgcagtgcatgcaggaggaacaagaggcgcgctgaaattcggcgacgaaaacgacgaaagcctgaatcattgctgactcaggctttctgaatagtggcggaacggacgggactcgaacccgcgaccccctgcgtgacaggcaggtattctaaccgactgaactaccgctccgcgttgttgttccgttgggaacgaggcgaatattacggattcccctctaccccgtcaacgctttttctaccattttgaatcgtttgctgcaaaaatcacccaaccgcctatttttaattcattttagtggctatcaggcacgccacaggcagcttccgcctttcttttgtaccaagtcgaggcgggattcatggttcgccagttcttcatctgaggcataaaccacgcgtaactgactgccggcgcggacgacgcgctgaattcccatctctcccgcctgctgctggctttcgccttccatagagaacgccatcgaagtctggccgccggtcatcatcaaatagacatcggcaaggatctgggcatcgagcaacgccccgtgcagcgtacgcttgctgttgtctatttcgtaacgcgaacatagcgcatcgaggctgttgcgcttgcctggaaacattttccgcgccagcgccaaactgtcggtgattttacaaaaggtctcggtttttccgatgccgcggtttagcttactgaattcataatccataaagccgatatcgaacgaggcgttatggatcaccagctccgcgccgcggatgtaatccataaactcatcagccacgtcggcaaaggtaggtttatccagcaggaactcatcggcgatcccgtgtacgccgaatgcttcaggatccaccagccgatcgggcttcagatagacgtgaaaattgttaccggtcaggcggcggttgatcacctccacggcgccgatctcaatgatcttgtgtccctcgtagtgtgccccgatctggttcataccggtggtttcggtatcgagaacaatctggcgcgtaattgcagtgctcatagcggtcatttatgtcagacttatcgtttacaaatcgatttcaattacaggaagtctaccagagatgctcaaacaggtagaaattttcaccgacggctcttgcctgggtaatccaggacctggcggctacggcgccatcatgcgctaccgccagcacgaaaaaaccttcagcgctggctaccgtctgaccaccaataaccgcatggaactgatggcggcaattgttgccctggaagcgttaaaagagcattgcgaagtggtgctcagcactgacagccagtatgttcgtcaggggatcacccagtggatccacaactggaaaaagcgcggctggaaaacggcagagaaaaagccggtgaaaaatgtcgacctctggcagcggctggacgccgcgcttggccagcataaaattaaatgggaatgggtaaagggccacgccggccatcctgaaaatgaacgctgcgacgagctggcgcgcgcggcggcctcccaccccacactggacgatgtcggctacctgcctgagagttaattctgccctttgcgccactgccgggtggcgcccaccgccggccgcagctgagttttcgctttgccggatttcatcggattgagcgtcagcggaatggtccgtttgcgggcgacaatcaattgcaaacagcccagcgccggcagatgggtgctcaacaatttgccgccatggcgcgaccagggcaaaacctggtaacgtccatagtgcagcacttcaaagttgagcagcgccagccagtccagctggcgcatcagcgtaaacatacggctattataaggcgttcctttgcgcaggaccggcaccagcttacgcaaccccatcaggctgaccggattaaacccggtcaggatcatccagccatcatcgatcagtacacgatcggcttcccgcagcagacgatgcggatcgctacaccacggcagggtgtgcgccagcaggcaggcgtcaacggacttttcggcaaagggtaaatgcagcgggtcagcccggacctgcattggatttcccgccagcgagacattcacctggtgcgagatggcgcaagcttcggtattgatttccgcgctcagattgccaatcttaagcagatgaaagccatataatttagccagccacggtttcatctgctgctccagcgtttcgcgatagtattcgccccacggcatactggaccaatgctcaggcgctgtcactgtgtgaggtatccttgccggcttcattgccaccttccgctacgctttagaggtaatttatgaatcttatcagtattcccgcgtttcaggacaactacatctgggttctcagtgagaataacggcccctgcatcatcgtagatccaggcgaagccgcgccggttctggcggccatcgaggaaaaccagtggcagcccgaggctattttattgacccatcatcatcaggatcacgtcggcggcgtaaaacaattacgtgaaaaattcccttctatagtggtttacgggccggcggaaacccaggataaaggcgtcactcaggtggtaggcgatggcgatcggctgtcaattctcgggcacgatttttccattttctctacgccaggtcacacattaggacatatctgttactacagcgaaccttatctgttctgtggcgatacgatgttttccggcggctgcggaaggctgttcgaaggtacagcagagcagatgtatcaatcatttatgaaaattaatgcccttcctgaagaaaccctcatatgttgcgcacatgaatatacgttagcgaatatgaagtttgcattgagtatcctgccagatgatagggacataaacgattactatcataaagttaatgagttacgtgcaaaaaaacaaaaaacactacccgtaactctgaaaaatgagcggcgtataaatttatttttacgcgtaaatgatattgatttaattgacaaaattaacaaagaaacaaatttgcaacactctgtggcgcgatttgcatggttaaggtcaaagaaagatgacttctgatatttaattcttgtcatcggccaacttcgccgttatccttggtcgtcttttaagcaactattgacacacacatgaaggcacgagcgatattactcgcctctgtcctgctggtggggtgccaggcgtctaagcacgatggcaccgtcgaacagcgagcacagagcctttctgcggctggtcaaggggaagcaggcaagttcacaagtcaagcgcgctggttagatgatggaaccttctacgcgcaagaccaggatctgtggacttccataggcgacgagctaaagatgggaataccggataatccccggattcgcgaacagaaacagaagtacttaagaaataagagctatctccacgatgtaactttacgggcagagccgtatatgtactggatagccgggcaggttaagaaacgtaacatgccaatggaactggtattactacccatagtggagagcgcttttgacccacacgcgacgtctggcgccaatgccgcaggcatttggcagatcattccgagcacagggcgcaattatggtttaaaacagacccgcagttacgatgcgcgtcgtgatgtcgtcgcgtctactaccgcggcgctggacatgatgcaacgtctgaacaaaatgttcgacggcgactggttgttaacggtcgcagcctataacagcggcgaaggccgggtcatgaaggcagtaaaagcgaaccgttcgcgtggcaaacccaccgatttctggtcgctgtctctgccgcatgaaacgaaaatctacgtcccgaaaatgctggcattgagcgacattctcaaaaacagcaaacgttacggcgtaaagctgcctacggctgatgaaagccgtgcgctggcgcgcgttcgcctcgacagtccggttgatatttctcagctcgcggacatggccggtatgccggtcagcaagctgaagacgttcaatgcgggcgtaaaagggtcaacgctgggcgcgagcgggccaaagtacgtcatggtgccgcagaagcacgccgcacagctgcgtgaatcgctggcctctggcgacattgccgccgtgcagccgacgcagctcgcggacaatacgccgctaaccagccgtagctataaggtgcgttccggcgacaccatttccgggattgcttcccgtcttggtgtgacgacccgcgatctgcagcagtggaataacctgcgcggctctggattaaaggttgggcagaatctggttattggcgcaggcagcagcgcccagcgtctggcgaacaacagcgatagcatcacctatcgcgttcgtaaaggcgattcgctgtcgagcatcgccaaacgtcacggcgttaatattcgcgacgtgatgcgctggaacagcgataccgacaacctgcgcccaggcgatcagctaacgttgtttgtgaaaaacagcgatcgaccagagtcctgatacctctggttcgacaaaaaggcaccgacttccccggtgccttttttgttgcctaaattaaaccgctttatgcgcttcgaacagaatggtatcgctggtaaacgatccgtcctcctgtaactcgaagtacgctttgacctccgccgaagcgctctgctgatataagcgaatcgcctccaccagcggctcaggagtacgcatccgcgccacccatgaactgaactccagcggcaggcgatcggtcaacaactggttaaccaccagccccgcttcagtcgccagcgtcaaccactcgccgctggaataattacgcacatgcgaggtgtcgcgcagggcttccaccgtctgcagccagacatcacgtaccggatgacccggcgacatcacgtccatcacgataatcaccccgcccggcttgagaacacgtttcacctcacgcagcgcctggccaacgtcatgccagtggtgagcagagtagcggctaatcaccacatcaaagctggcatcagcgaacggcagcgtttcggcgtacccctgctgggtcacgatattgctaaaacctttctcctttgccgcggcggcaacgacctccagcatctggctcgataaatcataggcggtcacctcggcaacctgtcccgccgcggtaaagctggcgtgccctgccccgcagcccatatccagcactttcgcctgaggaaaatcagccagccgttccgccagccgctgcagatcgcgaccagaggcgtgtacggcgctggtcagataggcgctggcctgggagccgaactgcttttcgacgttgtcatggtgagagcgtgttgtcatgttgtcttgtccttacggttttttttgagtaataaaaggcagcaccatgcatgcgcaggcctgccccatggcaggcctgaccaaccttaaattaatcaggcttgccgggactgaattcgactagtagcgggttgtggtcggaggcgcgggtcaccagcacggaagcatcgtgcacgcttaacccacggtagaacacaaaatcgaggggacgaccaaacgcgcggcggcgctgatcgtctgagaaacgaacttcgcgtaacgacatctcacgcgcaaagcggtacagcgcattcatccgcggccggctccaggcattgaagtcgccggccatgatcaccggcccgctgtgatgggcgatctgatcgccaattggcagcagctgtttgctgtagacgtcgacgccaaggctaaagttgacggcatggatattgactaccatcaacaaccgcgcatccggcagcggataaacggtcactaacgccgatttcggcaatcgcaaaataggctcgcgctcgcgcagcggacagcaatagatggggtgcgcggaggccagcgtcattacgccggaaggatgctgcggcaataccagcgccggcacctgatcggcggccagatagtttgaagtcgcgaaccggaccagttctggggtggtttgcgcctcctgcaacaggaccaaatgcgcatctttgccgaaatttttaaggaccgattgccactctgcgcgctgctgcttgaagatattccataccagcacgcggatcttctcatcgctgcttaatggcgtaccggcgggataaaccggacttacgcccgcaaacgcccccggaggcaatattctctccgcaggttgtccggcgacatagcgcatggcgtaggtgttctttcgcaatttgggcattaatcctcgataacagaaaccagcccgacgacgactggttattctgttatagggattttcccatacactttcaatgcaaattgcgagaaacccttagccttcgggagaaagcgctgccgaacggcgtggcaatttatctaaacgtccgctcaggaccaccaacagcaaagcgaccagcacaatcatcgcgccaatccacggcgtctgcgccagaccgtaccgttcgaccgtctgtccgccgacgatcgaccccagcgcgataccgatattgaaggcggcaatattcaggccggaagcgatgtcgacagcccccggggtatactgctctgctttttgcaccacatagacctgcagacccggcacgttgccgaaggcgaaaacgcccatcaccagcactgtcgccagcgcggcatagtgaacgctggcggtcagctggaagaccagcagcagtagcaccagcgcggcgaagataaacttcagcgcggagacggcgccatgcttatcggccagtttgccgccccacacgttacctatagccaccgagacaccatagcccagcaggatccagctcaccgctgacgggctgaagccggccagctcctgcatcatcggcgcaaggaaggtaaaagcggtaaacacgccgccatagcccagcgcggtaatggcgtagatcatcagcaggcgcggatgggttaatactctcagctgatcgcgcaggctggcgctggcgcggcccggaatattattcggcaccagaagcagactgctgattagcgcaatcaccccgagaatcgataccgcgaggaaggtttcccgccagccgaaatgctggccaataaaggtgccaaagggaacgccggtcaccagcgcgaccgtcaggccgccgaacataatggcgatggccgaggccgctttctcttttgccaccaggctggtagcaattgtcgagccaatagagaagaacacgccgtgtgccaggccggtcagcagtcgcgccaggatcagcgtttcatagcccggggcctgccaggccagcacattacccgccgtaaacaggaccatcaacgccagcagcagctgtttacgcggcatacgccccgttaacgccgtcagcaccggagcgccgatagctacgcccagcgcgtagatagagaccagcagtcctgcagaaggcaaagagatagagagttgctgggcgatggtcgggaccaggccgacaatcacaaattcagtggtgccaattgcgaaggcaccgatagttaaggcaaatagcgccagtggcataatttactccgtagcatcaggattaagatgacacgtagtatgaagggttgtataaataacaaaaactatcaaagtatcaatagaattttgctataggtgcaataatgagagccacatcagaggagatcgccatctttgtggcggtggtggaaagcgggagtttcagccgggcggccgagcagctcggacaggccaactccgccgtcagccgggcggtcaaaaagctggaatcaaagctaggcgtaagcctgctcaatcggaccacccgccagctcagcctgacagaagaaggcgagcgctattttcgccggatgcaggtggtcttgcaggaaatggcggcggcagagaacgatctgctggagacgcgcacgacgccgcggggcctgctgcgggtagatgccgcgacgccggtgatgctgcattttctcatgccgctggtgaagccatttcgcgaacgctacccggaaatgacgctgtcgctcgtctcgtctgagacgtttatcaatctgattgaacggaaagtggatgtggccattcgggccgggaccttaacggattccagcctgcgcgcccgaccgctgtttaccagctatcgtaagatcgtcgcctcgcccgactatgtcgcgcgctacggtatgccgcagcatccatccgatctgaaacagcatcactgcctcggcttcaccgagccggtatcgctgaatacctggccggtctcctgttgcgatggccagctgttagagatcgaagcggcggtgtcatccaatagcggcgaaacgctcaagcagctgtgcctgaccggcaacggtattgcctgcctgtcggattacatggtggataaagagattgccagcggagagtttgtcgagctactggccgataagcgcttaccggtggaaatgcctttcagtgccgtctattacagcgaccgggcggtcagcactcgcatcagggcatttattgattttctgagcgaccacgtaaaacagctcccgaaggagctgtcgtaataccttctcgggcggcagggcgaacggcataccggtagcgagtgattaatcccactgcggcgccagaccttccgggctcaccagccgatcgttgcaatccagcgcagcgatcgcctgtcgatcttcatcatccaactgcagatccagcgccttcaggttgctggccaggttatcacgcttcgtcgaggacgggatcaccgcgtacccctcgcccatcgcccatgccaggataacctgcgccggagtcgcattatgtttcgccgcgatacgggcaatcacttcatctttcagcgccttaccataagccagcgtcatgtaagaggtgatgtggatgccgtgctcacgtgcccagtcgacgactttacggttttgcagatacggcgagagttcaatctggttggtcgcaatgttttcagcgccaacggcggcaatcgcgcgctccatcagtggaatagtgaagttggagataccaatctgacgggtcagacccagcttcttcgcttccatcagggctgccataaactcttcaacggcaaccgcatcgttcggtgacggccagtggatgagcgtcaggtcaacatagtccgtgcgcagcttctgcagactttcttgcaggctggcgatgagtttgtctttgctcaggttctcgatccagattttggtagtgatgaacagctcatcacgcggcacgccgctttcggcgatagcctgacccaccgcggcttcgttgtcatagatttgcgcggtgtcgatagcacgatagcccagctccagcgcggtttttacggatgcgataacaacatcatctttcagacggaaggtgccaagaccaaatgcagggattgccatgattttcctcgttatttcttcatttcggttaacggatgaaattatggctgatggtgtggaggggaaaaagagcgattaatgcagaggatttttgctgaattagcaataatagagaacagatcaaacaaaaaagccctgagcaaatgctcagggctcttaataagtggcggaacggacgggactcgaacccgcgaccccctgcgtgacaggcaggtattctaaccgactgaactaccgctccaccgaatttcttcgctttattaccaccggttgtcaccccggctt

SEQ ID NO: 171 - DNA, 39408 bp, Unknown
  source: /note="Description of Unknown: MKP2_2161_1 Mutant Bacteria sequence"
cccccccccccgcccctcccgcgccccctccgcggcagcgtccgctgtttatccccgcccgctcgcgcgcagttcctggcccgtgaggcgtcggacggcaacagcgcgacccgcctgtgtgcccccgatgaccccccgcgcgacaccccgcgtgaaaacctcgccacgctgggcccggcgtttaaagccgacggcgtggtgacggcggccaactcatcgggcattaacgacggcgcggcggcgctggtgatgatgacccgccagcaggcggaaaaacgcggcttaaccccgcgcatgcgcattcgcggctgggcggtcgccggctgcggggcggagattatggggtttggtccctctcccgccacccgacgcctgatggaccgtctcaatatagatgtgcagtccattgatttaattgaactcaatgaggctttcgccgctcaggcgctggcggtgatgaacgatctgcgtctcgacccggcccgcgttaacgtcaacggcggcgcgatcgctctcggccacccggtaggcgccagcggtgcgatcctgccggtcaaactgatgtatgaaatggcgcgcagcggtgcacgcactggtctggtcaccatgtgcatcggcggcggccaggggatttctatgctgttcgagcgcgaaggcgcttagcaaaagacggcccgaagtggggcttcgggccgggcgtcgttcgggtcagcacccggcgacaacctgtgagctgacgaacgggatcgtctcgatcccggcaaggcttctgaccacgaatacggggaaataataaccatgtccgcaataaatgaaaaggcggtaaacgggacgcagctgcaacgcacccataaaaaaatctaccgccatttgatgccgctgcttatcgtggcgtacatcatcagctttattgatcgtaccaatattggcatggcgaaagcgaccatgtcggtggatatcggcctttccgcaaccgcattcggcctcggggccgggttgttttttctcacctacgcagtgctggagatccccagtaacctgtttctcacccggattggcgcacggcgctggatagctcgcatcatgattacctggggcatcctctcctgcggtatggcgtttgtcaccgggcctacgtccttttacgtgatgcgccttctgctcggcgccgccgaagcgggactctatccgggcattatttactacctcaccctctggtttggccgcgaagagcgcgcaaaagccaccggcctgttcctgctgggggtctgtctggccaatattatcggcgcgccgctgggcggattgttattaagccttgatggcatgtccggctggcacggctggcagtggatgttctttatcgaagggctgcctgcgatagcgctggcgttcgtcgtctggcgcagactgccggataaaccagccgacgcccgctggctggacagcgacgatgtgcaagccattaacgcggtactggcgaaagaagccgaggaaacgcgccatacgccgagccgtttctccctgaaaaacgcgctgtccacccgagtctttttgttgctggtgctgatttactttacccatcagttttcggtttacggcctgagttatttcctgccggggatcatcggtagctggggccagcttactccgctgcaggttggtctgctgaccgccatcccgtggattgccgccgccgcgggtgggatcctgctgccgcgattcgcccgcacggaacagcgttcccgcagcatgctgatggccggatatctggtcatggcgaccggcatggcgattggcgccattgccggccacggtgtggcgctgcttggcttctcgctggccgctttcatgttcttcgctatgcaatccatcatctttaactggctcccgtccatcatgagcgggcatatgctggcgggcagcttcggcctgctcaactgcctcgggctgtgcgggggctttctcgggccgtttattctcggcgcgtttgaggaccgcaccggtgcggcaacgtccggcttatggttcgctgtcgcgctactgattatcggcgcgctggtgtccctgtttctcaaaagttcctcatccccaggctccgtatcggcgaaacaggcccacggcgaaaaagtgtaatcaggaggccattatgcgcattgaagtgttactggatttaaaaacccgactcggcgaaagcccgctctgggatgtcgaacagcagcgtctttggtgggtggacagcctcgacgggcgcctgttcgcctgcaacgcgcagggcggcgcgatcaagagctgggacgtgcgacagaaaattggctctttcgccctgcgccagaacggcgaaggcgcggtggtggcgctgcagaatggcgttcatctgctcgacttcgccagcggcgagctgacgctgttgcaccatccggaagcggaccgaccctttaaccggctcaacgacggcaaagtcgatcgtcagggacgctttctgttcgggtcaatggatatgcgcgaagaggaaccgagcggcgcgctatatcgcctggaccccgatctgtccctgcacgtgctgaagaaagacattatcgtctctaacgccccctgctggagcccctccggcgagaccttctattttgccgatacctggacgggcgaaatctgcgcctgggactacaacaccgcgaccggcgatctttccggcgaacgggtcttttgccatgtcgatcgcagcgaaggcggcgcggcggacggcgccaccgtggacagcgaaggctatctgtggaacgcgctggtctacgcgggcaagctggtgcgctataccccggagggcaaggtcgatcgcatcattgagatgccggtgaaaaaagtgaccagcgtgatgttcggcggcgaaaaccttgatgtgctgtacgtcacctccatggcgcagccgcccctgccgcgcttcccggaagataatcagctgcgcggcagcctgttcgccatttacgacctgggcgtgaccggcgtagcggaacggcgcttcgccggctaaacgaaccaccggctcgccgcgataacaataatacccggcgaactgactctgaccctgacaccaggcggcgcgcatcatgctgtcgcgacgccgcggagtaaacacgactatgacaacaatcaatcacacacctgccggcgaacaacgtggcaaaaagcggctgatacatcgcttctcctgggtttcgctactggtttgctggctaatctgggtgcttaacgcctacgatcgcgagatgatcctgcgccttggcccggtcatctctaaggagttctcgctctcgccggaacagtggggcaatatcgtcgccctgatcatggtagcccttgcggtgctggatattcccggctccatctggagcgatcgctacgggtctggctggaaacgagcgcgctttcaggtaccgctggtgctgggctataccgcgctgtcttttatttccgggattaaagcgatcagccacgggctgacggcctttgtgctgctgcgcgtgggcgtcaaccttggggccggctggggcgaacccgtcggcgtcagcaacaccgcggagtggtggccgaaagagaagcgtggttttgcgctgggggtgcatcataccggctatccgattggcgcgctgctgagcggcgtggtggcaagcctggtgcttgccacgtttggcgaaggcagctggcgctactgcttcctgctggcgctgctcgtcgccatcccgctaatgatcttctgggcaaaatattctaccgccgaccgcatcaacacgctttatcagcatatcgacagccaggggttgacgcgcccggcgacgcaggaaagcagccatgtcgccaaaggcgaagggatgaagacctttttacgcaccctgcgcaaccgcaatatttcgctgacggcgggcaataccctgctgacgcaaatcgtctatatgggcattaacgttgtactgcccccgtatctttatcacgtctccggcctgtcgctggcggcgtccgccgggctgagtattatcttcacgcttaccggtaccctgggtcaggtaatctggccctggctgtcggatagctttggccgtaaacgaaccctgatcgtctgcggtctgtggatgagtatcggcattgcgctgttctatttcgccaccaatatgccgcgccttatcgccattcagctattttttggcctggtggccaacgccgtgtggcctatctactacgccatggcgtcggactccgccgaagaacgcgccacctctaccgctaacggaattataaccacggcgatgtttatcggcggcggcatttcgccattgcttatgggctggcttattcagtttggcggcggctgggaaaatccagcgggttatatctacgccttctttaccatggcgggatgtgcgctgctggggatgttattacagctcatgaccaccgataaaacgccgcgcaaagcgcattaacgcaggagaacgtatgaagattgttatcgcgctggattcgtttaaaggtagctgtagcgcgcaggccgcttgcgcagcggtagcccagggattgcgccgggttgaccagacgctggagctggtcgaaatgcccgtgtccgacggcggagagggactgctgtcgactctggcggatagtccgttgcttgagggggcgctgtggcaacagcagcgctgtacctcgccttatggcctctccctgcaggcggatttcctgatcctgcccggcgagcgggccattatcgagatggcgcaaagctgtgggctcgaactcacgccgccagcgcagcgggatgtgcgtcaggccagcagctacgggctgggcgaacaggtaaaggcggcgctggacgccgggtgtcggcatttgattatcggcctgggcggcagcgcgaccaacgatggcggcatcggttttgcccaggcgctcggcgcacgattctggcgtaaggacggcaccctgctgccggctcccgcggcaggtcaggacctggcgcatattcagcgcatcgatttgagcggtctggacccgcgtctacagcaaagcgaaatacaggcctcctgcgatgtcactaaccctctgcttggcgagcatggcgccacctgggtgtatggggcgcagaaaggcgcggacgaggcggcgctctgcgagctggaggcgggaatggcgcattatagccagctgcttacgcaaaccctcggattcgacgtcagcggacggcccggcgccggggccgcgggcggtatgggggctgcgcttatcgcctataccggcgccacgctgcgtccgggcattgacctggtgctggagctgcttaacgccgacgaccatcttcgcgatgccgcgctgacgatcgtgggtgaaggctggctcgatcggcagagcgcctttggtaaggccccggtgggcgtggcaggcaaagccgcacgccatggcgtgccggttgtggccctttgcggcgggcgtgatgagagcagccggcaattatatcaacaccatattgacgcaatgtggtctatttgccagcgccctatggcgctggcagagtcgatgaacacatgcgaaccgctcctcgccgacgccgcggagaatgttctacgaacctttctgagcgggtggcgcggagaggcacataagcggataactgtatgattattacaacagcgctggctaatgaaattgtcgcccgggcaatggcgataattcatcataacgtgaatgtcattgaccatcatggacagatcattgcctcaggtgaacggcatcgtatcggcgaacagcatgaagtcgcccgggaggtaatacgcaccgggaaacgcatttgtattaacaacgccgcggaagccgcgcgttttcacaacgtgcatcctggtattaatcatcccattatctatgacgatcgcgtggtgatggtggtaggcatcagcggcgatcccgcggcgataagccgctatgctgaactggcggtgctcaccgccgaactgctggtccgccaggccatagagatgcgggaaaccaactggcggcaacgtctgcgtgacaccttgttttgtcagtatcttgaacaaggggctacacccgccgggcaagaagcgcttcatcgcctgctggaacttggtttcgattttgatacaccgcgggttccgatcgtagtgaccgtgcaggtcgaacagcatcagttaagcgacatactgagtacgctgttgcgggaattctcgcagctctccggcgtaagtgacgttattttgctgggcagccatgaaatattgatcctcaacgcgctaagcgaagcccaggaaaccctgctgcggggcattgagtttgtactgagtaatcagataagccattaccatatcgggattggcgtgcaggcggacagcgccccggacattcgcgaggccattcggttcgcccgctcggtgatcgaagtgggtagcaaagtgcagccgcagcggcagatctactactttcgcgaaatggcaatgctctgcctgttcagggtgctggaagacagctatatggtcaatttttttatcaataacgtacgccagctgcttgagcatgattccggcgaagtgctgctggataccctgagcagctttattgccaataatgccgaaccgggcaaaacgtcgctgctgttggggattcatcgtaatacgctcacctatcggctgcagcaaattaaaaagcatatacagctcgatccgatggtcttcaccgacctgacgcagctggcggtgtcggtacactgttatcgccggctgaatccgcgccagagcgaatggattgatagcttaagctaacgtacgatagattcgaattgatgccccatccgccaggataagtggccaccatggccacttctttcctggcgtgggtaggaaactacgcttttgacgacggcgacagccactgatataccgcagacaaatcctctccggcatatcccgcgtccgccgcctgctgccacagttcggcgatgtattccagccccggcatggtgtgcggctcggccagggaaagcgccagccgggcatctttcagggcatgcgccagctgcatctgcggggtaaactgctcgctggcgatggcgtccagtttcactttgacatagggcgccgccagcgggccgccttccagggcgctccacagctggtcgggggtgaagcccagcgtcttcgccagctgggcgctctccgcgatgccctgcatcatcgaaatcagccaggcattgaggaccagcttcattttctggctgttgcccgcctcgccaaaccactgcgtcccgcgggagatagccgcaaacaccggttcggcagcggcgcccttttccctatctccgctggcaagcaccaggatctgtgccttctccgctggggctttggtccccgacaccggggcatcgatataggtcatcgctggctgaagttcccgcaacaacgcgatggcctgccgggtctccggcaggccaatggtgcccatctggcaatagatcgcctgcggctgacaggcgggcgcgatttgcgccagtacctcgagggtggcctcgccgtcggcgagcatactgatgatcacctcggcatcggccaccgcctgctgcggcgtggcgtgtagagataacccatgcgcctgtaaatcttcgccgcgggctggcgaacggttccagccggcaacggtaaagccgtttttcagcaggttactggcaaaagcgtgtcccatggcgccgagtcccagcaccgcgacctttggtaatgtactcatcttgtctgtcctgattcgcgtcttaataaaagcggacctctactatcgcatctctggcacggatgtcagtagcaataacgggcatgaaaagtgacactgtcactgatattctcaaggctgacgaagccattccagtaagcggcgcatcgctggcgacaggctggcgtcatcctggtagcacaggcacaaacggcgctgcgcccagcggtcctgtaacccgatgacggcaaacgaatagcgctgccggtaacgctcggcaataacgcgcggcaggatcgccccgccggcgccgtgcgccaccatctcgcaaagccctgcaaaatggctcatcctgacccgaacgtttagcacctggccgagttcagctgcgtgctgttcgatatgctgctgtagcgcactggtctgatagagggcgaccaacggctcgttgagcaccgccgcaaacgccacttcctctttttcggccagagggtgagctggcggcacgatcagcaccagcgggtcgtcagcgacgggatcgaggcgcagcggcccggggtcgaccgcatcggacaccactccggcctgcgccacgcccgccaggatacagctgacgatatccgcgctggtgcgttcttcggtttcgatctgcaccgccgggtgcgctgccatccaggcggcgagcttccccggcagaaaggccgacatcgccgaggtgttggcgaacaggcgcagcgtcccccgctgaccgcaggcgaaggcgtgcatcgcctggcgcagacgctgctgctgcgcaagaagcgggcgggcatggcgcgccagtacctccccggcctctgtcatcgtcaccccgcgggcatgacggtgcaacagcggcacgccgatctcggcctccatcttgcgcagcctctcactggcggacgccagggccagatgggcattcgccgctccgccggtgatactgccggtatccacgatggcgataaatagccgcagatcggccagatccagtcgcatcaggccctcctttcccttcggtttttccgtagtctatggccaacataccgcattgtggccctcacgaccagctgtttcaatgcccctttctaccctgaaaagtgagccataatgttcgatttacacacgatctctttcctgttgatctttattgccgccgggctggtcaaaggggtgaccggcatgggattgcccaccgtggcgatgggcctgcttggcctgctgatgccgccgcaggccgcagcggcgctgctggtgcttccctcgctgctcaccaatctctggcagttactggcaggcccggcgctggcgcagattgtacgccgtctctggcttatgatgaccgggattattattggcacgttggccgggtcctcactgctgatcggcctcaatcctcggtggtcggcgctggcgcttggcgccgcattgatagtttatgccgggtatgcgctctgcagtccggtgtttcaggtttccggccgcgtggagaagtggctgtcgccgctcatgggcgggctgaccggcgttatcaccggggcgaccggggtatttgttattccggccgttccctggctacaggcgctgggctttcgtcgcgacgagctggtgcaggccctggggttgtcgttcaccctttccactctggcgttggcggctggcctcgccctgcacgatggctggcatgatgatgcatggctattgtcggcgctggcgctgttgccggcgctgctcggcatgtggctgggacagcggatccgctcgcgtctcagcccgcagcgctttcgtcagggctttctgttgttcctgctggcgctggggatagagctgatcgcccggggatggctggtctgaatcctctagcggcgggtaatgtgcttcacattgtacttactggtgttctggtagatctctgagaaatcgacgatcgcccggttctgggcgtagctgatcgactgcacccgcagcaggaggctgtttggcgccacctgcagcagctccgcctgctcacgggtcgccagcaccggggtatagctgcggtggctctcgatgatggtgatatggcactcttttttgaaatagttgaacttagactgctcgaggttacccacgctgagccaggggaaggtggcgaatgggatatagctgttttccaccaggattgggacctcatcgatcagccgcagccgtctgacgtaatacactttctcccccggctggatctttaactgctgggcaatggctggcggggcatcaagcagggtaaattcaataactttgttacggtagttggtgacgcccaccacctgcatctggtagttaaagccctccagttccccgccatgatagttacttttacgcacaatgcaggttccgctgccgtgccgccgcgcgatcaacttttcttcctccagtagcgcccgcgctttgcgcagcgtcatcaccgagaccttcagctccgcggcgagcgctttttcgctgggcagcatatcgccgacggcatagtcgtcgctgttgatgcgggccttcagttcagtggcaatctttttataaatcacttttagatgtctcgatggagtggcgccagtcaacggtagatatgaataacttcatgtaattaaatgattatttttatctttcggcgaaaaaatcaacaatgacacatctataaatcacgccatatttatatatctgtccagcaacaatatatatgactttcgtcacagatggcccttttcctgctcgggatcccgggggtctgctcctagtctgataagcctattcatcaggtgatgacagcggtctgcaaagacgagaggacaaccatgattggagtgaaaaagcttcaggacttttccaaggcgatgatcgggccggtgctgtatctgccagctatcggcctgttgatcgccctgttcagcatgacgaccaaccggctgtgggtggatgaaagcagcgggctctacctggtggggaaatttgtctccagtatgctctgggcgctgatgaaccatctagggtttctgttctgccttgggctggccagcggtctggcgaaaacccgcaaggccgaagcggccttcgtggcggccatgacctggctgatgtacctggcggcgaataatagctggctaaccctcacccatcgcctggcgaccggagccaccaacgcgcaactgtacggcagcggacaaacctttatcttcggttttcaggttatcgatatgggcgtattccttgggattatccttggctgcgctgtcgcctttgtccataatcgcgtggttgggattgagtttcgcggcgcgctgtcgatctacggcaacagtaagctggtgctgatcgtgatgctgccgctggttggcatgttcgccatcgccaccgtctatctctggccggtagtggagctgggcatatcggcgctgaccggctttatgaaatcctttggcgccatcggggtcttcctgtacggctttctcaaccggttcctgatccccaccgggctgcatcatctgatctggtcgccgttcgtttttacctctatcggcggtcagctgctgatcgatggtcagaccgtcattggcgctaagcctattttcctggccgaaatcgcccgccaccccgttgacgcgctcagtgattccgcccgtttcctcacctatgggatggtgaagatttttggcaccgccggcatggcgctcgccttctaccgtacggcgaaagcggagaataagcagcggttgaaagtcacgctgatccccttgattgttacctccgtcctggtggggatcaccgaaccttttgagtttctctttatcttcaccgccccattgctgtggcttatctactccctgctggacggttttttccagatgctggcctggctgcttcacgtcagggtctgcgccactaacggcctcatcgatttcgtcgtctataacctcccggcgggagtcagcgcgacgcgctggccggtgtttgtcgccctcggtctgctggaaaccgcgaccatgtacctggtcggcaccttctgtattacccgtctgcggctgctcaccccgggccgcgaaaccgcagccgaagatgagcattcgcaacaggctaatagcgagcatccggataaaggcgcgctggtgattgccgggctgggagggaaagagaatgtctgtgcggtgggcaactgttttacccgtctacgggttgatgtgcgggaccccgcccttatccagcagacgctgttgaaagagagcggcgggagcagcgtgctgattaaaggaaaccatgtccaggttatctatggcctgggagttaacaaaattcgaacggcggtcaacgccagtctgggtgttattgaataacgaggtggtaaatgaaagataattttgtggtcaccattgccggcggcggcagtacttatacccctgggattgtgatgatgttactggaaaatatgtcgcgctttcccctgcgggagatccgtctgtacgacaaccatcaccagcgtcagaagactatcggcgacgcctgcgccatcctggtggctgaacgcttcccacaggtgaagttcagctataccaccgatccgcaggcggcctttaccgacgtcgctttcgtgatggcgcatattcgcgttggcctgtatgagatgcgggaaaaggatgaaaagatcccgctgaaatatggcgtgccgggccaggagacctgtggtccgggtgggattgcctacggtatgcgctcgattgccggggtgctggagctggtcgattatatgcagcagtacgctccaggggcctggatgctcaactactccaacccggcggctatcgtcgcggaagcgacccgtcgcctgcggcccgacgcgcgcatcatcaacatctgcgatatgccggtggctatcgagggtctgttcgccgacatcctcggcctgccgtcgcgcaaagcgctgaacgttcgttactatggcctgaaccacttcggctggtggaccagcatcaccgataaagccggtaacgatttgatgccggcgctgaagcgtcacgtggcggagcagggatacagcagcccaaaagaagactttcagcataaggcgccgagttggatcgagacctttaaaaaggtgaaggatgtgtttgccctcgatccgacgacgctgcctaacacctatctgaaatactatctctacccggactatgaagtggcgcattccgacccggagtctacgcgggccaacgaggtgatggccggacgcgaaaaagaggtctttgatatggcccgggagatcacccgtcgcggcacggcggaaggcgcgcatttccatgccggggcccatgccacctttatcgtcgacctcgcctgcgccatcgcctttaacacccaggagcggatgctgttgatcgtcgagaacaacggagccatcgccaacttcgatgagacggcgatggtggaagtcccctgcctggtgggcgttaacggtccggaaccgctggcgatggggaaaatcccgtcattccagaaagggttgatggagcagcaggtggcagttgagaaactggtggttgacgcctggattgagggcagttaccagaaactgtggcaggccatcgccctgtcgaaaacggtgcccagcgcttcggtggcgaaagccatcctcgatgaactgatcgtcgccaacgaaggctactggcccgcactgcactgatctttttcgtgatgggtaagatgcagagaatccaccttctctgcatttttacccggtgtttcccccggtgatgcattcatccttaacctcctcccccgaaccgctcatttcccccttcagaccggaggtaaaaggcctctatcttcattttgccccgatcgtgacaatgaaatataaattctattcttcaatattatggcgtaaaaatgtgatctgcgtagtattcttcgatttacattaacccactgaaaacaacatcgttattacctcactgtaaatttaacctgcttttcatggggatatactccctttagcctttgtgattggcttcatgcatttaccattctgcaacactgatttgaaattaaattttcataatgtgatcttgttgcatgttcattccatttctttgtgccatattcttaccacggtaaatcgccggagcgacagcaacgtgccacaccagagcgctgttcatcggcaaatgtcgtcgcgactgacgcactaaagaccgctaacccgcaaaggagaacggatatcgactacatccatgtcaacaccaagccgtaaacctctttgaccgccattgcttagcgtaccctgccttgtgctgagcaattacacaaagaagaaaatcatttaattcagttagatacgacaacacaggcgtgataaatcctgactggggagatgtatttttatcttgtgtcgttcaacaaaataaagggactaccatgtcatttataacaaacctgaaccagcaacagagaaaacgacttcatcagatcaccttagtggccaccttcggcggcctgcttttcggttacgacaccggcgttatcaacggcgccttttcctcactgaagcagtacatggcgctgaccccaaccaccgaagggctggtaatgagcgttctgctggtcggcgccgcgctgggcagcgtgtttggcggcaaatttgccgattacttcggccggcgtaaatatttactctttctctcctttgtttttctcatcggcgcgttgctttccgccgcggcccccgatatcactaccctgctgattgcccgcgccctgctgggctatgccgtcggcggcgcttcggtcaccgcccccacgtttatttcagaagtggcgcctaccgagatgcgcggcaagctgaccggcctgaatgaagtcgccatcgtcattggccagctggcggcgtttgccatcaacgcgatcattggcatcatctggggccatctgccggacgtctggcgctatatgctgctggtacaagcgattccggccatctgcctgttcgttggcatgtggcgcgcgccggaaagcccgcgctggctgatcagcaaaaatcgtcatgatgaagcgctgcatatcctcaaacaaatccgcccggcggaacgcgcgcagaaggagtacgatgacatctctaccctgatcaaaattgaagctggtaataagtacagcgcccagagcacctttgcgacgatcgtcaaaacaccctggatcctcaaaattttgctggtcggcattacatgggccgcactgcagcaaaccaccggcgttaacgtcattatgtattacggtacggaaatcctgagtgccgccggtttctccgaacgaacctcgctgatctgcaacgtgctgaacggtgttttctccgtgggcggtatgctgatcggggtgctgttccttgtcgaccgcttcaaacgtaagacaatcatcatctacggtttcgccattatggcaaccctgcatctgattatcgccgctgtcgattacaccctggtgggtgacctgaaagctaccgccatctggctgctgggcgcgctgttcgtcggcgtgatgcagggctccatgggctttattacctgggtggtattagccgaactgttcccgctgaaattccgcggactgtcgatggggatctcggtatttttcatgtggatcatgaacgcggtggtcagctatctgttcccgctactgcaggcaaaactgggccttgggccagtcttctttatcttcgccgccattaactatttagccattcttttcgtggtctttgccctgcccgagacctccaataaatcgcttgagcagttagaagcagagctgtcagcaaaccatgaagataaaaaatccactcgtctcaccagggaggttggttatgatcgataacatcacgctggataatctgcatattggctgcaaagccagtaataaagcggaagtcatcgccatgatcggcgcggagtttaaagccaaaggctatgtcaatcaggaatgtgtccactttctgctggagcgtgaacatcaggtctcgacctttttaggcaatggcatcaccctgccgcatttgccgaaatccgcgacggatatcatccttaaaaccgggattgagatctatcagtttcctgatggcgtaatctgggatcggagcaatgtaatgtttattgccatcggcgtgatcgcgaaagagaaagagcatattgacgtactcaaggaaattgcctcgatatttagcgatgagctgatcgctaacgcactgtcattaatctccgacaaacatgatttcctgaaaattctgcagcataacgccttgccccattaagtatgacaccgaccggagctctggccccggtcggattttcacccctcgcccagcaaacatggcgaataatctgattctccccgttataacctcaatggtaataataaccagagaaaccaacgtattgctacttgcttgaagtacgcgcattagcgcaggcatctcataactaaaaaaccattaaaacaatgagttaaatattctccagggctactgaccctcaggtttattgcttgcgctgttagcaccgtacgccagtgattcctgcggtattccattagttttgatttatatcaatacctgttcgatcgttaaaatgcattttacagcgcgattattttagcagggtgaatacgacattggttttacgattgggatatttatttagccgacccgcaagtctgtggggatggctgatgtgtaatgcgtttaacggtattgcgattgtcctctgctttcgtggcataagcagcgtcaccggtttcagcgaggcgatctggcaggtcatcatcacgctggctattatcatatcgacctggtacagcgctaactattttgctgcgctggaagctcgacgcgataaacgacgctatctgctgctggcctgggtggtcatgaccattctgttgaattttattcaccttggcggtggttaacgccatttattaaaggatcataccatgacgctggcgatgctgttggtgcttatcagccaccataaagggctgacgctcttgctgatcgtaattattgcgctgctgtttattgcgctcactccgctggtcaaaaaactgttgagtcaccttcacgatcgttcctgaattttcttttatgaccgcctacagggggccttctcttcgtcatctccgtttatcccgccacccgctcccccagcatacagtttgtggcaacgccagaaaaagaaatgagaaccattatcataaaagctgtgctaacgtgtcagcccaacaataacgccagaagcaacaaaacagggggacagacgaggtgaagttgagttcagggagcatcacaacaggtcgtacgagcgggctgctgacgctggcgattggcgcactcttctacagcagcggcagtattgcccggccggatcttcagccgctggggccgaacattgcggataaagggtcggcgttttaccactttacgcaacgccagtatgactctgccgatggcgaacgtcactaccgggtatggaccgcagtgccggacaaagccccgcccgccgccggctatccggtactatatatgttggatggcaacgcggtgatggataaactcgacgacgcgtttctgcagcagctcttcgccggctccccgccggtgatcgtcgctatcggctaccagaccgcgctgccctttgataccgcagcccgcgcctgggattacaccccaccgctaaagacgcatgagcctcgcgccgggaaacccgcgctaccgccgcgtaaaaccggcggcaatgatgcttttcgccagctgctgaccgaaacgatggttccccagacggaagctaacctgaaaatagatccccaccagcgcgctatctggggccactcctacggcggattgtttgtgctcgacgcgtggaggaaggcttcgccgttcgggatctactattccgccagcccgtcgctaggtcaggccctgcaatcgcctttgcaggcaagccaaagtcttgatgccgtccgctttcgcgggaaatcgctgtacctactcgagggtgacggtaaagcccgtggagagccgtccgggcacgaggcctcgcttgaggtgttgcgtcaaacccaacagcagcttgccagtaaagggttgaccgtagccttctggcgctaccccggcctgacgcacggtcagatgttcgaggtctcgctgcgctcggcgctgctgcatctttccgggcaggcagcgcttgcgcatcaataacgcccttacgcccaccagcggagggtgggcgcatcagcgccggtcgggcaggtgtttgatatcgaccggctcgccgaacagaaatccctgcatctcgtcacatccctcctcttcgaggatctgcagttgtccagccgtttccaccccctcggcgataagcggcgtattgatcgaattgcccagcgaaataatggctcgcacgaatgagcgtacctgagggttgctctccacatctgtcataaagctgcggtcgagtttgatgacgtcgaaatgaaaatcgcgcagcatgctcagggaggagtaaccggtgccaaagtcatccagcgcaatactgatccccattttttgcagatgatgcagaacgctgaacgccagctgtttattgatcacaaacgccgtttcggtgacctcaaactccagcagactgaccgggtaggcggtacgcatcaggatctcgcggactttttcgataaagctacgatggcgcaactgcaccggagagatattgaccgaaacttttctgttcaaaccattttccagcgattcgttacacacctgctcgagcacccagtaacctaagggcacgatagcgccgctctcttcggcgatgggaataaacacgtccggcgggatcgtccccagctgcggatgctgccagcgcagcagcgcctcgtaaccggtgatgctacgatctttgatgttgcggatagcctgatagtggagcgaaaactccccggcgtgaataccgcgccggatatcggcggccatcatattgcgctgccgcgtcttgtcatccatttcacgttcataccagcaaatcttatggtcgaggctgctttttgcccgatacatagccagatcggaattgctcagtatcgtattaatatccgtgccgtcctccgggtagactgagatgccaatgctggcggagagcaccacttccgtcgcggcaaacgtctgcttaccgctgaagcagtgccacaggcgcgcagcaaaggcatccacttcaccctcatcggaaaaaggtttaacggccacaaactcatcgccgccgaagcgggcgaccatctcctccttctgcagcgttttgagcacggcgcccgccacgcgctgcagcagctggtcaccaatcagatggccctgcagatcgttaatctctttaaatttgtctaaatcgatcgtgaaaatggcaaagcggcgggcatcatttccagtgatcagcttctccacccgttcaaaaaactccacccgattgggtaaaccggttaacgcatcgtagcgcgccatccaggcgacgcggtcgttaatcgccttctgttcactaatgtcgcgggtaattttggcaaaacccagcagggtgttctgctcatcgcggatggtatcgatcatgacatgcgcccagaatcgggacccgtctttgcgataccgccagccttccccttcaaactgcccgctacgcagggcgatttccaggttttttgcgggtacaccggagagttgctcagcttcgctatagaagagaccgaagtagcgaccgatgatctcgtcgctcaggtacccttttgcccggcgggcgccctcattccagctaatgaccgtgccgtcggcgctcagcatatagatggcataatctttaacgctttcaataaagtggcgataggcaatatccgtcaggtgatcgttactcatggtacagcgctctctgtggctcggtcgtggcaaaacgcattagatatagcagaattacgcctattaagaatacaaggatatggccttttgttggcctctttctgacccggacaccgcagtaggcgcggcggacgctctcgttaagcgtagtggaccaggccgtccgaaggagtgatattccccgcgatttttgcacttaggtcgcccactaatagttacttttattgattaaaaagtttgattgaaagaataaataaaaggagtaatgttaataatactttctatggaggttaaatatgttgcgtgattatttaaaagtggaaaaagaagaccaacttgttgaacaacagagtcggcatgacaatagccagcattattcttcggtgaccgaatgggttattttaagtaaagatggccagcgcaaaggccgggtatccctgttcgaccgcttcaccacccgccgctcctggagcgacagtttccgcattacgcagttcgataatgcgggtaaagtggtggtggataaactcactgacgcgctgtaaatccttcggattcccggcctgacgggagaatattaatacgcaaaattaacacctgcataaaatatattgatgcgtcgccatcatgttattttctttctgcataccgataatctaatgggtaattttcgccatggtgcacagcgcgaatttttaacccgaaaaaatgctgaatataagcccgctggtcgggcttttttgcatggtgctcgccatctacgccacaaaatgccaaggacatcccgcgctggattgtatacgatgtatatacgaatcgttacggtatatatctatgggaatcgtcaaaatctccgatctgctgcacgatgatattcgtgatgccagcaaagccatgtcccgctccgtcaatgcccaggcggaatactggatccgtctgggcatgatgagcgaactctaccctgagcttaaccaccagcagatcaaactgctgatgctgaaatccggctctgaccgtctgctggaggtgatcaatgccatcaataatcattaaaaccgccgacgaactcgcccggcagcgccatgccggccagctgctggcgtcagtgtttgatatgctggatacttttatcgttcccggcgtaacgacgatggcgattaacgatcgagtggaagattttatcgttaaccagctgcacgcccgcccggccagcaaggggcaatacgattttccctatgtgttgaacacttccattaacgatgtggtgtgccacgggatccccaaagcgaccgaacatctgcgcgccgggatgattgttaacgtcgatatcaccctcgagaaagcgggcatgattgccgactccagtaagatgtacctgataggcgatgtctccccgctggcccgccggctggtaaagactacctatgaagcgatgtggaaaggcattgaggtggtgaagcctggcgcgacgctgggcgatattggccacgctattcagcgctgggtggaggaacatggctatagcgtggtcagagaatattgcggtcacggcgtcggtcaggaaatgcatgaggaaccgcaggtgctgcattacggccgccccggagaaggcgccgtgctgcaggaaggcatggtgttcaccattgagccgatggtcaaccagggcgacagccgtatcaaaaccaaaaaagatggctggacggtggttacccgcgataaaaaactctccgcgcaatgggagcacaccgtggccgtcaccgccaacggttttgaggtgctgacgttacgcgacgatgaacagtcggggatccgctgagttgcttccttttctctatgacggtgggccgctttccgatcccggagctcgcttgggcgccagacgacacctgattctgccgccgggcggcggcaataattgttttcatgaatgattttctgcgcgcgcgtctgcccgctggttatggctgatgcgcgcataaaccgcacaacggtttatcctttacctccttgcatcagcttactcttcattgcctttatcccgccttagcgatagcgaataatgacatccgcttcactatgctgcgcatttcgccagtgaatactgacctcaccacgattgtccggcatggcgtagcgaggacggttgtttgtcaaggcgacctgttccggtgaatggtgctggcacgagacatcgatacgatcgtgccggggggcgataacacaggccggattgatgacccgtcctgaaaaatgaacctggccggaaagcgcagcagacgacgccagcggcgccaggcacagacatagcagagcgagacggaatggagacatagcaatcttccttgataacgggtgacactgcgcggcacagcatcgtttctgtgccctacaacctgcggcttcctgccgtcactccacgctactgcaaaatagcggcagcgtaaatgattattccgggccacccggtcaactgccgggaataacagcaactttttcgtaaaatttgctcagaacagttatctcccggaaataatgcattatacgtatgggactctttttaatatttaatgagattatacttacaccaaaaaataaataatgttacagcttaacacatcttatcaatgggcctttacgatgttctccgtataatcccgcccccgacggtaatatacattagcgatgcttaccgtttttttgtgaacagaaataaaaaacatgctttaaaaatgttaaacgcttttgttaacttgtgattatttaataaggtttgagtatgaaagaaaaaggcaccctgctggttgttggttcactgctggccttaagtctggctactgtgaccaccgcccgcgcggcgggtacactgaatttcaccggtaaaattattaacgagtcctgccagatcaccaataacggtggcgatgttaatgtcgattttggcaacgtcgatatgtcggcgctgaaatcccatgaagcgaaaaccgcagaaacgccgttcactatcaacctcaccggttgcccactggcgcagaacatcagtatcagcctggaaggtactccggacaccaacgctaacggcaccagcgccgccgtgctggcgctctctgacgccgcggataccgccaaaggggtgggcattgaagtcttctcttcccctgacggctcaacggaaggcactcagctgacctttgacaagcagagcaaaacggcggtttcgcaagccgacgaaaacggtgatattgcatttaactttattgccgatctgaagagcgattcctcacaggatgtcaccgccggcaatattaatgccacggccaatattgatattgtgtacgaatagaatgtcctgattgccacttttccaagggcagcgtccccctgcccttattctcattcctcgtgaccggatcctcaattatgcagtgttataaagcggcttttatcctgagccttctcttttgcccgttcctggcgtctgccgccggggttgccattgccggcacacgtgtcatttataatgaacaaagccatgaggcagacatcacggtaaaaaacaccaatcctcacgatccggtgcttattcagagctgggtagacgatctggctgataataataaatcaccgtttatcgtcaccccaccattgttccgtctggatgccggagacagcaacgatctgcgcgtgttattaacctcggcgcaactgccaaacgatcgggaaagtttgttcaccctgaatatcaaagtgatccctgccaataccgcgccggctggcgagaacattctgcaatttgctattaagaatcaactgaagctcatttatcgcccggcagggctccctggctcggcgctcgacgcggcgcagcacctgcgctggcgggtcagcgacaaccacctgcaggcggagaatgcctccccctattatgtgactatcaccacgctcacctgcgcgggccagaaccagaaaacgccgcttgagcgcagcgtgattgctcctcacagccgtgaagagtattccctacccggcgaggcctgcgcccgcgaggtgagctggcgcattctggatgactttggcgctgtgcagacgtttagcgcccccgtttcggcgcactaagcgtctgatgtcgcgatgcgccacggcccggctcataccgttaccatcgtcagcctctccatcctgctgggcggacagagcgcgctcttgcacgcccaggcgacctttaatatggatctgctggagaaaaacgaccatttgccggcagtggatctgcaacgcttcaatcagcaggcgggccagccgccaggcgactatccggtgagctggcaggtcaacggcgtcacgctggacgcccgtaagaccgtcacgtttcgccagaacgatcgcggacagctcacgccctgccttaagccggaagatctgctgcaggccggagttaacccggccgtgctgtcccaggcgcccggcgcaacgtcccgctcatgtcccgaactcaacgcgctgctgccgggcagcacggtcaatttcgattttgctcatcagcggctggtaatgaccattcctcaggcgctgatgacgcaccgggcgagggataatgttccctctgcgctgtgggacgaaggtattagcgcctttcagagtaactatcgttattcaggcgccagccagcgtacccgcgagggcagcaccgagcgcgataactatctgatgttgaaaagcggcgtgaacgtcggcgcctggcgcctgcgcgccagcaatagcctgaccgccaacagcgatgataagccccagtggacgaccagcggcgcctggcttgagcgcgacctgacgcgctggcagagtgaactgaccctcggggataccttcacgtcgggcgatgtgtttgacgcggtacagtttcagggaatatccctcgcctccagcgatgcgatgctcccggactcgcagaaaggttttgccccgaccatccgcgggattgccagaaccaacgcccaggtcacggttcggcaaaatggctacgtgctgtatcaaacctacgtcacccccggcgcgttcgtgattgacgatctttatcccaccgccagcagcggcaatcttgaggttgccgtcaaagagtcggatggcgaaatccgccgcttcacccagccgtatgcttcggtgaccagcatgcagcgcgaaggcagcctgaaatacaacctggtcgccgggcgctaccatagcgacgatgccagccagcggccgttgatgatgcagctgtcgctgatgcgcgggttcgcccacaacctgacgctgtttggcggactgcagagcgcggcgcaataccataacctctcgctcggcgcaggacaggggttgggagaagccggggcgctctcgctgcagctgttaaacgcccgcgaccggcaccagcaggatccgatcgatggccgggcctggcagctccagtacagcaaaggttttgatcgtcttggcacgcagttgactttcaccggctggcgttattcgcatcagcgctatgccacgctgagcgaggcgttttccagcccgggtagcgacgacgacctgcaggatagcgacaacaaaaaagcaaccctgcaaatcaccgccagccagagcctgccgtacgatatcaccctctatctgagtctcgaccaggacagctactggtcagggggcgccacacagcgtaccgccaatatggggatcagcagccaggttcacggtatcgcgtggtcgctcagctacagcgactcccgcagcagccacggtgacgaggaggatgacgagccgcattccgacaaagtggtgacgttgtcactttccgtgccgttgagccacctgctgccggggagctatgccggctataccctgacctcctcccgccacagcgttggcagtcagatggtcagcctcaacggcacattgctggacaatcacgcgcttagctacgccgtcagccaaacccgcgatcggcaaaacgggtccagcggcagcctgacggccgggtacagcagtggaaggggcgatctgaatctcggctacagccacgattcgcaggccgctcgtctgaactacggcgccagcgggggcattctgattcaccgccacggggtagtctttacgccggaaatgaatggcgctgtcgtcctgattgacgccggtggcgccgggggtgtgaccctcgccaaccagaaaaccatcgccaccaatggtgacgggtacgccgtgctgcccttcgccaccgcctatcaccgcaacgacgtctctctcgacagccattcgctgccggagaatgtggatctggccaacagcaccgtgacgctggtccctaccaaagacgcggtggttctggcgcgctttcacacccacgttggctataaggcgctgtttacgctgcagtcgcggggacaaccgctgccctttggcagcgaagtacgcgccaaagacaccaacagcatcgttgccagcgagggtcaggtgtacctggccggcctggcgccaaaaggcaccctttatgcgcaatgggggccgggccctcagcagcgctgtagcgcccgctacgatctcaccccgacgctggcgcagaccccccatccactcattttacagcagacgttatcatgtcctttttaactctcctgcgtcgggtcgccctgacgctgttatttattctgttaccggccgccagcggatgggcctgtacgccagtgtttgtccgcggccaggcctccacccttcggctgaacgtggggcagctcacggttccggctgacgccagacccggcaccccgctgtatcataaaagtttcgcctggaaccgccttagcgacggcggcgaacagtggatccgctgcgcggacgatccgcacgggttgtcgccgctgctgctggacagtctgctgtccgggggagtgacgcgaccgacggtttatcaaactaacctcgccggcattggcgttcgcgtatcgctgcgcgctatcggcggctatggcggctttcctgaccggccgacgccctcgccgtttagccaacgggtggacaatcccgccgccttgcccgatgcggtgtggaaactgggctatttccgcctgacgattgagctcattaaaaccggtcccgcggcgacgccgggcgagcttgagtatcacagcgagcgctttttaatggcggagcataccccgctggccgcgttagacttaaccggcaggatcagcaccgcgggatgttcagtgaatgacgccacgccagccctgatcaagctccctgcggcgatgcttgaccacttcggcggcgtcggcaaaaccaccggcgacacccctttcgcgctgcagctggattgcaacagcgcggtcacgattttcctgcgagttgacggcgcggagcccctctccgcccgggggcatggcgttctgcgcaatgacgccaccgacgatcgggcgcagggtattggcgtgcagttgctttaccatcgcctgccggtttccctgaatcatgagatgacgctgggcagcgcgagcgcgggccggtttaccctgccgctcactgcccgctactaccagacacgttcccggatcaccgccggtcaggtgtcggccgtcgcgacctataccttgcattatgactaggcgatggcgaaccgacggatgaagcggatgaaggaattgctctgaccggcgaatcgtaagagaatagcgcctacacgcgacgatctgagtacacgggagttcatcatcagccattctcgtcgattccccttagccagcaaagtggcgctggcaggcgcggcgctcatcgccgctggcatgctgttcagctgcaccagtaaagcccctaaatcccttgtcacgccgccgaacgctgccgccgtcaaagccgggcaggcgcaccgggagccggtgcgcggcgtgtggctcaccaccgtttcgcgccttgactggccgccggtcgggtcgattatcgccagcacgccggagagtcgcatcacgcagcagaagctggcgctgatcgctaaactcgataacctgcagcgcctggggatcaacaccgtctttttccaggtgaaaccggacggtacggcgctctggcggtcggatattctgccgtggtccgatatgctgaccggcaaaatcggcgaataccctggctacgatccgctgcagtttatgctggatgaagcgcacaagcgcggcatgaaggttcacgcgtggtttaatccctaccgcgtctcggtcaacaccaaaccgtcgacgattgccgagctgaacaacacccttactcaggtaccggccagcgtgttcgtcctgcaccgtaactggatccgcaccgccagcgatcgctttgttctcgacccgggcattcccgaagcacgggactggatcaccagcatcgtcgctgaagtggtgcagaactacccgattgacggcgtgcagttcgacgactatttctataccgaaaccgcctcttccccgcttaacgacaacgagactttccgccgttacgggcagggctatgcctcgaagggcgactggcggcggcataacacccagcagctcatagcccaggtttccactactatcaaaaagctcaatccgaacgtcgagtttggcgtgagcccggcgggggtgtggcgcaaccgctcccacgatccggcggggtccgatacccgtggcgcggccgcctatgatgagtcctatgccgatacccgcagctgggtgcagcagggactgctcgactacatcgcgccgcagatctactggccgtttgcccgcgatgccgcgcgctatgatgtgctggccaactggtgggccgaggtggttaaaccgacgcatacccggctgtatatcggcgtggcgctgtacaaggtgggtgaaccgtccaaaaatgagcctgactggacggtggacggcggcgtgccggagctgaaaaagcagctcgatctcaatgagactctgccgcagatccagggcaccatcctgttccgcgaaaacaacctcaatcagccgcaaacccggcaggcggttaactatttgcgcagccgctgggggcagccgcagagctagccgccagccggctctgctatagcgcctgcagcccttgctgcaggcgggcgtgcagcttcagcatgttctctgtaatggcctgccagacgtggctggaaaagtccgccggcagcgtccggcgagcgctttcgattgcctgcggcacatgcccggcaaactcctggaggatcgccagcatctgctcccggggaaagttcaccgctttggccgtcgccagaaaatgacgcggatagatggcgttaatctctgttttacgcccttttgtggcattgagccccatcgacagcttcagatcgcgcagatgcagtcccgtgccgcccagcaccggaaacgccgaaataatgtcgtagaacggtgttaagcggtagctgccgccgggcaacaggtaaattgagaagttttttgcgtgaccgtccgtcgcccccgtcagccactggaagaccatgaacttcataaagtcatagcgatctttcagcgcttcactcgagcccagcagaaaggtcatgatcgcggcgatacccggcccgccgtcagactcatatttcatcgctgaaggaagaccaaaagcctgacacagatcctcctgcggcagacgcagcagcacccgtccctcctgcgcccagcgccggtcgaagcgggttaccgccagggcgcggatccgcggggtggtgatgatctccgcttccggcaccgccaggcccagttctctggccagcgccaggcacagaaactcattatccacgctttcacgcagatccagcgtcgcattgggctgcttgatctcgccgatgggcagcttaatgatatgcgtggtcggcgtggcgccctgcggaatacaccactgctcgcccatccgcagcagcgccgttttctcctgggcgccggccaccgagatacggaaatcgtcctggctggtaatcatcccgagggggatatccgactggtaagcggtcagcaaagcggtgagctgcgcctcgtccagcgtctgccagcgtaatccttccaggtgcgcctcttcccccggcggcaggagggtcaccgcccctacgctatcccgcccgacttcggccagcagatcgaacggctgcttcgagcgcgcctgatagcgcctgacgatccggtcgcggacctgcgggctgtcgggcagcaggttatcaaaatagtgatacaccgcgtcggcagtgatattgccatactgcagcggcagtgagagggagagcggtctggcgcgcgggctgcgcagccactcttcgtcatagcgaaaactgtgcgccccgttagcctggcgggttaaggttcccacgcgcacattgttcatccaggtggtaagcgtcgccattaccagtcaaggtccgtgttgttatcgggagccggcgccgtctcagcagctttggcgttcagcgtcatcaccacccccagcgactggaggatcttaaacagcgtggttaaggtggttttgtcggggtgattttcaaaattggacagcgtggcctgcttaatgccgatccgcctggccagcgcatcctgggtccagtggttctgctggcgcagcagcttcaggtaattggccagctgcacgggactgtatatctgcggggaattcatcgccttgttcctcaccatcatttatccccctgtcgggataaaattggttttataccctataggggataatgtcaaggatatcccctggtggggataggagaataattatccttgtgtggggataaaacaggaaggatgatcgccggagccacctgtacatgcccggtggcggctgcgccttaccgggcctacgggctgtctctacccgctccgttacgatccaggccgggcaagcgcagcgccgcccggcagcgggcagccggcttagctgccgcggtaggtcgaccacccgcccggggcgatgagaaacggcagatggaaatggtcctctgccgcctcgccgataacaaaatcaatctgagcccgggtaaagacgctctcgcgcccggcgcgggcaaaccacgccccggtttccgctgttaagcaatagcgccccgccggcagcggcgcggcgctaaaggtggcgatacgcccctgggcgttggtcaccaggttcgccagcgtctcgccctcccggctcaggctgaccgttacgccttctgccggcgtaccggtggaaatatccagaatatgggtgctcagggtgctcattcgccaatcactccttccagtcttaacatcgtaatctctcgcagctgggcaagcgcctcggccacttcttcgtcggcggtatgctgcagccggcgcgtcagcgcctgcagaatctcttcgccgctgcgccctttggcgcggattaaaaacacccggccaaagcgggcttcgtagcgggcattgccctcccgcagggcctgcgcgagccgctcattctcgctgtccaccgacgactgctcctggcgcgacagcgccgcgtgcgcctggctgccggtcggcttctcaccgatccgcggatgggcgctgagcgccgcgttcagctcgtcctctccccagttagccatcgccttacgggcgacctgcagcagcgcatggcggctggcgaaaggtcgcaagcttaccagcatctcgctccaggccgggatcgccacgcagggagccaacagcctcgccgcctcatcttcacataggctgttaaactgattcagcgcgatcatcctgactccttaacgatttcgtcgccgcctgctcctgcggcagaataaggttcagcgctatcgctaccagcccaccgctggtggccgccgaaccgaacagatcgccgaccatcggcggaaaatggctgagaaacgccggcaccgactccacgccaagacccgcgccaaacgccagccccacgatcagcacatcgcgacggctcagcggggtctgggtaataatccggatcccggccgccaccacgcagccaaacatcaccatcgtggcgccccccagcaccggcgccgggatctgccgcagcagttcgcccaccgggggaaacagcccgagcaggatcagaatcacgccaatgtagcgtccgacatagcggctggccaccccggtcatctggatcacgccgttgttctgcgcgaaggtggtgttcggaaaagcacagagcatggccgccaccatacagctgacgccatccgccaggataccgcccttcagccggttacggaaagcgcgatcgtcaacagactgttgcgaaatcagcgagttggccgtcagatcgcccaccgcctccagaatacagaccagcgacaccagggcgaccggcagaaatatcgcgctgttaaactgaaagccgaacggaaacagcgtcggcaggcgaaacagggtgtcgcccaggctgtgaagatggaactgaccgctcagccccgctgcgatgcagcccacggcaatgcccaccaccaccgaggagagccgcagccagcggtttttggcgcagctcagcaggacgataaccccgagggtgcccgccccgagcgcgatattgctcatgctggcgaaatcctcggccttttccccaccgcaccagttgatgacgctgaccttgatcaggctgatgccgatcagcgcaatcacgctgccggtaatgatgggagtaaagattttcttcagcggttcgataaagcggctgacaatcaccggcaccagagcggcgacaaagttaacgccaaacagcatcgccatcatatcctgcggcccgccgccctgggcttttacccacatccctccggccaccgtcacgccgagaaaggcaaaactggtgccctgcatgcagatcatcccggcgccgatgccccatacccgattggactgcagaaaagtgccgatgcccgaggccagcagcgacatactgatgagatacggcagccagtcgccaagcccgagggtagcgccgatgatcagcggcggcgtgatgatccccaccaggcccgccagcacatgctggagagcgctgaaaaaggccggaagcggtgggatccgctgttcaaggccgtaaagcaggccactgtgatgttcgtcagacatagtgatatcccgtagcaaagagaagtgcatgggctagtgcacaaagcaggccagagacgacaaaagggcaccaataaatttattatcactccaaaatcatcaacttagattacgctcgtgatgcatcacccctctccgctgctgaaccaggcgcctgaaacgatagattcttaatgcaacatacagaaacttttgattcataaaaaggcaaccaatacctcacattgcaccgatgcggtgcgtcatgagccatcgctgtgcctcaggcaggcggttttcctccctccggcgaattggtacgcaaattgctgtagtcagtcacaacatcgggagaaggagaaaaaaatgaaagcaatcgtgattggcgccggcatcggcggtttaagcgcggcagtggcgctcaaacagtcggggatcgactgcgacgtctatgaagcggtgaaagagatcaaaccggtcggcgcagcgatttccgtgtggcccaacggcgtgaagtgcatggcccacctcggcatgggcgacatcatggagaccttcggcgggccgctgcgccggatggcgtatcgtgatttccgcagcggcgagaacatgacccagttcagtctcgccccgctgatcgaacgcaccggcagccgcccctgcccggtctcccgggcagaactgcagcgggaaatgctggattactggggacgggacagcgtgcagttcggcaaacgcgtcacccgcggtgaagaagacgccgacggcgtgacggtatggtttaccgacggcagcagcgccagcggcgatctgctgattgccgccgacggcagccattccgcactgcgtccgtgggtgctgggctttaccccgcagcgccgctacgccggctacgtcaactggaacggtctggtggagatagatgaagcgctggcccccggcgatcagtggaccacctttgtcggcgaaggcaagcgcgtctcgctgatgccggtctccgccggccggttctactttttctttgatgtgccgcttccggcgggtctggcggaggatcgtgacaccctgcgcgctgacctcagccgctactttgccggctgggcgccgccggtgcagaagctgatcgccgccctcgacccgcagactaccaaccgcattgaaatccatgatatcgaacctttcagccgcctggtgcgcggccgcgtcgcgctgctcggcgatgccggacacagcaccaccccggatattggccagggaggctgcgcggcgatggaagatgcagtggtgctgggcgccgttttccgccagacccgagatattgcggccgccctgcgcgagtatgaagcccagcgctgcgaccgggttcgtgacctggtgctgaaggcgcgcaagcggtgcgatattacccatgggaaggatatgcagctcaccgaagcctggtaccaggagctgcgtgaggagaccggggagcgcattatcaacggcatgtgcgacaccatcctcagcgggccgctgggctgaccgtcgccatggattcgatcaccgcactcagcgtctgaatggccatttgcgcgggccgcgaaagctgacgcgagggcgcagtacacagcgccagggtcagcggtcgcaacagcgtactgcgcagcgggacaaaggccagctgtccacgctggacctcgtccagcacgtcgagcaggctaaggagcgtcacgccgctgccgcgtagcaccaacgacttgataagccggatatcattgcagctgatggtattctccggcgcaaagtcatggtggcgatagaggagcgccacccgctcatggacgatcagcggcgcgccgggcacgatatgccgctccaggctgagctcgcccaaagacagcgccttcgcccccgccaggggatggtccggacgcatcacaatccccacctccagttcggcaaaggccagcacgctgagtccagcctgcccctgcggatcgaggatcaggccgacgtccaggtccgcctgacgcactttctggctgacggtgtggctgtcagccacctgcagatccagctccagccacggccagctggcgatgatctccgccagcgcggcggcgaaacccccttccgccagcgcctgcaccatgccaacgctaacgcttccgcgcttcatcccctgcagctcatcgaatttctgccgcgtctggcgaaactccttttgccagcgcagcaggttgtcatacagcaactcaccggcggtggtcatccgcagtccctccggcaggcgctcgaacagcggggtgccgaaggcctcctcagcctgcaggatctggcggttaatcgccgaggcggaaatatgcaactgctcggcggcccggcgcaggctgccgcagcgggccacggcgatgaaatagtgcgcgaaacgggaaaatggactcatggcgcccctgtactcttttttgcaacagcagagtgaattaatggtgatggatgtgaacaccctaatatgacaacaataatctcacaacaataaaacaatcaccgatgtgagcaggaagagaaatcatgaagacaaccacccccacgccccccgcccattgcacctttgatccagaggactggctgcggctggcccgctgctggcacccggtggcccgcgcctgcgatattgccggcgccccggtgaaagccaccctgctggacgaacagctggttatctatcgtattaaaggccaggtggtggtcgcccgcgacgtctgcccgcaccgcggggtgccgctgaccctgggatttcatgaagaggaaggcatcgtctgcccctatcatggcctgcgctttggcgaggatggccgctgcaaccgcatcccctccagtccggggcaacccattccggccaaactgcatctcaccagcttcgccgtggaggagcgctacgggctgatctggacctgcctggcctgcgatccggacaatccgccgccgttaccgaccatgccgcactgggacgacgcgggatttcagcaaatcaactgcccggccttcgaggtgaagggatttgccggccgccaggtcgaaggctttctcgatgtcgcccacttcgcgtggatccacaccgacaccttcgccgatccggacaaccagcaggtgccggactataccccgcaggagacgccgttcggctttgttgccgactactggagctcggtgggcaattacccggccagctccgatttccgcgcgccggaagggttccagtggctgcgtcactttgaaatgcatctgccgttcaccgctacgctgaccatccattttcccgccgacgccaggctggtgatcatgaacgccgcctcgccggtgtcgtcccgggtgacgcggatgtttgcccctattgcccgcaacttcgatctgcacgtgccggtggaagacgtacatgcgttcaacctgcgggtatttgaagaggaccgcctgatggtcgagacccagcgtccggaacggttgccgctggatctgaccctggaggcgcatattccggcggaccgcagctctatcgcctaccggcgcgggctgaagaagatgggctttggcgatttctttctggtatgagtggaggtcatatgcgcgacatactcccggtggtggtcgatggcctgtggcgccagggcgcgaaaaatctggccgttcgtctggtgagcgccgaggggcaaccgctgccggcgtggacgcccggcgcccatatcgatctccatcttccctgcgggctgatccgtcagtactccctgaccggcaacccggccgaacgggatcgctatctgctctgcatcgcccgcgagtcgcagtctcgcggtggctcccgttatattcatgacaccctgcgcccgggacagccattgatgatctctgccccgcgcaaccactttccgctgcacgagggcggccatgtggtgcttctcgccgcagggatcggcattacgccgctgctggcgatggcccacgcccgggcggcgtccggcgccagctttacgctgcactattacgttagccgtgcgcaggaggccgccttcgccaccgagatcgcccgccagctagcgggtggaatctgccagatccactgctcagacgaggggcagagtccgcgccagcggctggcgcaggatctgggggctccggacgccgacacccgggtctacttctgcggtccgcccggatttatggcccgggttcgcgataccgcgcgggcggccggatgggaggaggcgcaattgcacagcgaagcgttccagccgcccgccccgacggcggcgtcggcggcggacggaaccttcaccatcaccctcgcctccaccggggagcgctggccggtgccgggggacaaaaccatcgcccaggtgctgcaggaacatggcgtcgcggtgccgctctcctgcgagatggggatctgcggcgcctgcctgacgccggtacgcgagggaaccgtcgaccaccgggataccgtgcagtcggaggcggaaaaacaggccgcagagcagcatattgcgctgtgctgctcccgcggcctgtcggccaatttagttatcgatctcgcgggataagcggcccgtcaccggctggtcggcgcgggcgaccggtttcacccgtacggcggcgaaaacaatcaccatcgcgcccaacagcagcagaccgctgccggtgaagacgccgctggcgccgtgcaaatcaaacaccgccccgccgccggcggccccggcgctgatggccagctgaatagaggcgaccagcagaccgcccgcgctttctgcttcatccggcacggtggtagcaagccaggtggaccaggccaccggcaccaggccgaaggcaaatccccacagggcgaccagcagcccggccagcacggtcagatggccaaacgtcaccatcagcagcgccagaacgctcatcatcaacggcaccagcgccagggtgagacgcaggctacggctcagcagatagctcgccaccgaagtgccgataaagttagcgataccgaagccgagcaatatcagcgaaaccccttcgacactggcctgcgcgacggtctcaaggaacggccgcaggtaggtaaagaaggcgaaatggccgctgaaaatcaggatcgtcgccagcatgccgcccagcataccgggacggcgcagcactctgaacagcgtggagaaggtcccgacgctctccgggcgcatggagggcagcacccacagctgccagagcagcgccagcaggctgggtatcgcacagagaataaacacgttgcgccagccgatcagctccccgaggtagctgccgagcggcgcggccaccaccgtggcgacagacaccgcggaaaagatgatcgccagcgcctttggcacatgggccgccggcaccagacgcatcgccgtggcggtggacatcgcccagaagccgccgatggcgatccccaacagcagacggcccagcaggagaaacgccagcgaatcggcaaaagcgaccatcaggctggagactatctgcagtacggaaaagaacatcagcacccagcggcgatcgatattgcgggtggcggtggcgatcagcaggccggtaactaacgccaccagcgccgtcgcggtgaccgcctgtccggccatcccttcactgacgccgaggctgctggccatcggcgttaacaggctggcgggcagaaactcggccacgatcaggccgaacaccccgagggccagggcatagacggcgcgccaggcaggtttggcgggagacaggctctcgtcagcagctatgcaggaactcatatacaactctccaggtttattaacatcctggtcatcttagggacttactttcggacgatatatgatgcatactcttcagttattgattattcgtccggaattgccatgagccagcctgccatcgacctgaccagcgaactgttgcgcggtatgcgcctctccggcgttaactaccggcgcatcgaaaccgcacgcccgttcggcgtcggctttagcgccgtggcgggtaaagcccagttccatttcatcagccgcgggccggtgctgctgcgcatggccagcggagaacagttcaccctcgagagcggcgatgcgctgtttattcccaacggcgacgggcatgccctgctctcggatccgcaggccacggtggtcaatgtggcgcagctgcccagcgaaacggtgtgcagcacggtaagttgtatcaacgctggcgaccagcctgactgcccggagcgcgccgttattttcagcggttgtatggactttgagctcggcggcatgcagccgctggtcaaggccatgcccgaggtgatgcgggtcagcagcctgcttaatacctggccggagatccagccgctgctggcggcgatggagcgggaatccctcacccgccaggcaggctatgccgggatcctcgcccggctggcggacgtggtggccgcgctgattgtccgcggctgggtagcgtgcgggtgcggcaacgccaccggctgggtacaggtccctgtcgcttatacacagctgacgcctcctacgagcgagcgagcgacgctcgagcgcggcgccggccgctcggaagcagacgcgtccagct

SEQ ID NO: 172 - DNA, 36983 bp, Unknown
  source: /note="Description of Unknown: MKP2_2161_1 Mutant Bacteria sequence"
gcagtgctgttgcgcgtcgatcgtcgctcttgatctgtgttccacgggtgcggcccacgccggggttgacactgtctctctcgtcggcgtggtcaggtgtgtagaagagacggagagaacagcgcgcccagggtgcgggcgcttaacgcgacggcgtcgcgatttgggatcggcatcatcacttattcctttctgcggcgcgcgcctgcgcgccgtctcattaaccggcaaccgccataccgacggtcatatgcagaccataaaacaggccgcggccaatacattcggcgatcaagaccagcagcaggccgatcagcagccccgtagcgcgcggcggctggcggcggatcagcggacatagccagcagccgaggcccagcgccagcagtaccaggcgtagcgcctggagtttgccgtattctggcagcagggtggccgcctgctgaaccgagctgtgaagggtactgagcccggcgctttgcataatgataactgcggcgctgatgaccagcgcggccacgctcagtccggcaaaaaaccagccgttaaagtcgactttcgccagccgcagcagcagggcggcaaacagcggcccgctgaggagcaccgtcagaaagaacgcgctggtggtgtagccattgtaccatgttggcacggtattgatttggtaaacccgggtcattgcgaggacaaacagcagccctaacagcatggcgatcgccagccagactttacccagcgtcgccggcattttttccagcaccgccagcagccaccagaatccgcccacggcgaagaacagagcgccgctggcgatttcgttgctcagcgccgaggcgccgatgcggttcagcgagttaaacgcgcgcagcggtgaaccgagatgcatcaccgaagcaagaaaaccaatgcccatcagcagccagataaaaaacatattgcgcaccagccgccgcgcttcccgttggtcccccagcgccagccagccaagaccgctgacgatggtcgcgccgaccacgcactgacccagcaccgtaaaaagcaccagcggccattcatgccatccgtttcccatctcacacctccttcgggttcgccaggtaaccggtggtatcgccacacggccgggcattggcgttaggtttgataacgatactcggccgggtaaagtgcgccgacggcagcggcgctaccgcggccagctggctatgcttagcgcgcagttcggcaattggcccgaaatccaacgcccgcagcgggcaggactcgacgcagatcggctttttcccctcggcgacgcgctcgtgacagccatcgcatttggtcatatggcctttgtcggcgttgtactgcggggcgccgtacgggcaggccatatggcagtagcggcagccaatgcatacctcttcgttgaccaccacaaaaccgtcttcgcgcttatgcatcgcgccgctcggacagaccttggtgcaggccggatcttcacagtggttacaggcgatggagaggtaataggcaaacacgttctgctgccagacgccgttgtcctcctgccagtcgccgccggcatactcatagatccggcggaagctgacctccggagtcaggttcttgtagtccttacaggccagctcgcaggttttgcatccggtacagcgagcggagtcgataaagaatccatattgcgtgctcatggtttactccttaaaccttctcgatatcgaccaggttggtatgctgtggattccccttcgccagcggcgacgggcggtgggtggtcagggtattcatgcaggcgccatggtcgatccgatctccggtcatattggcgtcgtgccaggcgccctggcccatcgccgagacccccggcatgatgcgtggcgtcactttcgccggaagacggacttcgccgcgctgattaaaaacgcgcaccatatcgccgtttttaatcccgcgtttttccgcgtcaagcggattgatccatacttcctggcgacaggccgcttgtaatacatcaacgttgccgtagctggaatgggtgcgcgctttatagtggaaaccaaacagctgcagcggatactggctgcgcagcggatcgtcccagccttcaaatgtggaggcgtagaccggcagcgggctgataacttcgtctttctccagctgccagcgggcggcaatctctgcgagtcggctggagtagatttcaattttgccggacggggttttgagcggatgcgcttcagatcctcgtaggccggcagcgccggatctttcgccaccattttggcgtacagatactgcagccactgttcctgggtacgtccctcggtaaaacgttgatgcacgtcgtcgccgagtcgtttcgccacttcgcttaggatccagtaaatcggtttgcgttcgaacttcgctgaggtggcgggctgaataaaaatcagatagcccatattgccggcgtaatcgttaggaatgatatcctcctgctcaacggtcatcaggtcgggcagcagcaggtcggcgtatttcgccgacgaggtcataaagttgtcgataaccacaatggtttcgcacttgctttcatcctgcagaatttcgtgggtcttattgatgtcggagtgctggttgatgatggtgttgcccgcgtagttccacaggaacttgatcggcacatccagcttctcttttccgcgtacgccatcgcggctggcggtcatctctggaccgcgggcgatggcgtcggtccaggtaaagcaggagatggcggtcttcaccgggttttccagcaccggcaggcgctcaatggtgatggtgtaggttgattcgcgggcgccgctattgccgccgttgatgccgacgttgccggttaagatcggcagcatggcgatcgcccgggcggtgagttcgccgttggcctggcgctggggcccccagccctggcaaatgtaggccggcttgctcatgccgatttcgcgcgccagcttaatgatgcgatcggtggggataccggttatacgcgaggcccactgcggcgttttagcgatcccgtcgtcgccctcgccgaggatataggctttgtagtgaccattcgccggcgccccggccgggagcgttttctcgtcgtagccaacgcagtatttatcaaggaaaggctggtccaccagatcttcgttaatcaacacccaggcgataccggccaccagcgcggcgtcggtgccggggcgaatggggatccactcatcttcccgaccggcggcggtatcggtgtagcgcggatcgatgacgatcattcgcgcgttagagcgctcgcgggcctgctccagataccaggtaatgccgccgccgctcatccgggtctccgccggattgttgccgaacatcactaccagcttgctgttttcaatatccgaggtgctgttgccgtcgttactgccgtaggtgtagggcatggcgcaggcaatctgcgcagtactgtaggtaccgtactggttaagcgagccgccgtagcagttcattaaacgcgccaccggcgacgcggaaggcgacgaacgggtgatgttgccgccgacgatccctgaagagtagttaatgtatacggcttcgttgccatactgcgctaccacgctcttcaggcggtcggcgagggtatccagcgcctcctgccagctgatgcggacaaatttgccttctccgcgcttgccgacgcgcttcatgggatagttaaggcgatccggatgattgatgcgccggcgaatcgaacgcccgcgcaggcaggcgcggacctgatggtcgccgtagcggtcgtcgccggtgttatccgtttcgacgtaaaccacttcatcatcacgcacgtgcagccgcagggcgcagcggctgccgcagttaaccgagcaggcgccccagacaaggcgggttgtgtcgcctgtagcctgttgtaccgccgccgcggcgcggcgcagcgtaaagggcagggtcagcccgccggcggccagcgccagggagccgagggctgtagattttagtagcgcgcgtcggctgacgccgccgggagattcctgattcgacattgctcactccatgatcgttatgttgtacggagaagggccgctgtgccattaacagacgcaggggtgagcgataatacgttatgggtagccagtagaccttatccctggtcaatgcagggataagatctttcatttgaaaccgaagagggcttactgagcgtcgttttcggcgggactgtcgctgttacgcgtataggtgattttgaaggtgtcgttggcgcaatgaccgaccacctgaaccccgggctggtctgcctgatcgtttggcacaatggccaggctgaaggcggtttccggtacgccattgttgatgatcttctgctggatgtcgcttttgacccgttcacaggagtcgggagccgccagtacggccgtggagcacagcagtagcgcagcgccggtgcagagggatagtttcatcttacgctccttatcgatgttatccagatttaagcatagcagaactggtgtaaacaattgtatttgctaatatgatcggatgtacacaaaaggaatcgtctgtgaaaagattgtattggctgatcccggcagcgctgctgctgacggcatgcgaccgtaaaagcgccccggacgccttcaccccggagatggcgagtttttccaatgagtttgagtttgatcccctgcgcgggccggtgaaagattttagccagacgctgctggatgaacacgatgtggtggtcaagaaggtgagcgctcagctctccagggaagggtgtttcgatctgctgaccctggaagatgtggagaacaaaaccggcgccacgctgctgctggacgccaactattacgtcgacgggcgcacccacgagaagcggctgcgcctgcagggcaagtgtcagctggcggagatacctgccgccggggtgagttgggagacggatgataacggttttattatcagcgcacgcggcaaagagaccaccgccacctaccgctatgacagcgatggctatccgctgggaaaaaccaccaccgccaaagaggagcgatttaccgtcgcctcaacgccgtcaaaggatccgcgtaagaaattggactataccgccatcagcaccttcaacgatcgcacgctgggcacggtgcgtcagacctgcgactacgacgatcacgacaatccgctgagctgtgagctgcaggtgatcgatgaaagcgtccagccgccgctgacccgccactacaccattaaaaaccgtatcgattattactgagccgtcggcttcagcagggacggcccggacgttttgtgctcggccagatactggtgctggaacaggcacatgcggatggtgttgcggtactcgccgttaatgaaaaactcatggatcagttcaccctcgaccataaagccgagcttacggtaaatatggatcgctttttcattctctttatcaacgattaaatacagcttatacagattgagcacggtaaagccatagtccatcgccagacgtgcggcgcgggtggcgagaccttttccctggaagtcgggggagatgatgatctggaactcggcccggcggtgcacatggttgatttcaaccagctccaccagtccggctttatcgccattgcattcgatgacaaagcggcgctcgctttgatcgtgaatatgtttgtcgtacagatcggagagctcaacgaaggcctcgtacggctcttcaaaccagtagcgcatgacgctggcgttgttatcgagctggtggacaaagcgcaaatcttcgcgctcaagcgggcggagtttgacgtgtagcgcgtcggtcatggagattcctgtggtcaaaacggaaaagggattacagaaaggcggcgcccgcaggcgccagcgtggtcagggagcggctcagggattgatcgcgcggccggtgcgacggtcaagacagcgcagggtgtttggctcccaataggcattgacgttggcgctcttctggcagttatcctgcgcgtcgaaagcgacatcggctttatcccactctttttctgcccgtttgttcaccttctggcgcaggctgcgggtgtcgttccattgctctttttccatcgacgcctgctgacggctctgcgcgctgtcgccagattcaatcaccagccggtcggtggcggcataggagctggaggtgtagaccacagcgcttaacgccagaatggcggtcaggcaccagcgtttattcagtgtcatgttcatcacgatttcctttaagtgatgggttaaccctcaggttcagtttactacagctcttttgtcgggcatagccggcaaaacagcgtggggcagaggccattatcgcgtagaatggttcaacgctttgtctcttttacgaatcttttaatgctcaaaacaacgctgctgttctttgctaccgctctgtgtgaaatcgtcggctgttatctaccgtggctatggctcaagcgcggggcaacgccgctgctgctgatccccaccgccctggcgctggcgctattcgtctggctcctgacgctccatccggccgccagcgggcgggtatatgccgcctacggtggggtgtacgtttgtaccgcattgctctggctgcgggtcgttgatggggtcaaattaacccattatgactgggcgggcgcggccatcgccctgtgcggcatgctaatcatcgtggcggggtggggacgggcctaagcccgtcatgtgtgatccctgccgcttttttcaaccctaattcttgtatggtagtcgacctgttgccttacttatcagacatcctatttcatatgactctgtaaggaacaacgatggctatcgagactcttgccgcccggaccggggcgacgccgttacgcatccgtcgggtgcagaagatcaccctgacgctgctgtttatcgccggtatcgtcaactttcttgaccgctcttcgctgagcgtcgccggggaggcgatacgcgccgacctgggccttagcgccaccgagtttggggtgctgctctccgccttttcgctctcctacggcttcgcgcaactgccctccggtattttgttggatcgcctgggaccacggattgtgctgggcgccgggctgattttctggtccgcgatgcaggccctgaccgggatggtcaattcgttctcgcattttattctgctgcgcattggcctcgggatcggcgaagcgccgtttatgccagccggcgtgaaatcgatcaacgactggtatgcgcaaagagagcgcggcacggcggtgggaatattcaactcctcgacggtgctgggccaggctatcgccccgccggccctggtcatcatgcagttggcctggggttggcgaacgatgtttgtggtgattggtttagccgggatcgtggtcggcctgtgctggtatgtgggctaccgtaaccgtcggcagtttaccctgcaggaggaggagcagcagtatctggccagtgaggaggcggcccgcccggcgctgaagtttagcgaatggctggctctgtttaaacggcggactacctgggggatgatcctcggcttttccggtgtgaactacaccggctggctgtatatcgcctggttacccggctatttgcaggcgcagcaggggttaagcctggcccgtaccggctgggtggcggcgatcccgtttcttgccgcggcggtggggatgtgggtcaacggcctggtggtcgatgccctggcgcgcagaggctacgatcaggcgaaaacccgcaaaacggcgattgttatcggtctggtgctgtcggcgctgggcaccttgctggtggtgcaatcgtccacgccagcccaggcggtggcttttatctccatggcgctgttttgcgttcattttgccgggacgtccgcctgggggctggtgcaggtaatggtggcggagcataaagtggcttcggtggcggcgatccagaacttcggcagctttgtgtttgcctccttcgcgccgatcgtgaccggctgggtagtggatacgactcactctttcaatctggcgctggtgatcgccgccggggtgacctttgccggggcgctgtgctacttctttatcgtcaaaactcgcatcgattaacaacgctcggcgattcgtcaacagcaggcccgcagggacgcgcggccgccatgttcttctcctgcgctatcctgtcactgcggcgattgcagccacgtgccccgtgctttatcaggcgagatcttcttgtatggtagttgacagaaatcaaagatgttataccaattgcgtgagatggttgaggcacaaaggcattctcctcgagagttctccccgagaatggttgatgggctacataacaacgagagtcatcatggaaaacaccctcttaaccgctaacgccacgctgccgacctacgatcgcagcgcactgatcccccgtatcgttcatcttggttttggcgcgtttcatcgcgctcatcaggctgtgtatgccgatatactggccagcgagcacggcagcgactggggctacaccgaagttaatctgattggcggcgagcagcagatcgccgatctccagcagcaggatctgctgtataccgtcgccgaaatgtccgccgacgcctggaccgcgcgcgtggttggtgtggtgaagcaggcgctgcacgccggggttgatggtctcgaagcggtgctggcggcgatgtgtcagccacaggtggccattgtctccctgacgattactgagaaaggctattgccattcgccagccagcggcgaactgcagctcgatcacccgctgatcgccgccgatctgcataacccgcaccagccaaaatcggcggcgggggtagtggtggaggccttatctcgccgccgggcggccggcctgcctgcttttaccgtgatgtcctgcgataacatgccggaaaatggtcacgtgatgcgcaacgtcgtctgcgcctacgcccgggctttagacgaggatcttgccgcatggatagagcagaatgtcacctttccgtcgacgatggtggaccggattgtcccggcggtgactgccgaaaccctcgataaaattacccagctgaccggggtgcgcgacccggccggggtggcctgcgaacctttccgtcagtgggtgattgaggataactttgttgccggacgtccgcagtgggagaaagcgggagcggaactggtcgccgacgtggtgcctttcgaagagatgaagctgagaatgctcaatggtagccattcgttcctcgcttatctcggctatctggccggttatcagcatatcaacgactgtatgcaggacgataactaccgtcgcgcggcgctgtcgttgatgctggacgaacaggcaccaacgctgaaggtgcagggggtggatctgtcacgctatgccagtttgctgattgaccgttactgcaatccggcgctgaagcaccgcacctggcagatagccatggacggcagccagaagttgccccagcgcatgctggactccatacgctggcatctggtgcatcagcgtgattttacactgctggcgctgggcgtggcagggtggatgcgttacgttggcggcgttgacgatgcgggccagtcaatcgagatatgcgacccgttgttgccggttatccagcaagcggtggctgccagcgccgatggcgaagcgcgagtcaaagcgctgctgggtattgaggctattttcggcgtcgaactgccgcaggagtcacgctttgtcacggcggtgacccgcgcctacttagcgctgcagcggcagggggctaaagctaccgtcgccgcgtgggccgccgcgcaataatctttttccggtgtcggtcccggggtcgacaccggctcttcagttatttctacgatactccgctgatgtctattttttgctagcgatcggttttagcagacgcagaatatgatcgaacgcaatgtctatacataactctatatttccctgatttactaaagataattagctgttatttttccgaacaatgactggtatttcaccgcaataatggcatagttaagttattgaaaaagaactttctctgcaaaaggagtacgggccatgtataaaaaaattttattgcctgttgatgtctttgaaatggatttaagcgataaagcggtgcgtcacgcggaatttctcgcttcggccgaaaatggcgagatcaccttgctcaacgttctgccgaacagcagccgttcgctattgcgcggttttacggcggatattcgtaagtttgaagcctatatggaagaagagtcggagaaaaaaatgcgcgaggtggcgcgactgttcgccatccccatgacgcggatccatacccgcgtagtctttggcaacgtgcgtgacgaaattctggctatcagtaacaacgaagagttcgatgtcattgtgattggttcccgcaaaccagggatctccacccatctgctgggctccaacgccgagtcaattctgcgctacgccaaaacgccggtattggtcgttagataatcccttcaatgacaacggctgcgtcggccatgccggcagccgtctgactcttattcttcactaaaccagtcgcggttctcctggcgaatcagcagtacggattcgctgatttcatgcaaatggatactcatggctttttctaccgcctcggcatcgcgtttttccagcgcggtgaaaatctcatgatgctggcgcagaagcatctccggagaggtgacatggtccagactcatatagcggacgcgatcgatggcggctttaatattttccaccgtctcccaggccagctgacagtcggcaataatcgacagcttctggtgaaattcatcatcgagcaggaaaaagtcgtttaactgctgccgatcaacggcaatacgctgctggtgaagattctgttccagctgataaagttgctcttcgttaatcatgccggcggcacggcgaaccaccgcgcactcaatcgcctggcggacgaagcaaccattacgcacctgcgacaatgagattttattgacgtagctaccgcgctggggacgaatctggataagtccgttttccgccagcttaatgaaggcttcgcgcaccggctgacgagacaccgcaaaacgcacggagacttctttctccgacagcggtgtaccaggcgggatcaggcagtgaacgatatcccggcggaggatgcgataaatttgctgattgacgggttgcgtcggattcagttgcgattctgcggccattgatggttactttttagggggttatgcgcactattttacgcgttttttgcgtttccgcccatacccggcccgcaggccgggtggctgacggttagccctgacggtgaacgctgagtccggcaaagctctgactcaccggcatcatctccagggtgttgatgttgacatgtttcggcagggtggcgacccaccagaccgcctcggtcacatcttccggcgttagcgcttgggtattttcgtaagctttttcggctttagcgtcatcgcccttaaagcggacgttagaaaactcggtgccgcccaccagacccggctcgatgtcggtcacgcgcaccgcggtgccgtgcaggtcggtacgaagattgaggctaaactgacggacaaaggctttggtcgccccatagacgtttccgccggcgtaaggccagctgcctgccgtagagccgatattgatgatatggccgcgattgcgctccaccatccccggcagcacggcgcgggtcatgtacaccagccctttattattggtgtcgatcatatcttcccagtcttccacactggcgcggtgcgccggctccagaccaagcgccaggccggcgttgttcaccagcacatcgatagcctgccactcggcgggtaggtcagcaatcagcgtctcaatggcggcgcggttgcggacgtcaagttgcgcgatataaaggttatcgcccagctcgtctttcagcgtcttcaggcgctcttcacgacgaccggtggcaatcactttatgaccgttagcgataaaacggcgagtaatactttcaccaaaaccggcggtggcgccggtgaccatgataatcatcttactgttcctcaacgctttttgtgttttcataccatagcacgcacaggcggcgaccggtaacggaaatcattgcgaccccttaaggagaggcctaatcttacagcattagcctgtacaggagagaaagatgtccgaacgaaaccccttttttagcgtcagtacgttgccttaccaggcgccgccgttcgatgtgattgacgacagccactatcgcccggcgtttgatgagggcgtccggcagcagcgggccgaaattcgcgctattatcgacaatccgcagccggccagtttcgccaacacgctcgaggcgctggagcagagtggtcagctgctggcgcgggtgacgcgggtctttttcgccatggctggcgcccataccaatccttatattcaatcactggatgaacaattttccgccgaactcgccgagctggggaatgacatctggcttaatgcggccttgtttcagcgcgtgaacagcgtctacgagcagcgcgacgcgctggcgctggacagcgagtcctatcgtctcctgaccctgacgtggcaacgttttgtacatgccggggcgacgctggctcccgagcagcaggcggcgctgcgcgcactgaacaccgaagcggctacgctgcaaagtcagttccagcagcgactgctgggagcggcaaaaagcggcggcctggtggttgattaccggcatcagctggctggcctgagcgatgaggagatagcggcggcggctgacgcagcgcgtgaaagagggcttagcgaccgctggttgctgacgctgaccaataccacccagcagccgcagctgcttgcgctgcgcgaccggcaaacgcgggagaatctcttcgccgccggctggacccgcaatcagcagggcgatgagcatgatacgcgtgacctggtactgcggctggcggcgatccgcgcgcagcaggctgagctgttgggagccgctgattacgccagctgggcgctgaccgatcaaatggcggcttccccggcggaggcattgggctttatgcgtcagatcgccccggcggcgcgggcgagggcggaacgtgagctggcggacatccagcaggtgatcgacaacgaaggcgggggttttcgcgcgacggcatgggactggctttactacagtgagcaggtgcggcgggctgcctatgccattgatgacgcgcagctcaaaccctattttgccctcgagcgggtgctgcacgacggcgtcttctggacggcctcgcagctctttggtctgcgctttgttgagcgcttcgatataccggtctatcacccggatgtgcgggtctgggagatcttcgatcacaacggcgaagggatggcgctgttttacggtgactactacgctcgtgactcaaagagcggcggcgcatggatggatgtgtttgtcgaacagtcgaccctgcgcgcgcagcgcccggttatctacaatgtctgcaactacgtccgcccgcaggcagggcaaagcgcgctgctgtcgtgggatgaggtgatcaccctgtttcatgagttcggccataccctgcatgggctgttcgccagccagcgctacgccagtctctcagggaccaatacgccgcgcgattttgtcgaatttccttcgcagatcttcgaacactgggccagccagccgcaggtgtttgcccactacgcgaagcactaccagtccggggagccgatgccgcaggcgctacgcgacaatatgttgcgtgcggcaaccttcaataaagggtacgacatgagcgagctgttggctgctgcgttactcgatatgcggtggcatagcctgtcgacctcggcattaccggaggagatggacgcgtttgagcagctggtgcttcgggaagagaacctggatctggcggcggtccccccgcgctatcgcagcagctatttctcccatatcttcggcggcggctatgcggcaggctattacgcctatctgtggacccagatgctggccgacgacggctatcaatggttcgtggagcagggcggtttgacccgtgagaacggtcagcgtttccgtgaggcgattttatcacgcgggaacagcactgatttagctgaactgtatcgccagtggcgcggacacgatccgcatattgagccgatgctgaaaaatcgcgggttgagtgcgtagggcaattttagtctgacaagataaccgggcgcgctgcccggttttttgtctgatctagtcgtaaccttatatttcttttacctcacgctgcctaaatctttatcgctctctctccctttaagcattagcgtggcttcttcgatacgaatgaagcgcccggaatcatctatttcagcgaacatataaacttccatgtccacctcttctccgctgcgcctggtgcacagaacgcgatgccttgtggcataaagattcccgttacgaagttcgtcatgtaactcaattttagcgaaggcgataatttcccggagtctacgcgcatgctgagcaaagccatctaatccttcccacttgttatcagtacgctgccgataaccgggactaaaatagcgactgagtatccgatccagtggtatctgttggtggttgataatgtcatccaataccctagtaatagtaatcattttgatggttagtcctctgtgaaagtgatgaatactttacaatcgactaactggcttcagtacggtataaaagacattaaacgcctcaaacacgccaatatgcacgatccattgattccattcgaaccggtattttcaccccagggacccactttactcgtcgcggtacgtcagtctgaggtaatacgggagactccacgccaccatcacagctgtgggcagttaatcggtgccatacgtgggctacttacggtcgatggcggtgattgtcgctgggtggtaccggcaacacatgccgtctggataccgccaggtgttccgcacggcctgcgctcgcacggtccatattcaggatggagtgtttatgtttctgccaaagcctgtggcgagctacctgataagccatctgttctctcaatgacaaatctgctgcgtgaagcgataacgcgagcggctgcatggcaaggtgtagagcttactgcgtcccaaaaacgtttagctggcgttattcttgatgaaattggttcccttcccagggttaatcttgggcttccaatgccgcaagatagccgattgctcagaatcgcgcaggcgctgtcagcaaacccggacgacgggcgcaggttggaagaatgggcagcctgggccggcatgtcatcacgcacgctcacgcgacgattccgagccgaaacgggttttagcttcaatgaatggcgacagcggatacgcttactcagggctcttgagcttctggctgccggcaagccagtgacggcgatagcgctggatctgggatatgacaatgtgagtgccttcatagccttgttccgtcggatgttcggcactactccagggcggtataaaatttaattatctcttcgctgaacatgatgcgttatccgccgctttgattacgtttgtcatgggatgagaggggcaagtaattcgggcccctgatttttcacattgccgaccgcccgcgttaccgggtgccaggtaaaatcgtcggcggaaacggctccgtcgctggctatctccgccgcttccgcgccggtgacatcctgcctcatccattcccgggcggcttcaggcgccaggaccaacggccgacggtcatgaatatcgacaagaccgcgatcggcggcggccgtcacgatcaagaatccttcggcatggtccccacgttcgaacggagtccgaccaatcgcggccataaaaattggctggccatccttacgctggataaagtatggctgctttgtatttccttcctttttccactcaaaccagccgtcggcgaagcagatcgcccgtccgtgctcccacagcggcttgaacatcctgctggaggctgcagtctcaacccgggcattaatcagcggcggtttatcccaccatcctggcgcatagccccagtaaacggcatcgagatggagttgctcatcgcgttcattgaggagtaaaacttttgtcccgggcgcgacgttatagcgcccgataggcgccgggtcccaggcaatatctcgttcggccgcttcaacgagatgcgccaggtattcctcccggctttgcgcttgcgcaaaacgtccgcacatagccacctccagcgtgatgtctgactaacagtatagaacagctgcaaaacggtgttttcacctgcccaaataccacgctccttccacgtcagtagaccattatttcaggccgtcatcttgcctgacgtcgcgacagtacacgctgggcgttaggcctggcattgtccgtttatgcttcatcgttattaccctaacgcctgtctgataaaagaaatcctttttactctttttattatctttcagaattatcgcacggagttttacctttgtctgaaatggttgtcgctgggttgtatttgaaaacatccaccccttattatttaaaaagtcatctttatcttttaaaaggttgttatgagtaacttactattattagtcctggcggtggtgttattgtttacatctttgttttttggcctgtcctatgttagagaaagaagaaaaatgaagatgcgctttaataaattccgacgttaaccgatccttcctgcggaaagcgcaagaacaacagatgagaatctcgttaactcttgtttggtagctatttggaattttttcataatatttattttgtgagagaagaccgtcttatggctgatgcccagttcttgcgctatctgctgattgttcattcccgttctgatcgcatcgataatataaagttgtgatttggtcaaggttaaccgagggcatttgacacagcgtctgctgtctttttccagcccaccgcaactagatgttgtcgactccgtcagacgttttgcaatctgattttttacgcggcgcaagtcgctgttcatgctgataaaagtggcatcgcgtagacaaagtggtaaccgttcaacctgcaaagcgctgtcggtggcgacgaaaataaaaatagacgtgtgcggagggagttttttgaaaaacgggtggcatagataatgttcaccagcggccatttctgtgaacagcatatcaatcggacctaatatatctgtggaatagtctacaacggaatacggttcacggatgtgttcttctttcgcgatctcgctaagcagttcgcaaattccgcgattaagaaatatgttttcagtgttaattaaaatatcaggcatagtcatggcgatcgtgaaagttgtcatgcatttaaagtggagaacattaaatgcgtatgcctttaggatatttctaataatcaataaatgcaataagtctaattttggactttgagctggcgagtaaaattaatggtatattaatcaatggcttattttttagcgttgcgcgggcatgatcgctaatttggcacaaactgcttaaattgcttatattgcatgcgttaattctggtctcaaatatattaatcagaatgacttattcactgtatgaattgctttttcaaaaataccttttgcaggcgtgggtccttgaggagattgcgcctgagcgaaacctggggtggtcattgataaaaaggggcggggtagacccgccgctgcggagggtgaacagcaacggcgtacaacagaatcagttatcaggattgttggaaatgcttttccacaccattcccaggccgatcaacatcgacgcgaagagggcgaacagggtggttgagataaaaatgctggccatggcggtgcctcagaaagtgcgtatgcagatcattaggcacggtgtcggatgaaaggttccttacccggccgggtatattttcaccagcggcgtccggttgacggcaacaaggcgaatgccacgtcgaagcgccgctgttggcaaggggaccctgagaggcagccgtgttgctaaacgcgctgttcatggggagaatacacgacggcaaagggggagcgattcggacgttgacatccccttaaacaagttatatatacatgtcgcttctgtttattgaatgttaaacagcatcagttatgggactcagaagcgccacagcccccgccgtcgggcgggggtaacttcgccaccggcatgcttatgtttcactgaggctggcgaagaaaaattttttatttcgggtcttgaaaaacgcgccttagatattattttatatagcggacaagcaatgcttgcctttatgttgagcttttgaatggatattcaggaggttaattatggcactcaaaaccttgtcagcactcccggtatttgctgattctctttttgccgatcgctttaatcgtattgaccgtcttttcagccagttaacgggcgatacgccggtgggcactttaccggcttatgatttacagaaagtcgacgacagcaatttcctgctcagcgtcagcgtgcctggctggaaagatgatgagctggaaatagaaaccgtaggggggaatctgcatatttccgggaaacgccaggaaaccgattcctcgacagacagcggtgaacgctggatttataaaggtatccgccgcgctaatttccagctcagtttctctcttcctgaacacgcccaaattaatcaggcgcagctggatagcggcatcttaaaaatagccatccaccaggaaatcccggagagcgaaaaaccgcgtaaaattgcgatcgagaatcagggacgcgtgatagaacataaagtttgattcaccgttgttccgacgatgttaccttaaaggcccgccctgcgggcctttatccttcccccctgaaaatataaatggccccccgacgacaaagaaatcgatatgctattctgttaacagacgcagtgagtctgctatttctttcaatttcggcgaggaggaagaatgactgacgagatcgatagcgacgcaaacaatacgcatgaactaaccgctgaagtggctcgggcgctgatcgcgcgcggttggcgactgaccacggcggagtcctgcaccggagggaatctggcggcagcgctctgtgcccaggcggataccgcggcattttatgataccggcgtagtgaccttcagcgatgaagccaagcgcaacgtgctgcaggttcgcgcggaaaccctggcggtacacagcgccgtcagcgaagcctgcgttcaggagatgtcctctggtattctggcgctcgccggggccgatatcgccatcgccgtcagcggctacgccggaccggagggcggggaagatggtacccccgccggcacggtatggtttgcctggaattttcgcggccagactgaaaccaaacggatgtgctttgccggcgactgtgagaccgtggtggcgaaagcggtacgatatgccctggcggcgctgagcgaaaagcttgcccactggcagtgacgatgcccgggtgcgcggccttacaggtccattgcctggcgcgctaccggccagcagatctcgccgatgccgttaaggcagggtcgggaaaagagaaagccctgaaacaggcgaatgcccaccgactgcagccagcaccactcctccaggggttcgacaccttcagccaccaccgtaatgccaagatcctcgcagcagcggacgaccgaggcgacaatcgcctgtttggtgccgctaatatggatatcgcgcaccagttccgcacccactttgattttatcaggctgaaaacgggtcagtaacgacaggccggaataacctgcgccaaagtcgtcgatggccagcttcatgcccgcgacgcgcagggctttgagcaccttgcggaactggtcaaagcaggtgatcacctctgtctcggtcacctcgatcagtacctgatccggtctgaggccggccgccagcaggctgtccatcagccagcctacggcgtcagggtggtgatacagcgatccgggcaacaggttaatcgccagctgatgtttcccgagcggcagctggccggcgagagcgaatgcatacgctttgctttcaagatcaaaacggtagcgatcctccgccgcaatggcagcaaacatttccacgggagcgccgccggttgggctgcggatcagagcctcaaaggaagaaactcgctttttagccggctcgacaatagcctgcagagcaaactggcaaggttgaccgggcaggtgctgcggcgcggccgtacctgacgcgggcatcatcatccagcgagagggctgcagcggctcgggcaggcaatagcggccgccgtcggcaatgaaggcgctaagcagccggaacatccggtcgttgaccggttcggtgaccccaaacgtgctaaagcgcagaatttcctccagcgcgccatcggtttcaaacagccggagatccagtatgcgcattccggtgccgtgaaaacgtcggtaggctgagtaatcgcgcatcagctccactacgtcgcgatgacgcgggtcgctttggatttcgctgaacagcgactcaagtgcctcctcagtcccttccaggacctggaaaaactgcaggccgttaaacagcagaatgccggtgatgccaaggggcaaatttttactgctggcgcgatggactaaagcgtcgagatcgacgggcgggcggtcaggatgaacctggctgcggtaaatcagggtggttagcatagttgttacgatcgctcccgcggcgtaagaacatccgcgctcagcatgcaagatgagtatggcctgaccctaaaggagggcgaggctgatatgtacaaacattcaaccaaccgtgatgtccgctacgcggaacgcgagcttcactttgtgattccctccactgtacagggaattacacatttggctatctttttctcatcctcaatgcaaaaagacgctaacaggcctctcattccttcctcagacactggcgctgcgtcttattttacctgttaatattcgctaccaggaattatcctaccattctatttcccactctcaaaaatgaggcgctggtcttgcctgaatataatcgagtgaatattatcactctaaattaaattcttttgtcaggtttgatatgagcgacttctttattattttgtgtctgattttatgtcccatcatttctttatggagtggcttttcctatattcaggaaaggcgcaagagacggtatgttttccgttccagaagatgattgtttgacagaataaaatgacgagttgtatcagcgtttggcgagcagttgcacaaggttgttaaactgctggcggctattcaaattaaatttactcataatattctttttatgtgaatggatcgttttgggactaatatttagcgcagcggcgacttcatgcgggctcaggccaatactgaacgcgtaaatgactttggtttgcgcgtcgctgaccgacctgcaggcgcaattaatgcaacgccgcagacgattgaacggcggatcttgccgcggtagcagcggacgttcaatggcgttagctatctcatctttcagccgctgaacgcgagcgtgaggcggcataaataccgcatgctgaagacaattcggtaaaccctcatctacggtagcgtgttcattgtccgggaaaataaaaagcgtatattgttccggggcatgctgaaaaagatcctggcacaagtaccactcccccgcgaccatttccgtgaatatcacatcagctttcgccatcgatcctgcatcccattgttgagaaaactgatagtgtggccgcccggcggccttcatcgcttcatcaaccagttcagcaatagcgactcgcaaatagtgattttttatattgaacaaaaaattagtcatataacttccctgtgggcattaaaaaacatatctggataaattaaagaatataatgatgatgcaggtactatttttagccgtggtaatctaagggatgttttccattaatgcaatatctggtggggaaagtgagataacggtatattgatatgcgaaagttcctaataaacaaaaccttaagcatatatttgtaactatttaaagccgtttgctgtttttttatttttgcgatgcataaaaagcttagtgatagccgcgctctgttgttaaaattagcggaggacaagaatacaggatgtatgccgtacttatgaagcagatgctctatttgaaaatgctggcgtggctggaggataatatctattgtaacccggcgatcgatgacctggcgctgtatatgggctattcacgtcggtttgtgtacgacgtgttttaccagtatggccagttacccatcgggcagtatattcgtctgcggcggttgcccatcgcagcggtcagtctgcgcttaacacgacaaccgatcgccgctattgcctggcagttaagctatgactcgccgcagaccttttcccgggagtttaagaagcgcttttcgctctcgccacgtgaataccgttgcgcggcgcactgggacacggcaaagctgttgaaaaagtttcacccggacggagagagcctacctctggctcgttttttttctctgccggaacaggtctattacggctatccaatgaagtatgaactgcgcctgtcggatttggtgttgcaaagcaccgctaagacgagcatcagacaaaaggttgaccgttttttcaccgctggcggaggctcgctttccgtactttccgactacgccgcggcgagtaaaaatgagcttaacgtcgaggttaacgcttttgtcggctgtcatgaggcgggaaagctgccccccgcgctggccatgaacagctcgctgaccacccggtcagggctttatgtcggggttgaattctacggcagctggtcacgttatgctcgtttatccagcgatctgtatatggagctgctgccatccctgggggtaagtcgtcgggacggctatgacattgaatgttttataacccgccatgcggaaggcgaagaggcaggggacaggcgctatcgcgtacgctattttatcccggtgacgctgtcggcagcgggtctgcggtctgacagcggtagtgggtcagggcctgcgccggggcgaagttaaggtggccggagccacccaggttaacatcaaagcgcaaaccacagcagccaggtgatgagaaagcccgtcacccccatgatggttgtcaagacggtccaggttttgagtccatccggcaccgagagtccgagatagcgcgtgacgacccagaatccggcgtcgttgacgtgcgacagcccgagcgagccgaagcaggtcgccagcgtcaccagcaccagttgcagcggctccagaccgacaaccgcctgcgacagcagaccggaggtggtgaggatcgccacggtggccgaaccctgcgaggctctgagcaccagcgatagcagaaaagcggcgggcatcagcggcagatgtattgtctccagcgcctcggctaaggcattaccgatgccggaagcgaccagtacgccgccaaaggcgccgccggcgccggcgacgaggatcacgtccgccgacgaggggatcgcgctgccggtgacttcgcccagctttttcaggctcatccgccgacggatgcccagcgtccagctggccaggcccagggagatcagcagggcgaccggcggggtaccaatgacggtcatcagctggcgaaccgcgttttccggcagcagaagcgcctgacacagcgtcccggaaacaatcagcatgatgggcaccacgatcagcccaccgataaccagcgcattcggcggcggcagacgggtctgctgcgcgttaaccgagagatccggtacttccgccgtttgttgctgctccagcacgttaatcgacagatgataatggcgccgattgataaaccgggcgacaaaatagcccacgataccgacgaccaccgacaccccaatccccgccagcatcagccaaccgacatcgctatgcagaatgcctgccgcagccgctgcgccaggatgggtgggcagcgccacgtggacggttaacatcacgccggccatcggcaggccaaacttcagcggcgatacgtgggcgactttgctgaagccgtagattaacggaatgatgatgataaagccgacttcaaaaaagaccggggtgccgagaataaaagccacgatggttaaggcggcaatggttcgttttgcacccagtacgccggtcaacgttttcgccagcgattcggcgccgccggacatttcaatcagtacccccagcattgagcccagaataataatgctggcgatgtggccaagcaggccgcccatgcctttttcaatggtggttataattttatctgccggaatgccggtggcgaatgccaccagcagactgacgatcaggagcgccacaaaaggatgtgctttcgctttgatcactaacaggagcaacagcactacgctggctaacgcaataagtaacagcgccgatgtcgacataggtttgcctcgggtattaacaggtgtacagagagttatttttttagaaaacggcgtttattttttccggtagggcgagaaccaccccagcccggaaagcgtgtctgtccgggggatatattcgcagccgatccagccgtcataaccggttttatccagtagcgcatagagccacggatagtttatttcgccctcatccggttcatgacggtcgggcagggaggcaatctgaatatggcgatactggccggcatattcggtaataagatggcttaaattgccgtccaccttctgcgcgtgaaacagatctaactgcaccgccaggttcggcctgtcgacccgtttcaccatcgccagcgtctgatattgactgtggtagagatagcccggtttggtctgcggattcagtgcttcgatgagtatccgcttgtcgtggcgggcaaagcactccgcggcgtagcgcagattatcgataagcacggcctcgcagtctgcgcgatccgctcccggcggcaccacgccggccatgatatgcacgtgcgggcaactgagctggcaggcatactccagcgccagctcaatatcgcgtcgggcctccgcgcttctcccgggaatggcggcgagcccccaatctccggcgttgacgtcgccgggtggggtattgaacagcaccagctgcagctggttctcctgcaggcgctgtctgatttccccggcggcatactcatagggaaacagaaactcaacggcttcaaatcccgcccgggcagcggcggcaaagcgttccaggaacggcagttcggtaaacagcatggataaatttgcagcgaattttggcatggttttatctcagttctttcacttcgtcagcggtcaggtagcggatctcgcggttgccgagggtaaatatcagccgtgcggtctcttccagttcctcggtattgttggtggcttcgcgcagcgatgagccagtaaccaccggtccgtggttggccagtaaaaaggcgttatagcggggcgccagcccggccagcgcctgggcaatacggtcatcgcccggccggtagtagggaaccaccgggacgtcgccgacgcgcatcaccacatagggggtaaaggggcggatacagttgtgcggatcgagcccctgcaggcaggagagcgcggtcagatagtggctgtgcaagtggacgatcgccttgcaggccgggttgtgcaaatagactgcccggtgaaaagtgacctctttcgacggtttgtcgccggagatccattctccttgcagcgtcaccaccgacaaccgctgagcctgcagttcgccgaggcaggcgccggtcggcgtcgccagcaggttgccgtccggtagcagcagcgacagattgccagcggagccggtggcatagccgcggctaaacaacgaggcgccaatctgcaccatttcctctcgcagttgttgctcagtcatgacgaaactcctgctgggcacgggcaaagaactggatatcgccgaagttacctgacttcagcgccagggagagcggctggcgggtgtcacgcacccagggcacgctaggggagatggtcggcccaatatggaacgcctcaacccccagggtctgcgccacaatgctcgacgtttcccctccggccacaataaagcgggtaaatcctttcgccttcagggcggcggcaagagcggcaaacagctgttccacccgttcgctgctggccttgtcgccatactgcgcctggatccgctgcagcgtttgcggctcggtggtggcatagatcatcggcgccagcggcgcatcgcgctgcgcgtccacccagtcagtcagcgtcctgacgtagctctccagatcggtaaagcaggcgcttaagtcgacggcgcgggcgggagcctgttgacgataggccgccacctggctgttggtcatcaccgagcaggagcccgagagcaccaccgccgggccagccagcggcatgccggcctgagcgctttcaccccgggcgccatggcgctgcgcccagtcgcgggcgaggccgatggcgaggccggaaccgccggagaccagcttcatctcccgcagcgccacgccctgggtgagcagatcctgttcgctgagggcgtcgagcaccacatagcgcaccgccggatcgttgactgccgccagcgcggcggcgaccgcctccggcccccgggcgacaatcggccaggcaatcagcgcggcttttccgcgcccctggcgctcaattaagcggcccaggtgcgcatcctccatcggcgtcaccggatggtggcgcatcccggactcattcagcagttgctcgccgacgaacagatatccctgatagaccgtgcggccgttaaccggcagcgccggggaaatcatcgtccgcgtctcacccagctcggccagcagggcatccagcaccgggccaatgttgccctgcgcggtgctgtcgaaagtggaacagtacttgaaataaaactgctgacagccctgggcctgcagccagcgcagggccgccagcgactggctgacggccatttccgccgggcaggagcgagttttcaggctgatgaccaccgcctcgctggtcagcggaagatcgcgggtcggcacgccattcagttgcaccgtcggcatgccgttgcgcacgaggaagctggaaatatccgtggcgccggtgaagtcatcggcaatgacaccaagctgcatgttgtctctcctcactgtttatggcccggcagggtgatgccgttgaaaatcttgatcaccgcgctgtcatcttcccgaccgaatccggcattactggcggaggtgaacatattcagcgcggtggtagcgagcggcagcgggaaggtcagcgcccgggcagtgtcattcaccagcccgagatctttgacaaaaatatcgacagcggattttggcgagtaatcgccatccaggacgtgctgcatgcgattctcaaacatccaggaattacccgccgcgtgggtgaccacgtcatacatcgtctccagtgggatcccggcgcgggcggcaagcgccatcgcttcggcggcaacggcgatgtgcaccccggccagcagctgatggataatttttaccgtcgagccaagaccaatgtcgctcccgatgcggtagactttgccggccacggcgtccagcaccggcgcgaggcgggcaaaggcggcatcgctcccggaggccatcaccgtcatgtcgccggcggccgctttcacggcgccgcccgataccggcgcgtcgagcatcaatagctggtactccgccagcgcctcggcaatggcctgagcatcggcggaggcgatggtggacgacaccatcacgacggtgcccggcttcagatgggcggcgaggccgctctcgccgaacaggatcccccgcacctgggcggcattgaccaccagcagcacaactgcatccagttccgcggcgaacggcaccgcgctggggcccgcgcctttggcgcccaccgccagcagtgcgcgacagttgtcgggattgatgtcaacgccccaggtgttcaggcccgcctgcaggcaggcgcgggcggcgcccatgcccattgaacccagtccaatcacgcagacgttagtgtgtgcagccatgctggtctccttgtgaacattagttaattaatgtgatttaatgatagaataaagcgttatcatgtgaatttatgtgagagttatcacgaataacccacatgaatataaaaaattcacaggcggaaagaggctgcacagcggcgattcttgccctaaaatagcgtaaaaaacagcggcaaagcgcgataacaacaccgggtgtcgccaggcccgtagcctgggtggtgacgcctggtgtgaaaaaatggtaaggggagagcggtgattccaatagaacgacatcagcgtattttagccctggtggagcagcgtggggcgggaagcattaacgagctgacggagatcctcggcgtgtcccatatgaccatccgtcgggacgttagtaaactggaggagcaggggctgctggtcagcgtctcgggcggcgtgcgcgccgtcagccggctggccgcggaacccagtcatctggtgaaaagcacgctgcagagtgaggagaaacaggcgatcggcgcgctggcggcgagtcatatcgccaaaaacagttgcatttatctggatgccgggactaccaccctggcgctggcgcgggcgatcctcgaccggaacgatctccaggtggtcaccaatgattttgagataacccagctgctgatcgatgccagccagtgcggcgtgatccacaccggcggcactctgtgccgggagaaccgctcctgcgtgggcgaatcggcggcgcgtacgttacgccacctggctatcgatacggcctttatctccgccagcggctgggacagtcgcgggattttcacccctgatgagaacaaggttaccgtcaaggagaccgtcagccaggtcagcgcgagaagcatcctgctgtgcgacagttcgaaatacaatcaggtggccacgttcatggcgttacctctgacccggttcaccaccatcattaccgaccggcatctctccgatgccgccgccagtcatatcgcccggcacgcctgcgaggtgctgcgggccggataacgcgcgcggccaccgccgggttagcgttgccagtgctcgatcagcgccgcgccgatcccggcgatttgctgatttcgctcggccatgctcgccggcgtatcccgcagataaatcaccacgatgcgctctgctttgttattcgggccaagcagggcgacaatcccgcgcgcaccccgttcgccagctccggtcttatcggcgataaaccagcccgccggcagcacggagcggatcaacggtccggcgacccgatcgtccaccatccactgcagcagctgccgttgcgaacgggcgctcagacgctggctggtcagcagcttgcgcagggtcgcggccatgctggccggggtagtggtgtcgcgggcgtcgccgggaagcgcctcattcagttccgtttcccagcggtcaaggcgggtgacgttgtcgccgatctggcgcaaaaaggcagtcaatcctgcggggccgccgacggtggccagcagcagattggcggcgctgttatcgctcatggtaatggcggcggcacagagttcgccgaccgtcatgccgtcggcaagatgtttttcgctgaccggcgagtagtccaccagatcctgctggcgatagtggatctttcgctccagctgttcgtcaccggcatccacccgcgccagcactgcgccgcagagcactactttaaaggtgctcatcatgggaaagcgttcatcggcgcgccaggcggtcagcgtgcggccgctggccagatccatttctatcatgcctacgcggcccgacagctggctttcgcttagtttaatttgctcaagcggctgcgggctggcgtgtaccgccagcggcagggtggctaacagggagataatacacaggcgaatataacgcataaccacaatacatccttgagtgagggccgataaaggcgagtaaagaagcgacaaataagaataacccggcgttttgctgattcacaattcctcttttttccttcatcatttgtcatcttttatttcgaataatcaatatctagccctgcctaagcacgctattttttgactcaaggccgtgatggactataagaaagtactaaataccgcactctgtcgggcgtcgctgtttgccgatcaccacgcccgccggtccctgcggttcgccaacgctatatgccatcccgggaggaactggtgcacccgataattaaggtcatgctggtgggcggtaaggcggacgggctgttggtcagcgtcgccgatgacgcgaccgaggtctcggtgacgcctgcgcagtacggtgcgctatccgggcaaccgttgagctaccgaattgttagccaaaccattgacgatgaacgctatttttttggcgttttcagcgacgcccatcaggatagcgataagctgacgcgggtcgccctgacccgtggaatgaaaaaaatgttctgttaaaccctgcccgaaagggggcgtaagagggtgtgccgggcgccgctgtgctactgtggcagccttctatttccagggtcggacgcataatgattcagtacattcgtattcaaaattttcgctcagtgaaggatatcgcgctggagctcgggccgctgaacattgtcttcggccctaacggctgcggtaaatccaatatttataacgccatccacctgctgaccgctgccgctgagggcaggctttcggggtttatcagcgaagagggcggtctggagaatatgatgtggtccggggagcgttcgcccctcgatcgtcacccccgccggctgcaaatcgcctgccggaccgacagcttcgattatgaactgcagataggcttccctgaaaaattgccctatccgacgcaattcatgctcgatcctatcgttaaagaagagaatatctggctggccggctactcccgccggccttcctcccgcgtactgcagcgcaagaatcaggcggcgtttctcgtcgatgtcaccggggagaaaagtactttcaccgagagtatttatgaaaatgagtcggtgttcggtcagcttggcgagccgcaccgttttcccgaagtatcgcgagtgcgggagacgctgcgccgttggcggttttatcatgaattcgcgattggccggcattcgccgctgcgtcagccggccgtgggttaccgttcgccagtcctcgacagcgatggccagaatctcgccgccgcctttcagaccattgtcgagatcggcgcggaggagattttgcatgaaatccttgccgacgcctttcccggctgccagttttattgtgaaaacgagcactcgcgtttcgctctgaaaatgcgtcgcgaagggatccgccgcccgctgctggcggcggagatgtccgacggtacgctgcgctttttgtgcctcgccgtcgcgctgctcagtccacgcccgccggcgtttctggcgatcaatgaaccggagaacagcctgcatcgcgacatgttgcccgcgctggcccggctgattatcgaggcctcgcgctacagccagatctggctgaccagccactcggcggagctggcggagcttatcgccgccggggcgccttgtcagcgctatgcgctggagaatcgcggcggggagacgcggattgtcgagtgaagcccgtcatccctgacgggggcgctggagtcaggcggggctctgcgtctctgcggtcggcagcagacggttgccgccgcgtagggtgacgaacgagagcagggtgaagctcagggtcatgcagccgaggatcagataggcctgatggaagccgacggtgtcgtacatccggcccacccaggcggaaagcaccaccccggacaactgttttgacagattaaaaccgatcaggaacagggtggccgagaggcgcgggttaaaggcggaagagatatatttaaaagttcccaccagcaggaaggggatctcaaacatatgcagcatcttgaggatcaccacctcgactgccgatgaggcgaaggacgacccgagaatacgcaccgacatgatcatccccgcggtcagcagggcgtttttggcgccgatgcggttaacgatggccggcgcgcagaacatgatcagcgcgttgagcaactcgccgccggtggtgacgaagccaaacacttcggtaccgcgctgcggactggcgaaaaagcttttgaaaaagttggcgaactgctggtcaaacacgtcgtagacgctggcgacacccaccacatagacgataaagccccagaagcgcggcatacgcagcagctctgccgccgtacgcagcgaaaaggcctggcgattggcgcccagcgcctcgataacctgggcgctgttgctgctttccggccgcgacagccagagcagcagaccgagcaccagcgcaaagccggaggcgatccagaaggtgatattgggatcgatgccgaacagcacgccggttatcgaggcgcatagcgcccagccgacgcagcctgcgacccgcactttgccatattcaaagcggttggcccggctgacgcgttcgatataagcttccaccgccccggagccgctggagaaaacaatccccaggtagatcccgcctaccagcgaaccagcgataatattcatctgcagcagcggagagaaaacgaaaataaagaatggcgcgaacagaattaacaataccgtaatggtccacagcagatgtttgcgcaggccgagcttatccgacatcaggccgaacaccggctgaaaaataatggcgaataacgagatagacgagaaaacgatcccggtttccgttttagttaaatggttaacgtccgccagccacaccggaaaaaacgggaagtaggccgacataatgaaatagtaaaagaaaaagaacagcaggaaatagacgaaattatgccgttctcgtggcgccagttctgagaatttcatcaccatgatcccttgttattctgtttgtggggtgggggctgtcgcccccacggattaaaagcaacgcaatgagacctcgtactgccagcgcgtttggctcaggagccactgcggcagcacgctgggggtccaggagtcatcgcctcccacccccatatgcaggccgtcgagggtgatccacacgccgtcttcggcctgcatcttgtgccagtggtcggtctccatcagctgacgggtgctccatggctgaacggagaagtggaaatgtccgctgatgtgccagcgcccccagtccagcgcctgggtatcacagcgcaggccgttttccgtcgggaagatatagggggtggtcatcgccgccagcggctgctcccagcgggcgaagcaggcgctgctccgccggtcggggtagttctcatgcggccccagacccagccagctcaccggcgcctgctgatccgccacctggaagtgcagcccgacccgcggcagcggcggcagggtttccgcccgttcgccgtccaccgccaaccgcagggttccgtcagcagtgaagtgcatgcgccagtggctgacaatcactacctcttcgccgcgcaggtagtgccagcggcagtcgacgagggtttcatttgccaggcgctgcgcatcgcactggacgcagtgcgcctcaagatcgtacaggccggcgcttttccagcgctccacccaggcgttggggtcgatacgctctacttcgctgaccccgatgtcgttgtcgagcggcgcgcgaataaactggtcacgcaggggggtcaacagctgctcctgaccgccaaccgaccagcggctcagcagacccgtccggcgatcgatggtccagcattgcgaaccggcgcggatctgccagacctcatcgctgacgataagatccggagcgccggcagacacggtgggcgccggcagcgccagcggggcgggcaggggaaactgttgccaggcgacgcggtgctccgcttctgaccaggcggtcgcctggggctgggtcacctccagcgtcagccacaccgcgcgggcgccttcaggcaggatcaggctatcgagcagcgttatctcgtcgctgccctcagggggcagcgccagggtcaggtcgccgtgatacaggggttcaccggccgcctgcacctgccagcgcagcacttcgttatcggttgggcggaacaggtattcgctgatgatgcgcacccgcagcggcgaggtcgacagcagcgtgaactgaaaatactgctgggcgtgcttcgcctccaccagcgacggatgcggcgtgcgatcgggaaacaccagaccgttcatacagaactggcgatcgttaggcttatcaccaaagtcgccgccataggcccagccgacgctgccgtcggcaaaggttttgcggatcgcctggtcggcccagtcccagataagcccgccctgcagccgcggatactcgcgaaaggcctgccagtaatcggcgaagttgccgaggctgttgcccatcgcgtgggcgtactcgcaaaggatcagcggccgctgctcaccgggcaggctgatccattttttgatcccccatttggggaccgccgggatcggctggtcgcgttcgatgcgggcgtacatcggacagataatatcggtggcggtggtatccgcgccgccgccctcgtactgcaccggacggctcggatcgttgcgtttcagccagtggtacagcgcttcgtggttgccgccgccgccggactcgttgcccagcgaccagatgataatgcacggatggttgcggttgctctgtaccatccgggtgacgcgggcgctgaaggctggtagccacgccggatcgtcggacagccgattcatcggcaccatcccgtgggtttcaatattggcttcatcgaccacgtacagaccgtagcggttgcagagttcataccagcgcggcgcgttgggatagtgcgagcagcgcacggcgttaaagttgttctgcttcatcaacagaatgtcctgcaccatatccgcctcggtgaccacctgcccgcgcaaatgatgatgctcatggcggttaacgccgcggatcagcagcggtttaccgttgagacgcagcaggccatcggcaatctcgatgcggcgaaaaccgatgtcccacgcttcggcctccagcagttcgtcgccgcgccacagggtgaccacggcgcgataacagttcggggtttccgcgctccagtgcgccggcgtcgccaccgccagggagaaatcgacccgttccgcgtagtggccgcgctcatccaccgtcggggtacctaacggctgccgcccggcggcgatctgctcctcgccgcgccacaggctaaccccgacgctgagcccggcaagcgccgcctcagtcgcttcgatggtcgcctggacctgcagagtgccgtcgcgatagagggcgtcaagggctggcgtcaactgcacgtcgcatagccgttgctgcggcttattcagcagccataccgagcggaaaatgccgctcatccgccacatatcctggtcttccagccagctgccggcgctccagcgcatgaccatcacgcacaggcggttgtcgcccggacgcaggaaggggctgagatcgaacgccgccggcaggcgactgtcctgcgaatagccgacccacacgccattgcaccacagatgaaacgccgagttgacgccatcgaaaataatctgcgtttgcccgttctcgcgccatgtgtcctcaaccgtaaagtgcagggagtagcagccggtcgggttatcctccggcacccgcggtggggtggtgtcgatgggatagcggacgttggtgtagatcggcgcgtcatagccctccatctgccagttggaaggcacaggcgtgccgcggcagtccggtagatcctgcgtcaaccactgcgcatcgacggcaaacgggctacgggcgtaagagaactgccactcgccgtccagttgacggcggcgggatgaaggtaggttatcgcgggcggcaagctcatcgcgccagctggcgaaaacgggatgcgctggcaggcggttaaggtgggtaatggtctggttctgccagtcttcacgggcgaggacggcgtgaaagtcaggagtgtggctgcggccggtatcgctaatttgcatattaaaccccggtaagtcataaattgtcgttcgctaaacaggatgattaacgttatcgggtaatttgttttgtccagcaatctcgggggaatcgaaattaacagacgatcacgaaagcgggggcgaagcgctgttttttgtcgcgcgttaaacataaaatgttagcgcacgacattgttattgctgaggagaaaagatgccgcgtcgtaccgcaaccctggaggatgtcgcccgcgccgcgggcgtgtcccagcagacggtctcccgggtgctgaaccgtcctgaggtggtgtcagcccgcacccgcgagcaggtgatccgcgcgatgcaggcgctgcactatgtgcctaaccgctcagcgcagctgcttgccggcaaagcggcgccctccatcgggctgattaccgcctcgctgacgctgcacgccccctcgcagatcgcctcttatacccctctgccgctgccgactcacgctctcctctacatctcggtggtctcggcatcccaacaaacacacaccgagacacatcacaaccaacacaacaacaccacagaccacccagcaccaccaactactttaccccccc

SEQ ID NO: 173 - DNA, 36040 bp, Unknown
  source: /note="Description of Unknown: MKP2_2161_1 Mutant Bacteria sequence"
gggggggggcgggtgggaggtgtctgcgggcccgcggtccgggcgcgggtggggcacggggtgggggtgttcggctttatcggcctgttcgcgccgctgctggcgaaaatgcttggcgcccgtcggctgctggcgcggctgctgctggcggcgctgatcggcgcgctgctcctgtggctttccgatcaggtgatcctctggctgagccgggtatggcgggaagtctccaccggctcggtcaccgccctgattggcgcgccgctgctgctgtggctgctgccgcggttgcgcagcatcagcgccccggtgatgaacggcggcgataatgtgcagcctgagcgctatcatgtgcaatggtttgttctcgcaggcgtcgcgttgctgctgctggcggtgagcgtggtgctggcctttggtcgcgatgcccacggctggctgtgggcccacggcgatctgctggagcaactgctgccctggcgctggccgcgggtgctgtcggcgctgttcgccggggtcatgctggcggtcgccggctgtattatccagcgcctgaccggcaacccgatggccagcccggaagtgctgggcatcagctccggcgcggcttttggcgtggtgctgatgctgttcttcgtgcctggcgacgcctttggctggctgctgccggccggcagccttggcgcggcggccaccttgctgatcattatgctcgccgccgggcgcggcggcttctcgccgcatcggatgctgctggcggggatggcgctgagcaccgccttcactatgctgctgatgatgctgcaggccagcggcgatccgcgtatggcgcagatcctgacgtggatctcggggtcgacatatagcgcgacgccggagagggtagtgcgtagcggcgcggtaatgctggcgctgctggcgctggcgccgctctgtcgtcgctggttaaccatcctgccgctgggcggggaggcggcgcgagcggtgggcatggcgctgacgtcatcgcggattgttctgctgctgctggcggcctgcctgacggcggcggcgacgctgaccatcggcccgctgagctttgtcgggctgatggcgccgcatatcgcgcggatgatgggcttccggcgaaccctaccgcatatggtgatttcagggctgactggcgggctgctgctggtcttcgccgactggtgcggacggatgatgatgttcccgtatcagatcccggcggggctactgtcgacctttatcggcgcgccttactttatttatttgctgagaaagcagagtcgctaacggtcctggatggcttcaacatccccggtggcgctatcgcttaccggggctacagcgctgtgcgatttggtagcccggataaggcgcaatgcgcctcctccgggaaaatccctgcgccaccaggcattcaagcaccttacagcttggcaaatacccggcgcgcggcgtcgatggtgttgtcgatatcttcttcgctgtgggccacggacataaagccggcctcaaacgctgacggcgccaggtacacgccttcctccagcatcagatggaagaagcgcttgaagcgttcaacgtcgcacttcaccacgtcctgatagcaggtgacggtttcggcatcggtaaagaagatgccgaacatgccgccgacgttattgaccaccagcgggatcccggcgtcacgtgccgcatccagcaggccttgcgccagctggttagtcagttcagtcagggtttcatggacccccggctgcgccacttcgttcaggcaggcgaagccagccgccatggcgatcgggttgccggagagggtgcccgcctgatagaccggaccggtgggcgccagagcgtccatcacctcacggcggccgccgaaggcgcctaccggcatcccgccgccgatgattttccccagacaggtcagatccggctccacgccgtagtaagcctgagcgcctgccagcgccacgcggaagccggtcatcacttcgtcgataatcagcagggcgccaaattcgtcgcacagcgcgcgcaggcccggcaggaattccggctgcggcggaatgcagttcatatttccggccaccggctcgacgatgatgcaggcgatctcctgcggatactgctcgaacgccgcgcgcaccgaggcgaggtcgttataagtgcaggtcagggtatgtttggcgaaatcggccgggacgcccggcgagttcggctggccgagggtcaacgcgccggaaccggctttcaccagcaggcagtcggcatggccgtggtagcagccttcgaacttaatgattttgtcgcgaccggtgaagccgcgcgccaggcgaatggcgctcatggtggcttcggtaccggagttcaccatccgcaccatatccatggtcggcaccagctcggtcaccagggccgccattttcacttccatttcggtcggcgcgccaaagctcaggccgcgggttgccgcctcgatcaccgcattgcggatagccgggtggttgtggcccagcaccatcggaccccaggaaccgacataatcgatataggctttcccatccacgtcatagaggtaagcgccatccgcgcgttcgataaacagcggtgtgccgccgacgccggtgaaagcgcgcaccggcgagttaacgccgccggggatcagttcgcgcgcagcgtgatacagattttcagatttgctcatggccagggtcctggttcgtgaaaaatgttttatcggctattctaagttattccaggatggttatgaaagttttgcccaattgaaacaatgtgccgcaagggcatttttttgacgacgcagcgcgccgggacggctaaaatgccgctctcttcatttgtattaccaataattgataacggcatgaaagcagaaactccctcttttgaagcacatcagtttgtgcgggtgcgtcgcggcgatgcggtgcgccgtctgattcaacgcgataaaacgccgctggcggtgctgttgatggcggcagtggtcggcacgctggcggggctggtgggcgtcgcctttgaaaagagcgtgaactgggtgcagaaccagcggatcggcgcgctggcgcaggtggcggaccactggtatctggtctggccgctggcgtttatcctgtcggcgctgctggcgatggtcggctattttctggtgcgtcgctttgcgccggaggccggcggctccgggattccggaaattgagggcgcgctggaggagctgcggccggtgcgctggtggcgcgtgctgccggtgaaattcgttggcggcatggggacccttggcgccgggatggtgctgggtcgtgaaggaccgatggtacagcttggcggcaacattgggcgcatggtgctggacgttttccgcatgcgcagtccggaagcgcggcatacgctgttggcgaccggtgcggcgtcggggctttcggcggcctttaatgcgccgctggccggtattctgtttatcatcgaagagatgcgcccgcagttccgctacaacctgatctccattaaagcggtgtttaccggcgtgatcatgtcgagcattgtgtttcgcattttcaacggcgaagcggcgatcattgaggtgggtaaactaagcaacgccccggtaaataccctatggctgtatctggtgctgggcatgctgtttggctgctttggcccgctgtttaattttctggtgctgcgcactcaggatctgttccagcgcatccacggcggcaacatcaaaaaatgggtgttgattggcggattaatcggcgggctctgcggtctgctggggctgatgcagccctccgcggtgggcggtggctttaacttgatccctatcgccgctgccggtaacttctccgtcggactgctgctgtttatctttattgcccgcgtggtgaccacgctgatctgcttctcttccggcgcgccagggggcattttcgcgcctatgttggcgctcggcacgctgctgggcacggcgttcggcatggcggctattccgctgtttccggcctaccatctcgatgcgggcaccttcgcgattgccggcatgggggcgctgctcgccgcctcggtgcgtgcgccgctgaccgggatcgtgctggtgcttgagatgaccgataactatcagctcattttgccaatgattattacctgccttggcgcaacactactggcgcaattcctcggcggtaagcctttgtattcgaccattctgcagcgtactctggcgaagcaggaagccgagcaggcggcaaaagcgcagcaggctccccgggagaatacttgaacgatttaccagggtattagataatggctcaaaaggtccggttattctttaaccggccggaagtatcaatgggagcagaaaatgagtgatgacgtagcgttgccgctggagtttaccgaagccgcagccaataaagtaaaacacctgattgcggatgaagataatccgaacctgaaactgcgcgtgtatatcaccggcggcggttgcagcggtttccagtatggcttcacctttgacgatcaggtgaacgaaggggatatgaccattgagaaacagggcgtcggcctggtggttgacccgatgagcctgcagtatctggtcggtggctctgtcgactataccgaagggctggaaggttcgcgctttatcgtgaccaatccgaacgcgaaaagcacctgcggctgcggctcctcgttcagcgtttaaagcgagttctcccccagcgggagggagcaaaccctaaaaacggtaaccttaaggttaccgttttgcttttattaccgaccgttatcgtccagggcaaacgtcggcagcttcagatgccagcgaatagccgccagacgaattaccagggtgaccaccatccccatcattgccgaattctccagcgggagatgaaaggtgtcgtgtgccgtggcgtggacaataccgccgacgatacaggcggtggcgtagatttcggtacgcagaatcataggaatttcccgcgccagcacgtcgcgaataatcccgccgccgacgccggtcaccacccccatgcacaccgcgaccagcgggccgctgccagcgagaaaagctttattgacgccaatgccgacaaacaccgccagaccgacggcatcaagaacgggcaggatccatttcggcagccggcgaggctggcggaccagcaggatggtcagcatgctggtgaccatcgccaccaccagatcggtgggatctttgacccagaataccgggccattcgccagcgccatgtcgcggatggtcccgccgcctaccgccgtcactacccctaacaccagcacgccgaatgggtccatacgcagttttccggccagcagtacgccggagatcgcgaagacagctgtgccaataatatccagccaatagacaagcatcgttgattcccactgaacatccggtgtgccggatgattattttacctggtcaagcgccgcacaaagttgtttggcggcgaggataatacgtgggccggcgcgttcaaaccagtcgctgtgtaacgcaatcaacgaaatggtgagctgatgttgccaaaagcgctgcgcttcggcaatgcggctggcatccccggtgaccacgatcgcctgcggctggcgggccagcacctgttcgcggctcacctgcggccagggaacgcggctggtggcgaagatattctcgccgccgcaaagccttagcacctgatcctgaatcgaaccggggccgctggtgaacagcggtgcggagccgaactgcaggaagacgcgtttcttcggcgcgttggcatagcgcgctttcaacgcatcgtattcctgctgcatcgcctgcgccgcctgctgtgctttttccggctgcgggctccactgcgccagctcacgcagggtagcgatgatctcttctatggtcgaggtctgtacccacaggacgtgaatacccagagactgcagctggttaacctggcgttcggcattgcccccgcgccaggccagcaccacgtctggcttgagcgccacgatgcgttccaggttcattccctgccagctggcaacctgttcgatcgttttggcctgcgaaggataatcggaatagctgctgacgccgaccggcgtgatcccggcggcaaaggccagttcggtattggcgggggagagggtgatcacccgcggcgcggccagcagccacgccggggcgagtaacagcagcgcggcaagcgcgaaggatagcgacttagccacgtgccaggttctgtaccagattctccaccatcagggtggactgtctggcggcgaccgcaaggaactcctcaaagctgaggtgggactgctggtcggccacgtcggaaatagcgcgaaccaccacgaagggaaccttaaagttatggcagacgtgggcgatggcggtcgcttccatttccacggcgatcgcctgcgggaaattatggcggatcttcgccagaccgacagagccgttaatgaaggcatccccgctaacgataaggccgcgaacggcgttgagatctaacgctttaatgcagctctctgcggcggccaccagtttttcatccgccttaaaacccgccgggcagccagggagctggccgtattcatagccgaaggcggtgacgtcggcgtcgtggtagcgcgcttcatcggagacgacgatatcgccgaccttcagcgtcgacgccaggccgccggcagaaccggtattaatgatcacgtcaggctggcagcgctccagcagcagggtcgcgcccatcgccgccgctacttttccgataccagacttcagcagagcgacgtcaacgccgtgaagttggccggtatagatttcgcttccgccaatggtgatggtctggcggttttcgattttgtcgcgcagaagggtaacttcctcttccatagcgccaataatgccaattttcatagatttactcgcgatgtgtcaggtttagttgcatagtctatcatgcgcttaaggggaagcgtattgctcgcgcgggagaggctatggcaaagattgattttcgcaacaagataaactggcgtcgacgcttccgttcgccgccgcgggtggagacggagcgcgacatcctgcggatctttgaaagcgatcggggacggatcgtcaactcgccggcaatccgccgcctgcagcaaaaaactcaggtcttcccgctcgagcgcaacgcggcggtgcgcactcgcctgacccactcgctggaggtgcagcaggtggggcgctatatcgccaaagaggtgctgagccggctgaaagagctgaggctgctggaagagtatggcctggaagagctgaccgggccattcgagagcgtggtggagatggcctgcctgatgcacgatatcggcaatcccccgtttggccattttggcgaagcggcgattaacgactggttccgtcagcgcctggcgcccggcgatgcgctcgggcagccgctgaccgacgatcgctgcgaagtgcaggccttacgcctgcatgacggagagacatcgcttaatgcgctgcgccgtaaagtgcgccaggatctctgcagctttgagggcaacgcgcagggcattcgtctggtccatacgctaatgcgtatgaacctgacctgggcgcaggtgggatgtatcctgaaatatactcgtccggcgtggtggtctgaggagacgccggccagccacagttatttaatgaagaaacctggctattatttagccgaagaagagtatgtcgcgcgtttgcgtaaagaactggatctcgcgccttacaatcggtttccattaacctggattatggaggctgcggatgacatctcatattgcgtcgcggatctcgaggacgcggtggaaaaacgtatttttagcgcagaacagctctatcagcatctttacgacgcctggggcagtcatgaaaaaggctcgttattttcgcaggtagtagaaaatgcctgggagaaatcgcgagctaattatctgaagcagagcgcggaagatcagttttttatgtatttgcgggtgaatacgctgaataagctggtgccctacgcggcgcgccgatttattgacaacctgccggcaatcttcacgggggactttaatcatgcgttgctggaggacgacagcgattgcagtcagctactggagctctataaaaatgtggcgatgaaacaggtctttagccatccggatgttgagcagctggaattgcagggctaccgggtgatcagcggcctgttggatatctatcagccgctgctgaaattatcgctggaggatttcagcgaattagtagcgcaggagcgggtacgacgtttacccattgcctcccggctgtatcagaaactttcgacccgtcaccggctggcctatgttgaagcggtaaataaactggcgcgtacggcgcccgaatttgcgctgatggaatactattatcgctgccgtctgattcaggactatatcagcgggatgacggatttgtatgcgtgggatgaatatcggcgtctcatggcggtggaataggctggagttttgtaaagatggacaataaatttttactttttccagaaacttaattccggaacttagcgttataaaatgactctgatagtcacgtacacagcaactttcgttacctgatattgagattgaaactgatgaaaaaaaccacgttagcaatgagtgcactggctctgagtttaggtctggcgttgtccccgctctctgcgagcgcggcagaaacggcatcttcggccactaatgcacagcagatgccaagcctggccccgatgctggagaaggtgatgccgtcggtggtgagcattaacgttgaaggtagcaccaccgttaatactccacggatgccacgcaacttccagcagttctttggcgataattcgccgttctgccaggatggttctcctttccagagttcgccgttttgccagggcggcggacagggcggtcagcctgacggcggccagcagcagaaatttatggcgctgggctccggcgtcatcattgatgccgccaaagggtatgtggtgaccaacaaccacgtcgtggacaacgccaccacgattaaggttcagctgagcgatggccgtaagtttgatgccaaagtcgtcggcaaagatccgcgctctgatatcgcgctgattcagattcaggagccaaaaaacctgacggcgattaagcttgccgactccgatgcgctgcgcgtcggtgattacaccgtggctatcggcaacccgttcggtctgggcgaaaccgtgacctccgggattgtctccgcgttgggccgtagcggcctcaacgtggaaaactacgaaaactttatccagaccgatgcggcgattaaccgcgggaactccggcggcgcgctggtgaacctcaacggcgagctgatcggtatcaacaccgccattctggcgccggacggcggcaacatcggtatcggttttgctatcccgagcaacatggtgaaaaacctgaccgagcagatggtgaaatatggccaggtgaaacgcggtgagctcggcattatgggcaccgaactgaactctgagctggcgaaagcgatgaaagtcgatgcccagcgcggggccttcgtcagccaggtaatgccaggttcggcggccgcgaaagcgggcattaaagccggcgatgtcatcacctccctcaacgggaaagcgatcagcagcttcgccgcgttgcgtgcccaggtcggcaccatgcctatcggcagcaaagttgagcttggtctgctgcgcgacggcaaaccggtgaccgtgaccgtcgaactgcagcagagcaaccagacccaggttgactccagcaccatcttcaacgggattgaaggggcggaaatgagcaataagggtcaggataagggcgtggtggtcaataatgtgaaagccggtaccccggcggcacagattggcctcaagaaaggcgacgtcatcgtcggggcgaatcagcagccggtgaaaaacatcgccgatctgcggaaaatcttcgacgccaaaccgtccgtactggcgctgaacattcagcgcggcgacgcctctatctatctgctgttgcagtaaccgccagcgctcgcttcccagccccttccctcgccgagggcaggggcttttttcgttctgtgaccgcccccacaactccacatatctcaccccggcttagtgcaaatgcacaatgcagcgcgacgatgactcttttatgctggtgcccagcaaaggggaggactacatggctggctggcatcttgataccaaaatggcgcaggatattgtggcgcggaccatgcgcatcatcgataccaatatcaacgtgatggatgcccgcgggcggatcatcggcagcggcgatcgggaaaggattggtgaattgcacgaaggcgcgctgctggtcctctcccaggggcgggtggtggatatcgacgacgcggtcgctcgccatctgcacggggttcgccaggggattaacctgccgctgcgcctggagggggagatcgtcggggtgatcggcctgaccggcgagccggagtcgctgcgaaaatatggcgagctggtgtgcatgacagcagagatgatgctggagcagtcgcggctgatgcatctcctggcccaggacagccgtctgcgcgaagagctggtgatgaacctgattcaggcggaagagcataccccggcgctgaacgaatgggctcagcgtttaggcatcgatctcaatcagccgcgcgtggtggcgatgattgaggtagacagcggtcagctcggcgtggacagcgcgatggcggaactgcaacagttacagaacgcgctgaccacccccgatcgcaataatctggtggccattgtctcgctcacggaaatggtggtgctgaaaccggcgctgaacagctttggccgctgggacgctgacgatcacgtccggcgcgtcgagcagcttatcgccaggatgaaagagaatggccagctgcgctttcgcgtggcgctgggcaacttcttcaccggcccaggaagtatcgcccgctcttaccgtaccgcacggacgacaatgatggttggcaagcagcggatgccggagagccgcagttatttctatcaggatctgatgctgccggtgctgctcgacagcctgcgcggcggctggcaggccaatgagctggcccgtccgctggcgcgtttgaaggccatggacaacaacgggctgctgcggcggacgctgcaggcgtggtttcgccataacgtgcagccgctggcgacgtcaaaggcgctgtttattcatcgcaatacgctggagtaccggttgaaccgtatctcggagctgaccggcctggatctcggtagctttgacgacaggctgctgctgtatatcgcgctgcagctggacgaacaacgctaagacgtggaggcaaaaaaatgccgggtagcgacgcgccatacccggcctggacgatgcatgctgtctggagtggatagagaccaccagcccggccaggcaacgcgccgccgggatgctcttacttacgggtgagcttttccagatcggcttcgatttcgctgatcttattggtgaccacgctttccagatggcgtaaatcgtcgaggattttacgcttgagatcgatttcagtgcgatcgcgctggcagatctgatccagctcgtcgataacgtagcgcagattggggctgatctcctggacctctttgtagccctggccgacgccgtcggcgacgacggttttgcgctgacgcggatatttgaacttcacgctcttggcgaagaattcgcctttgtctttctgaaaatagattttcagaatgtcgttgttagcttcctgccgcaggctatagcgatcgatctcatcagggttggtaatgccaagacttttcagattatcgtacataacggtacctttgatagcatcataaccattgaataattaacgaaaaaatccattttcgccagcatcaaatataaaaaaagcgggatatctcccgctttttatttgctttagtcgatggtgcgcagcagctcgttaatgccgaccttgccgcgggttttggcatcgactttcttcacaatcaccgcgcagtacaggctgtatttaccatctttcgacggcaggttgcctgagaccaccaccgagccagccggtacgcggccgtagaagacttcgccggtttcgcgatcgtagattttggtgctctgaccgaggtaaacgcccatggagatgacggagccttcttcgaccatcaccccttcaaccacttcagagcgcgcgccgatgaagcagttatcttcgatgatggtcgggttcgcctgcagcggctccagtacgccaccgataccgacaccgccggacagatgcacgtttttaccgatctgcgcgcaggagccgacggtggcccaggtatcaaccatggtgccttcgtcaacgtaggcgccgatgttaacgtaggacggcatcagcacagtgttgcgggcgatgaacgcgccctggcgcacggcggccggcggcaccacgcggaaaccttctttctggaaacgcgcttcgtcgtagtcagcgaatttcatcggcactttatcgaagtagcggctttccgcaccatcgataacctggttatcgttaatacggaaagagagcagtaccgccttcttcagccactgatgcgtcacccactgaccgtcgatcttctcagcgacgcgcagcgcgccggaatcaagaagggcgataacctggttaaccgcttcgcgggtcacggtatccacattagccggcgtaatgtcggcgcgacgctcgaaagcggactcaataacgttctgtaactgctgcattgtttctttccatttactaaaaaaaatacgtcaccctttatcgtttggattgagggccgctgtcaaccgttgttgcacttcttgttgcagctcattattaagggcacgccggtcggcggtggcgattataaataaatcttctactcgctcaccaattgtcgtaattcgcgccccgtgaagcgatatcccgaggtcggcgaacacctgcccgacgcgggcgagcagcccgggctggtcgagcgctatcagctccagaaacgattttcggtcggtatgggtcggcaggaaattcacctcggtgtccacggaaaaatggcgtagctttgccgcctgacgacgcggggccggaggctgccagctgcgctgagtgatggtctgctccagcccctggcggatcgcctcgtggcggtcggcggaaagggggctgccgtcgggctcaaggacgataaaggtatccatcgccataccgtcgcgggtggtgaagatctgcgcgtcgtggacgctgaggttgcgacggtcaagttcgccacacaccgcggcgaacaggtaagggcgatccgggctccagataaaaatctccgtaccgccgcgggtggcctgcgagctcagcaggatcatcggcttattcagatcgtggcgcagcaggttgcgggcgtgccaggcgagctgcgtcggcgtatgtcgcacgaaatagttggcgcggcagcggttccagatctgatgcagcgcctcttcattaatattgtccatccgcagcagggccagcgcctgcagctgatggtgacgcactcgttcgcgcatgtccggggtgctttgcatgccgcgacgcagctgcttctcggtggcgaaatagagttcacgcagtaggctctgcttccagctgttccataaggtttcgttggtggcgcagatatcggcgacggtcagacacaccagatagcgcagacgattttccgtttgcacctcctcggcgaactgcttaatcacctccggatcctgaatatcgcgccgctgggcggtgactgacatcagcaggtggtgacgcaccagccaggcgaccagctgcgtttcgcgcgagttcagcccgtgcagctcggcaaacttcagcacatcctgcgcgccgaggatcgagtggtcgccgccgcgccctttggcgatgtcgtggaacagggcagcaattaagatcagctccgggtgcgttaagcgcggccacagctccacgcacagcgggtggcggctgcgggtttcttctttggcaaagctttccagcttgagcatcacccggacggtgtgttcatcgacggtgtaggcgtgaaacaggtcgaactgcatctggccgacgatatgcgaccactgcggcatataggcccacagtacgctgtggcgatgcatcggcagcagcccgcgacttaccgccccctgatggcgcagcatactaagaaagagcgtgcgcgcctccgggatatagcacagcggctgggtgagatgacggcgggcgtggcgcagatggcgcaacgtcgttgagtagatgccggtgatggtgctattgcgcaccatgatataaaacatgcgcagaatggcctgcggttcgcgaataaacagcgtgtcgtcacgcagatcgataagggtgccgcgcagctggaaatcatcatcgatcgggcgtggtttttcatcctcggtcagggcgaggatagcctcctcaaacagctgaagcagcatctgattcagctcgctcacccggcgggtaacgcggaagaagtccttcatcatatgctcaatcggctggttgccgtcgccttcatagcctagccggcgggccacgctgagctggcggtcgaaaagcagacggttgtcatagcgcgtgagttcgagatgcagcgcgaaacggatgcgccacagctgatgcagacactcattgagttcattgcgctcggcttcggtcagaaagccgaagccgaccatctcatccattgaggtggcgccgaaatggcggcgagccacccactgtagcgtatggatatcgcgcaagccgccggggctgcttttcacgtccggctcgaggttatagcttgtgccatgatagcgctgatgacggacgttctgctcttcgaccttggcggcgaagaacttttccgatggccagaagccgtcgctaaaaatatgtttttgcagttcaaggaacagcgcgacgtcgccgatcagcaggcgcgattcgattaagttggtggcaacggtcagatccgagagaccttccagcaggcactcttcgagggtgcgtacgctgtggcccacctccagcttgacgtcccacagcagggtgagcagttcgccgactttttgcgcctggtcgtccggcagttttttacgactgaggatcagcagatcgacgtctgagagcgggtgcagttcgccacggccatagccgccgacggcgaccagcgccaggtcgctgacggattcaaaaccgcaggcgatccataatcgctgcagcaactggtcgataaattcggtgcgcgccgcgatgagctgctccgcgacgatgccggagtcaaacgcctcgcccagccagtgctggaaggtatcgatgtgcgccttgattgcggcacagttcagatcgccctgcggccaactcaccgggtgttccggcgggacgggcaggagaggggaggctgtgtcaggtaatgagttgctcatcgcgtcaccataagaaaaaactatctaataaaaaagccggcgggcgccggcttttcatcattcatcgtgcgagattatcgccgggatggtgtcatccttgcgtagcgtcagaatttcgcagccgttgtctgtcaccacaatagtatgctcgtactgcgcagacaagctccggtctttggttttcaccgtccagccgtctttcatgctgcggatctcttttttaccggcgttgaccatcggctcgatggtgaaggtcatgcctggtttgagtacgacgttggtctccggcgaatcgtagtgcagtacctgaggctcttcatggaagccgcggccgatgccgtggccacagtactcgcgaaccacggagaaaccttcggcttccacaaatttctggatcgccgcgccgatggtgcgcaggttgatgcccggtttaaccatcttcagcgccaggtacaggctttcctgagtgatgcggcacaggcgctcgccgagaatcgtcggtttgccgacgataaacattttggaggtatcgccatggaaatcatctttaatgacggtcacgtcgatattgacgatatcgccatctttcagcagcttgccgtcatcagggataccgtgacagaccacttcattgaccgaaatgcagacggatttcggatagccgtgatagccgaggcaggcggaaatggccttctgctcgttaacgatatagtcgttacagatgcggtccagttcgccggtgctgacgcccggtttgacgtagggttcgatcatttccagcacttcggcggccaggcggccggcaacgcgcattttttcgatgtcttcagatgtcttaatagagatagccatggagtatgtccagcagtgtcgatattttcgacaataatagagtaagtcctgtcaatggtaacagtccgggcaggctggtgccaaactgagaatcattaacagcacgcgacgtcaacaagagttggtgtctggatggattttgtggtataaagcgcgccggacttccgttccatctcagatacacaaggatggacgtaagcgacatagctcactttgtgtaataacacacacgtatcggcacatattccggggtgcccttcggggtcggtaatatgggatacgtggaggcataaccccaatttaatctatagaggttttaaacatggcaactgtttccatgcgcgacatgctcaaggctggtgttcacttcggtcaccagacccgttactggaacccgaaaatgaagcctttcatcttcggcgcgcgtaacaaagttcacatcatcaaccttgagaaaaccgtaccgatgttcaacgaagctctggctgaactgaacaagatcgctgctcgtaaaggtaaaatccttttcgttggtactaagcgcgctgcaagcgaagcggtaaaagacgctgctctgagctgcgatcagttcttcgtgaaccatcgctggctgggcggtatgctgactaactggaaaaccgttcgtcagtccatcaaacgtctgaaagacctggaaactcagtcccaggacggtactttcgacaagctgaccaagaaagaagcgctgatgcgcactcgtgagctggacaagctggaaaacagcctgggcggtatcaaagatatgggcggcctgccggacgcactgttcgttatcgacgctgaccacgagcacatcgctatcaaagaagcaaacaacctgggcatcccggtatttgctatcgttgataccaactctgatccggacggcgtagacttcgttatcccgggtaacgacgatgcaatccgcgcagtaagcctgtacctgggcgctgttgctgctaccgttcgtgaaggtcgctctcaggacctggcttctcaggcggaagaaagcttcgtagaagctgaataataaggtttaagcccttattagtaccgtgtatgaataggggcccattatcggccccttttttcaatttacgctgtttggccgttggccgggcagtatccacatctcccgaggattttagaatggctgaaattaccgcttccctggtaaaagagctgcgcgagcgtactggcgcaggcatgatggattgcaaaaaagcgctgactgaagcgaatggcgacatcgagctggcaatcgaaaacatgcgtaaatccggcgcgatcaaagcggcgaagaaagcaggcaacgtggctgctgacggcgtgatcaaaaccaaaatcgaaggcaactacggttacattctggaagttaactgccagactgacttcgttgctaaagatggtggtttccaggcatttgccgacaaagtactggacgccgctgttgcaggtaaaatctccgacgttgaagttctgaaagcgcagttcgaagaagaacgtgttgcgctggttgctaaaatcggcgagaacatcaacatccgtcgtatcgctgttctggaaggcgacgttctgggcagctaccagcacggtgcgcgtatcggcgttctggttgccgctaaaggcgctgacgaagagctggttaagcagctggcaatgcacgttgctgcaagcaagccggaattcgttaagccggaagacgtgtctgctgaagtggtagagaaagagtaccaggttcagctggacatcgcgatgcagtccggtaagccgaaagaaatcgcagagaaaatggttgaaggccgcatgaagaaattcaccggcgaagtttctctgactggtcagcctttcgttatggagccgagcaaatctgttggccagctgctgaaagagcacaacgctgacgtgactggcttcatccgctttgaagtgggcgaaggcattgagaaagttgagactgactttgcagcagaagttgctgcgatgtccaagcagtcttaatttttaaaaaaaggagccgcctgagggcggcttctttttgcgcccattttgtaaattcagccaactgcttatagtggccgcgctgaaatgcgacatacaatgtcgccggaattatcacatctcattcgttgacagtctcaggaaagaaacatggctaccaatgcaaaacccgtctacaaacgtattctgctgaaattaagtggcgaagcgctgcagggctcagaaggcttcggtattgatgcaagcatacttgaccgcatggctcaggagatcaaagagctggttgagctgggtattcaggttggcgtagtaattggtggcggtaacctgttccgtggtgctggtctggcgaaagcgggtatgaaccgcgttgtgggcgaccacatgggcatgctggcaacggtcatgaacggcctcgcaatgcgtgatgcgctccaccgcgcctatgtgaacgctcgtctgatgtccgccatcccgctgaacggcgtatgcgacaactacagctgggcagaggcgatcagcctgctgcgcaacaaccgcgtagtgatcctctccgctggtaccggcaacccgttctttaccaccgattccgcagcctgcctgcgcggtatcgaaattgaagccgatgtggtgctgaaagccaccaaggttgacggcgtattcaccgctgacccggcaaaagatccttctgccaccatgtacgatcagctgacctacagcgaagttctggaaaaagagctgaaagtcatggatctggcggccttcaccctggcgcgtgaccataaattaccgattcgcgtcttcaacatgaacaaacctggcgccctgcgtcgcgtggtgatgggcgaaaaagaaggcacattgatcacggaataattcccgtcagcgccaaatccgggtaatattccgctttactttcgcggggatattgcccggtgattttcattaaatctgactatacttagctcattttccgacgggtgccccgtctggtctgactgagacaagctttcaaggattcgtaacgtgattagcgatatcagaaaagatgctgaaatccgcatggaaaaatgcgtcgaagcattcaaaaaccaaatcagcaaaattcgcacgggtcgtgcttctccgagcctgctggacgggattgttgttgaatactacggtactccgaccccgctgcgccagctggccagcgtcaccgtcgaagactcccgtaccctgaaaatcaacgtctttgaccgttctatgtccgcggctgttgaaaaagcgatcatggcctccgacctcggtttgaacccaagctctgccggcagcgatattcgtgttccgctgccgccgctgaccgaagagcgtcgtaaagacctgaccaagatcgtgcgtggtgaagccgagcaggcgcgcgttgccgtgcgtaacgttcgccgtgacgccaacgataaagtcaaagcgctgctgaaagaaaaagagatcagcgaagatgacgatcgccgttctcaggacgacgtgcagaaaatgactgacgccgccatcaaaaaagttgacgcggcgctggcagacaaagaagcggaactgatgcagttctaatgctctgcccttactcaggccagacaggctctggcctgagtaaaatctgaaacgccgtacagaagactgtacgctcaattctcgggattgcgttgcaaccgctggccttgtagcctttagcgcttagttgaaggcctaatgccgccgtctcatccccgatagttgctgcgtaggggcttgctggcggcgttttgctttttattctgtttccactcttctggacgtctcatgaagcaattaaccgttctcggttcgaccggctccattggctgtagcacgctggacgtggtgcgccataaccctggtcgcttttccgtcgccgcgctggtcgcggggaaaaacgttgaccgtatggttgaacaatgcctggaatttaccccccgttacgcggtgatggacgatgcgcaaagcgctgagcggttgcgcacccgtctgcatgagcatggcagtcgcaccgaggtgctgagcggccagcaggcggcggcagaggtcgcggcgctggatgaggtcgatcaggtcatggcggcaatcgtcggcgcggcgggactggtgccgacgctggcggcgatccgcgccgggaaaacggtattgttagcgaataaagaatcgctggtgacctgcggtcgcttattcatggaggcggtgcaacagtcgggggcgcgattgctaccggtcgatagcgagcataacgctatttttcagagtatgccggagacaattcagcagcatctgggatacgctgatcttgcccggaacggcgtctcgtctatcctgctgaccggctccggtgggcctttccgcgagacggccgtggctgaactggcggcgatgaccccggatcaggcctgccgtcatcccaactggtcgatggggcgcaagatctccgtcgattcggccacgatgatgaacaaaggcctggaatatattgaagcgcgctggctgtttaacgcctcggcccagcagatggaagtgctgatccatccgcagtcggtgatccactcgatggttcgctatcaggatggcagcgtgctggcccagcttggggagccggatatgcgtacgccgatcgcccataccatgggctggccgcagcgactgaattccggcgttaaaccgctggacttctgtcagttgagcaatctgagcttctccgcgccggactatacgcgatatccgtgcctgaagttggcgatggacgcgtttgatgtcggccaggccgcgaccacgacgctgaatgcggctaatgaagagtcggttgccgcgtttctgcatggcgatatccgctttaccgatattgcggcggttaacctggcggtgctggataagatggacctgcaggagccgcaaagcattgatgatgttctggttatcgacgccgaggcgcgcgcaatcgctcaccagcagctgctgcggttggttgcgcaggcgtaacgcggtgatatttgtgggcgcaaggcttcggtgatatagtctgcgccacccgatcgttgcattttgttgttaaagattacggtggccgtgacaaaacacggcttttttgcgtaaagcttttggttgttctctgcgattggctgcagccccggcaccggataaaaatgcgtatccagcgcggcccggtggcctctgtttggtggctagttaatccttattatggacttaaaacgcgtgatgttgtctgctaatcaaactgtcagcgaaatatcgcccacccatggctgccgtcatgtcgccattattatggatggcaacggccgttgggcgaaacggcaaggtaaaattcgcgctttcgggcataaggccggggcgaaatccgtgcgtcgcgcggtctccttcgcggcgaataatgggattgaggcgttaacgttatacgcgttcagcagcgaaaactggaaccgtccggctcaggaagtcagtgcgctgatggaactgttcgtctgggcgctggatagcgaagtcaaaagcctgcaccgacacaatgtgcgtctgcggattattggcgacaccacgcgcttcaatgcgcgcctgcaggagcggatccgcaaagcggaagcgctaaccgcaaacaataccggcttaacgctgaatattgcagccaattacggcggtcgctgggatattacccagggcgttcgtttgctggcgaaacaggtacaggacgggacgctactgcctgagcagatcacggaagacatgctgagtcagcaggtctgcatgcatgaactggcccccgttgatttagttattaggaccgggggagagcaccgaataagtaactttctgatttggcaaattgcctatgccgaactttactttacggatgttctttggcccgattttgctgaacaggactttgaaggtgcactccatgcctttgttaatcgagagcgtcgtttcggcggcactgagccgggtggcagtcatgcctgatgggggtcacttttgctgaagtatcgcctgatatctgctttcgtcttaatccccatcgtcattgcggcattgtttttattgccgccgatgggctttgctatcgtcaccctggtggtctgtatgctcgccgcctgggagtggggacaactgagcggttttacctcgacgtcgcagcgggtttggctggcggtgctgtgcggccttctgctggcggcgatgctttttctgctgcctgaataccactatgacgttcatcaaccgatggttgaagggtcgctatgggcctcttttgcctggtggatcgtcgcgttactgctggtgctctcatacccggcgtcagcggcattctggcgccactctaaggtgctgcgcctcatcttcggcattctgaccatcgtcccgtttttctggggcatgctggcgctgcgcgcctggcactatgccgataaccactatagcggcgcgctgtggctgctgtacgtcatgatcctggtgtggggcgcggactctggcgcctatatgtttggtaaaatgtttggcaagcacaagctggcgccgaaggtctcaccgggtaaaacctggcagggcttttttggcggtttgctgaccgcggcagtgatttcctgggcctacggcgtgtgggcccatcttgacgtcacgccgacggtgctgctggtctgttcggtggtggcggccctggcttcggtgctgggcgacctgacggaaagtatgtttaagcgcgaggccggcattaaggatagcgggcacttgattcccggacatggtggtattctcgatcgtatcgacagcctgacggcggcggtaccggtcttcgcctgtctgctactgttggtcttcaggacgatttgacggaaggttatatgctgagcgtgctctggaatctggcggcttttatcattgcgcttggcgtactgattacggtgcatgagtttggccatttttgggtggcgcgccgctgcggtatccgggttgagcgtttttctatcggcttcggcaaagcgctgtggcggcggatggataagcagggcacagagttcgtcatcgccctgatcccactgggcggctacgtcaagatgctggatgagcgtgttgaagcggtggcgccggagatgcgtcactatgccttcaacaataaaaccgtcggtcagcgtgcggcggtgattgccgccggccccatcgctaacttcattttcgctatctttgcttactggctggtctttatcatcggcgttcccggcgtgcggccggtggtgggtgaaataacgcccaattcggttgccgcgcaagcacaaattgcaaaaggaacggaacttaaagcgatagatggtatcgaaacgcctgattgggatgcggtgcgtctgcagctggtggccaaaatcggcaacccgcaaacaatagttaccgtcgcccctttcgggaccaatcagcgccaggataaaatcgtcgatctgcggcactggtcgtttgagccagacaagcaagatcccgtgacctctctggggatccagccgcgcagcgcgcagattgatacggtgctggctgaggttcaggcgggatcggcagcccagaaagcgggtttgcaagcgggcgaccggatcgttaaagtcgatggtcaaccgttaacgcagtggatgacgtttgttaatctggtgcgcgataatccgggcaaagcgctggcgctggagattgaacggcaggggagtgcgctgccgttaaccctgacgccggatgcgaaaacggtgaaaggtaaggcggaagggttcgcaggggtggtgccaaaggtcatcccgctgcctgaagaatacaagacagtacgtcagtacggaccgtttgccgccatcgctgaagccacggataaaacctggcagctgatgtcgctgacggtcaggatgctgggtaaattgataaccggtgatgtcaaactgaacaacctcagtgggccgatctctatcgctcagggggctggaatgtcagcggagtttgggttgatttattatctgatgttcctggcgctgattagcgtgaacctcggaatcatcaacctgttccctctacccgtactggatgggggacatctgctgtttttagcgattgaaaagctgaagggcgggccggtatccgagcgagttcaagactttagttatcgcattggctcaatactgctggtgctgttaatggggcttgcacttttcaatgatttctctcggttataagagagtttgttaggaagaacgcataataacgatggcgatgaaaaagttgctcatagcgtcgctgctgtttagcagcgcgactgtatacggtgctgaagggttcgtggtgaaggacattcatttcgaaggcttgcagcgtgtcgctgttggtgcggccctcctcagtatgccagtgcgtcctggcgatacggtgaccgacgatgatatcagtaacactattcgcgcgctgtttgccactggcaacttcgaggacgtccgcgtcctgcgcgatggtgataccctgctggtgcaggtgaaagagcgtccgacgatcgccagcatcactttctccggcaacaagtcggtgaaagatgacatgctcaagcagaaccttgaggcctcaggcgttcgggtgggcgagtcgcttgaccgcacgaccatcgcggatatcgagaagggtcttgaagacttctactacagcgtcggtaaatacagcgccagcgtcaaagcagtcgttacgccgctgccgcgtaaccgtgtcgatttgaagctggtcttccaggaaggcgtctccgcaaaaattcaacagatcaacatcgtcggcaaccatgcgttttcgaccgatgagctgatctcccacttccagctgcgcgatgaggtgccgtggtggaacgtggtcggcgaccgtaaataccagaagcagaagctagcgggcgaccttgaaaccctgcgcagctactacctggatcgcggctatgcccgtttcaacatcgattctacccaggtcagcctgacgccggataagaaagggatctacatcaccgtcaacatcaccgaaggcgatcagtacaagttttccggagtgcaggtgacgggcaacctcgctggccattccgcggaaatcgaagcgctgactaaagttgagccaggcgaactgtacaacggcgcgaaagtgaccaagatggaaaacgacatcaagaaactgttgggtcgttatggttacgcctatccgcgcgtgcagtcgcagccggagatcaacgacagcgataaaaccgttaagctgcacgttaacgtcgacgcaggcaaccgttattacgtgcgtaaaattcgcttcgaaggcaacgacacctctaaagatgccgtactgcgccgcgaaatgcgccagatggagggcgcatggctggggagcgacctcgtcgatcagggtaaagaccgtctcaaccgtttaggtttctttgaaacggtggatactgatacccagcgcgtgccgggcagcccggaccaggtcgacgttgtctacaaggtgaaagagcgtaacaccggtagcttcaacttcggtatcggctacggcaccgagagcggcgtcagcttccaggcgggcgttcagcaggataactggttaggtactggctatgctgtcgggatcaacggtaccaaaaacgactaccagacctataccgagctgtcggtgaccaacccgtacttcaccgtagacggtgtaagcctcggcggtcgtgtcttctataatgactttgatgcgaacgatgcggatctgtctgactataccaacaaaagctatggtacagacattacgctgggcttcccggtcaacgaatacaacacgctgcgcgccggcgtcggttatgtgcataactccctgtccaatatgcagccgcaggtggcaatgtggcgttaccttaactcgatgggccagtatccggacaacaccaacgaccggaactcgttcagtgcgaatgacttcaccttcaactacggttggacctataacaagcttgaccgcggcttcttcccaacggaaggttcgcgcgtcaacctgaacggtaaggtgaccattccgggctcagacaacgagtactacaaagcgacgctggataccgcgacctacgtgccgatcgacaacgatcatcagtgggtagtactgggtcgtacgcgctttggttatggcgatggtattggcggcaaagagatgccgttctatgagaacttctatgccggtggttccagcaccgtgcgtggcttccagtcgaacaccattggtccgaaggcagtgtacttcccggcaagcagtcgtcatgatgatgacgatagttacgataatgaatgtaagagcaccgaatccgcaccgtgtaaatccgatgatgcggtgggcggtaacgcgatggcggtggccagccttgagctgattaccccgacgccgtttattagtgacaaatatgcgaactcggtccgtacttccgtcttctgggatatgggtaccgtatgggatactcactgggattcgagcgcgtacgctggttatccggatgacagcgatccgagcaacatccgtatgtctgcgggtattgccgtgcagtggatgtcgccgttggggccgttggtcttctcctacgcccaaccgttcaaaaagtacgatggagacaaagccgaacagttccagtttaacattggtaaaacctggtaattgttggcggcaacggaatgcaagtgcagtatagcgctgactgtaggcgataacgcgtttatcgcctcgccacgcaaataacggtacccctgggtactcatgggatggtaaggagtttattgtgaaaaagtggttattagctgcaggtctgggtttggcaatggtaacttccgctcaggcggcagataaaattgccctggtgaacatgaacagcctgttccaacaggttgcccagaaaactggcgtttccaacacgctggaaaacgagttcaaaggccgcgctagcgaactgcagcgtatggaaggcgacctgcaatccaaaatgcagcgtctgcagtccatgaagccgggcgccgaacgtaccaaactggaaaaagacgtgatggctcagcgccagaccttctcccagaaagcgcaggcgtttgaacaggatcgcgcacgtcgttccaacgaagagcgtggcaaactggttacccgtatccagactgccgtacagagcgtagcgaaagatcagagcatcgatctggtggttgacgcgaatgccgttgcatataacagcagcgatgtaaaagacatcaccgctgatgtgctgaaacaggttaaataagtaatgccttcaattcgactggctgatctcgcgcagcagttggatgcagaattacacggtgatggcgatatcgtcatcaccggcgttgcgtccatgcagagcgcgaaaacgggccaaatcactttcatggtcaaccctaagtaccgtgagcacctggccgcttgccaggcttctgccgttgtgatgacgcaggatgatttaccttttgcccatagcgccgcgctggtagtgcgtaactcctacctgacctacgcgcgcatggctcaaattcttgataccacgccgcagccggctcaggatatcgcgccgagcgcggtcatcgatccgtcggcgaagctgggtagcaacgttgccatcggcgccaacgcggttatcgaatccggcgtagtgctgggcgataacgtagttatcggcgcaggctgcttcgttgggaaaaatacgaaaataggcgccggctcgcgtttgtgggctaatgtgaccgtttaccatgagattgagatcggcgagaattgcctgattcagtccagcacggtgattggcgcggatggcttcggctacgctaacgatcgcggtaactgggtaaagatcccgcagttgggtcgcgtcattattggcgatcgcgtggagattggcgcctgcaccacgattgatcgtggtgcgctggacgataccgtgattggcaacggggttatcattgataaccagtgccagattgcgcataacgtggtgattggcgacaataccgcggtcgctggcggcgttatcatggcgggcagcctgaaaattggccgctactgcatgattggcggcgccagcgtgattaacggtcatatggaaatctgcgataaggtcaccgtcacggggatggggatggtgatgcgtcctatcagcgaacctggcgtatattcctccggtattccgctgcagccgaacaaggcgtggcgtaaaaccgctgcgctggtgatgaatattgacgagatgagcaagcgcctgaaagcgattgagcgcaaggttaatcaacaagactaattcatcatttggtcacatgacatttccggcctgttgcattcgctaaaagattgccgcaggccgtgttattattgccttttagtacatttagacaggaagagtattttgactactgacactcatactctgcacattgaagagattctggaacttctgcctcaccgttacccgttcctgctggtagaccgtgtgctggattttgaagaaggtcgttttctgcgcgcagtaaaaaatgtttctgtaaacgagccgtttttccaggggcacttccctggtaagccgattttgccgggcgtcctgattctggaagcaatggcgcaagccaccgggattctggcgttcaaaagcgtcggaaaactggaaccaggcgagctgtactacttcgcgggtatcgatgaagcacgcttcaaacgcccggtagtaccaggcgatcagatgattatggaagtcactttcgagaaaacccgccgcggcctgacccgtttcaaaggcgttgcgctggttgacggtaaagtggtttgcgaagcgacgatgatgtgtgcgcgtagccgggaggcctgatacgtgattgataaaaccgcttttgttcatcctaccgccattgtagaagaaggcgccgtgattggcgctaacgtccacattggtccgttttgtattgttggcgctaacgtcgaaatcggcgaaggcaccgtgctgaagtctcacgttgtcgttaacggccacaccaaaatcggccgtgacaatgagatctatcagttcgcttccatcggcgaagttaaccaggatctgaaatatgctggcgaaccgacccgggtggaaattggcgatcgcaaccgcattcgcgaaagcgtcaccattcatcgcggcacagtacagggcggtggattaacaaaggtgggcaacgataacctgctgatgatcaacgcccacgtggcgcatgattgtacgcttggcgatcgctgcattctggccaataacgcgacgctcgcgggccatgtttcgctggatgattatgtcattatcggcggcatgacggcggtgcatcagttctgcgtcattggctcacacgttatggttggcggctgctccggcgtggcgcaggacgttccgccgttcgtaattgcccagggcaaccatgcgacgccgttcggcgttaacatcgaagggctgaaacgccgcggcttcagccgggaagcaatcaccgcgatccgcaacgcgtataaactgctgtaccgcagcggcaaaacgctggaagaagccaagccggaaatcgccgaactggctgctcagcatcctgaggttcagccgtttgtcgatttcttcgctcgttctacccgcggcttgattcgttaatggctgaacagcgtcccctgacgatagccctggtcgccggagaaacctccggcgatattctaggcgctggtctcatccgcgcgcttaaagcacgcatcccgaatgcgcgctttgtcggcgtggcggggccgctaatgcaggcggaagggtgcgaagcctggtatgaaatggaagagctggcggtgatgggcgttgttgaagtgctcggtcgcctgcgtcgcttactccatattcgcgccgatttgacccgccgcttcggcgagctgcgtcccgatgtcttcgtcggcatcgacgcccctgactttaatatcaccctcgaaggaaatctgaaaaagcagggcatcaaaaccattcactacgtcagcccgtcggtctgggcctggcgacaaaaacgcgttttcaaaatcggcagatccaccgatctggtgctggcctttctgcctttcgaaaaagcgttttatgacaaatttaacgtcccctgccgctttattggccataccatggcggatgcgatgccgctggatcctgacaaaggcgctgcgcgcgaccggttagggatcccgcacagcgtgcgctgcctcgctctgctacccggcagccgcggcgcggaagtcgaaatgcttagcgccgacttcctgaaaaccgcgcagcttctgcgcgccacctatcccgatctgcaggtggtggtgccgctggttaatgctaaacggcgggagcagtttgagcgtattaaagctgcgacggcgccggatatgatcgtgcatatgctggacggtcaggcgcgcgatgcgatgatcgccagcgacgccgcgctgctggcctccgggacggcagcgctggagtgtatgctggcgaaatgcccgatggtggttggctaccggatgaagccgttcaccttctggctggcgaagcggttggtaaaaaccgactacgtctcgttaccgaacctgctggcgggtcgcgaactggttaaagagctgctgcaggatgagtgcgagccccaggcgctggcagccgctctgcagccgctgctggccgatggcaaaaccagccatgagatgcatgagacgttccgcgccctgcatcagcagatccgctgcaacgccgatgagcaggcggcggacgccgtactggagttagcaaaacaatgatggagttcgtctatccgcatacccatctggttgccggcgtcgatgaggtcgggcgtggccccctggttggcgcggtggtgaccgcggcggtgatcctcgatccggcgaagccgattgtgggtctgaatgattccaaaaaactcagcgagaagcgtcgtctggcgctgttcgatgagattaaagagaaagcgctgtgctggagcctggggcgcgccgagccgcacgaaatcgacgagctgaatattctgcatgccactatgctggcgatgcagcgcgccgtcgccggcctgagcattgttcctgagtttgtcctgatcgatggcaaccgctgtccgtcgctaccgatgccctcccaggcggtggtgaaaggcgacagccgggtggcagaaatcagcgcagcgtctattctggcaaaagtcactcgtgacgccgaaatggccacgctggacctcgcatttccccactacggatttgcccagcataaaggctatcccaccgctgttcacctgcagaagctgcaggaacacggcgcaacagagcatcaccggcgcagttttggcccggtgaagcgtgccctgggcctggcgtccaactaagtcaccgggatctaaagatggctgaaccacgtttcgtacacctgcgggtgcacagcgactattccatgatcgatgggctggcaaagaccgggccgctggtgaagaaggcggcctcgcttggcatgccagcgctggcgatcaccgatttcaccaacctctgcggactggtgaagttctacgggacgggacacggcgcggggattaagccgatcgtcggcgccgactttcacgtgcagtgcgacctgctcggcgacgaatttaccgagctgaccgtgctggcggcgaacaacaccggctaccagaacctgaccctgttgatttcccgcgcctatcagcgcggctacggcgccctggggccgtggatcgatcgcgactggctggtggaacatcaggaagggctgattctgctctccggcggccggaaaggtgacgtcggcgtcagcctgatccgcggcaatatgccgctggttgaacagtgcgtcgccttctacgaagagcatttcccggaccgctattttctggagctgatccgtaccggtcgacaggatgaagaggcctatctccacgccgccgtggcgctggcggaagcgcgcggcctgccggtggtggcgaccaacgatgtccgctttctcgacaccagcgatttcgacgcccatgaaatccgcgtcgcgatccacgacggctttacgctcgacgacccgaaacggccgcgcaactactcgccgcagcaatatatgcgcagcgaggaagagatgtgcgagctgttcgccgatattccggaagcgctggcgaacagcgttgaaattgccaagcgctgcaacgtcaccgtgcggcttggcgaatatttcctgccgcagttcccgaccggcgatatgaccacggaagatttcctggtcatgaaatcgaaagagggtctggaagagcggctggaattcctcttcccggatcctgccgtccgtgctgaaaagcgcccggagtatgaccagcgtctggatattgagctccaggttatcaaccagatggggttcccgggctacttcctgattgtgatggagtttatccagtggtcgaaggataacggcgtgccggttggcccgggacgtggttccggcgccggttcgctggtggcctacgcgctgaagatcaccgatcttgacccgctggagttcgacctgctgttcgaacgtttccttaacccggaacgtgtctcgatgcccgacttcgacgtcgacttctgcatggagaaacgcgaccaggttattgagcacgtggcggatatgtacggccgcgacgcggtatcgcagatcatcaccttcggtaccatggcggcgaaagcggtcatccgcgatgtcggtcgcgtgctgggtcacccgtacggatttgtcgatcgtatctccaagctggtgccgcccgatccgggcatgacgctggcgaaagccttcgaggccgagccgcagctgccggagatctacgaggcggacgaggaagtgaaggcgctgatcgacatggcgcgtaagctggaaggggtgacgcgaaacgccggtaaacatgccggtggggtagttatcgctccaaccaaaatcaccgatttcgcgccactgtattgcgatgagcaggggctgcatccggttacccagtttgataagaacgacgtggaatacgccgggctggtgaaattcgacttcctcggtctgcgtacgctcactatcattaactgggcgctggagatgatcaacaagcgccgtgagaagaacggcgaagggccgctggatatcgccgccatcccgctggatgacaagaaaagcttcgacatgctgcagcgctcggaaaccaccgcggtcttccagcttgaatcgcgcggcatgaaagatctgattaaacgcctgcagccggactgcttcgaagatatgatcgcgctggtggctctgttccgcccgggcccgctgcagtcggggatggtagataactttatcgaccgtaagcatggccgcgaggagatctcttatccggacgtgcagtggcagcatgaaagcctgaaaccggtgctggagccaacctacggcatcatcctgtatcaggaacaggtcatgcagattgcccaggtgctgtccggatacaccctcggcggcgcggacatgctgcgtcgtgcgatgggtaagaaaaagccggaggagatggccaagcagcgttctatctttgaggatggggcgaagaaaaacggcattgacggcgaactggcgatgaaaatcttcgacctggtggagaaattcgccggttacggatttaacaaatcgcactccgccgcctacgcgttggtctcctaccagacgctgtggcttaaggcgcactacccggccgagtttatggcggcggtgatgaccgccgatatggacaacaccgagaaagtggttggcctggtggatgagtgctggcgaatggggctaaaaatcctgcccccggatattaactccggcctgtaccatttccacgtcaacgacgatggcgagatcgtctacggcattggcgccatcaagggcgtcggcgaaggaccgatcgaagcgattattgaggcgcgcaacaatggcggctatttccgcgagctgttcgacctctgcgcgcgaaccgatattaaaaagctcaaccgtcgggtgctggaaaagctgattatgtccggggcgttcgatcgtctcggcccacatcgcgcggcgctgatgaattcgctgggcgatgcgttgaaagccgccgaccagcacgcgaaagccgaggccatcggccaggctgatatgttcggcgtgctggcggaagagcccgagcaaattgagcaatcctacgccagctgccagccatggcctgagcaggtggtgctggatggtgaaagggagaccctggggctatacctcaccggacacccgattaaccagtatctgaaggagattgagcgctacgtcggcggcgtgaggctcaaagacatgcatccgaccgaacgtgggaaagtcaccacggcggcggggctggtgattgcggcgcgggtaatggtcaccaagcgcggcaatcgtatcggcatctgtaccctggatgaccgttccgggcggctggaagtgatgttattcaccgacgcgctggataaatatcagcagttgctagaaaaagaccgcatacttatcgtcagcggacaggtcagctttgatgactttagcggggggcttaaaatgaccgcccgtgaagtcatggacattgacgaagcccgggaaaaatatgctcgcgggcttgctatctcgctgacggacaggcaaattgatgaccagcttttaaaccgactccgtcagtctctggaaccccaccgttcgggaaccattccagtgcacctctactatcagagggcggatgcacgcgcgcggttgcgtttcggcgcaacatggcgcgtctctccgagcgatcgtttacttaacgatctgcggggccttatcggctcggagcaggtggaactggagtttgactaatacaggaatactatgagtctgaatttcctagattttgaacagccgattgcagagctggaagcgaaaatcgattccctgactgcggtaagccgtcaggatgagaaactggatattaacatcgacgaagaagtgcatcgtctgcgtgagaaaagcgtagagctgacgcgcaaaatcttcgccgatctcggtgcatggcaggttgcgcaactggcgcgccacccgcgccgtccttacaccctggattatgtccgcctggcgttcgacgaatttgacgaactggccggtgaccgcgccttcgctgacgataaagcgattgtcggcggtatcgcgcgtcttgacggtcgtccggtgatgatcatcggccaccagaaaggtcgtgaaaccaaagagaaaattcgccgcaactttgggatgccggcgccggaaggctaccgcaaagcgctacgcctgatggagatggctgagcggtttaaaatgccgatcatcacctttatcgacaccccgggcgcctacccgggcgtcggcgcggaagagcgtggccagtcggaagcgatcgcccgcaacctgcgtgagatgtcgcgttctgatacaaatatgaccctgcagacgctcgccacatggccgctcctgtctgatccacatgccgca

SEQ ID NO: 174 - DNA, 34652 bp, Unknown
  source: /note="Description of Unknown: MKP2_2161_1 Mutant Bacteria sequence"
taggcctgccgccagcgttcaatctgagccatgatcaaactcttcaatttaagtttgatgctcaaagaattaaacttcgtaatgaattacgtgttcactcttgagacttggtattcatttttcgtccgaggacgttaagaatccatgtcactttgagtgcccacacagattgtctgataaattgttaaagagcagttgcgacgcgctttagcgctctgtcgcgaggtggcgtatattacgctttcctctttcagagtcaacccgtttttcaggatttttctctgcaaccgaaccggctgtttgtgtgaagtgattcacatccgccgtgtcgatggaggcgcattatagggagttctcgagcgtccgcaatagaaaaatggcagaaaaatgactgactgctgcattccccagcaaaaccccgctttatacctcgttacacacagaattatccacaggagagcgtaaaaacatgaccgctagccccgtggatcgccagctatatagaaggagaatcaccggcctggagagaaacataaaaattcgcgagcgttgcgcaaacgttttcgttacaatgccgcgctatgacacggatgcccggttgggtgcgttaggtgagtttttaggcaaaaactcacctaacgctctctgtaatgttcaaatcctggggatttaataccatgcaacaacgtcgtccagtccgccgcgctctgctcagtgtttctgacaaggccggtatcgtcgaattcgcgcaggcgctttccgctcgtggtgtcgagctgctgtccaccggcggcaccgctcgcctgctggcagataaaggcctgccggttaccgaagtctctgactacaccggtttcccggaaatgatggatggacgcgtgaagaccctgcatccgaaagtacacggcggcatcctcggtcgtcgcggtcaggatgacggtatcatgcagcaacacggtatcgcgcctatcgatatggttgtcgtgaacctttacccgttcgcccagaccgtcgctcgtgaagggtgctcgctggaagacgcggtggaaaacatcgatatcggcggcccgactatggtgcgctctgcggcgaagaaccataaagatgtcgccatcgtagtaaagagcagcgactacgacgccatcattaatgagatggacgccaacgaaggttccctcacgctggccacccgcttcgacctcgccattaaagccttcgaacacaccgccgcttacgacagcatgatcgccaactacttcggcagcatggttccggcctatcacggcgaaagcaaagaagccgctggccgcttcccgcgtaccctgaatctgaacttcattaagaagcaggatatgcgctacggcgaaaacagccaccagcaggcggctttctatatagaagagaatgtaaaagaggcctccgtggcgaccgccactcagctgcagggcaaagcgctctcctataacaacattgccgataccgatgcggcgctggagtgtgtaaaagagttcaacgagccggcctgcgttatcgttaagcacgccaacccgtgcggcgttgccgtcagcaactcgattcttgacgcctacgatcgcgcttacaaaaccgacccgacctccgcgttcggcggcatcattgcctttaaccgcgagctggatgctgaaaccgcgcaggcgatcatctctcgccagttcgtcgaagtgatcatcgcgccgtccgccagcgaagaagcgctgaaaatcaccgccgcgaagcagaacgtccgcgtactgacctgcggccagtgggatactcgcgttgccggcctcgatttcaaacgcgttaacggtggtctgctggttcaggaccgcgatctcggcatggtcaccgcaggtgaactgcgcgtggtcagcaaacgtcagccaaccgagcaggaactgcgcgatgcgctgttctgctggaaagtggcgaaattcgtcaaatccaacgccattgtgtatgccaaagataatatgaccatcggcataggcgccggtcagatgagccgcgtctactcggcgaaaatcgccggaattaaagccggtgatgaaggtctggaagtgaaaggttccgccatggcctctgacgctttcttcccattccgcgacggcatcgatgccgcagccgcggtaggcatcacctgcgttattcagccgggcggctctatccgtgacgacgaagtgattgccgccgctgacgaacacggcatcgccatgatcttcaccgacatgcgccacttccgccattaattcatggagcagcagatgaaagtattagtaatcggcaacggcgggcgcgagcacgcgctggcctggaaagcggctcagtcgccgctggttgataccgtctacgtcgcgccgggcaacgccggtaccgctctggagccgtcgctgcaaaacgtcgccatcggcgtcaccgatattccggcgctgcttcgcttcgcgcaggatgagaacatcgatctgaccatcgttggcccggaagcgccgttggtcattggcgtggtcgacgcgttccgtgccgccgggctgaacatcttcgggccaaccgaaggcgccgcgcagctggaaggctcaaaagccttcaccaaagattttctcgcccgtcatcatattccgacggcggaataccagaacttcaccgaagtggagcctgcgctggcttatctgcgcgagaaaggcgcgccgatcgtcatcaaagccgacggtctggcggcgggtaaaggcgttatcgtggcgatgaccctcgaggaagccgaagcggcggtcaaagatatgttggccggcaacgcctttggcgacgcaggccaccgcatcgtgattgaagagttcctcgatggcgaagaggctagctttattgtgatggtcgacggcgagcacgtcctgccgatggccaccagccaggatcacaagcgcgtcggcaacggcgataccggcccgaacaccggcgggatgggggcgtactccccggcgccggtggttactgaggaagtccaccagcgcaccatggagcggattatctggccaaccgtgaaaggcatggccgctgaaggcaacacctataccggtttcctctacgccggtctgatgatcgacaagcagggcaacccgaaggtgattgagttcaactgccgctttggcgacccggaaacccaaccgatcatgctgcgcatgaagtccgacctggtcgagctgtgcctcgccgcctgcgcgggcaagctggacgagaaaacctccgagtgggatgaccgcgcgtcgctgggcgtggtggttgccgccggcggctatccgggcagctacaatacgggcgatgagatctacggcctgccgcagcaggaagtcgcagacggtaaggtcttccacgccggcaccaaactgtctgacgaccagcgcgtggtcaccaacggcgggcgcgtgctgtgcgtcaccgcgctgggtgactccgtagcgcaggcgcagcagcgcgcctatcagctgctgaccgacattcgctgggacggtagctttagccgtagcgatatcggctggcgcgccatcgaacgtgaaaaggctaacggctaagtttcgccagcagcgttttgcgcgtaatgcctaactgacgggcggcttcagttttgttgccgcccgttttttccagcgccgccagaatcacctctttctccacttccactaacggctgaattcccccctcctcgctcccgcctgatggcagcggcgtaccggcgatcgccaggggcagttctcgctcagagatatagtttccggtcagtagcaccaccgcccgctccaccgcgttttccagctcgcgaatattgcccggccaggggtagtggatcagcaggtccatcgcctgtggcgtgaacccctttaccgtcttacgattgcgttcggtatagcgtttgagaaaatgctgcgccagctgcggaatatcttcccgtcgccggcgcagcggcggcatatcaatagttacgacattcaggcggtaatagagatcctggcgaaaacgcccggcgctcacctcctccgccagattacgatgggtggcggcgattagccgcacatcgacagaaagcgtctgattactgcccacgcgctgcacttcgcgttcctgaatcgcccgcagcagacgcacctgcatcagcggcgagatatcgccaatttcatcaaggaacagcgtgccgccatccgcctcgacaaagcgtccttcccgtcgccgatccgccccggtaaacgcccctttttcatggccgaagagttccgactccagcagtgactcattcagcgccgcgcagttgagcgtgaccaacggcttgtcacgacgctcgctgcaggcgtggatggcgtgcgccaccagctccttaccggttcccgactccccataaatcagcaccgtcgcgtccgaaggggccaccagcgtaatatcgttaagaagcgcctgcatcgccgggctgtcgccaatcatgccccaccgtgaatccgtcgcaacgctggggtcgctctcgctctgccgggtgtgcgccaatgcctgaaccagcgtctgctgcagggtgtcaaaatccagcggtttaaccagataatccagcgccccggacttaatagcttctaccgccgtaccgacgctggaaaacgccgtcatgatcagcaccggtatcgccgggttataggccttaatctcttttaacgttgcgataccgtccatctccgccatacggatatcgcacagcaccaggtcgaagacctgctgatggatctgctccagcgcctgcaggccgttgtgagccaaccccacctgatagccccagccgcgcagcagcgcctgcaggatcgtgcagtggctgatgtcatcatcaacgaccagaatctgtactttatcgctgctcatcttccctccgttgagcatccaccggtaaccaaagcgtaaatatcgctccagctcccggctgactttcggcgcggatcgtcccgccatgttgttcgataatattctgcactacggccagccccagcccggtgccgtccgccttggtggtgaaatacggcgtgaagatagcctgtaactcttcatcgctcatccccttaccgctatccgtgacgacgattttcacccgctgacgatcggcttcgcttgctgttacgcgaatgacgccgtcacggccaatcgcctgcattgcattcagatacagattcaacagcacctgattcaggcgatcggggtcggcgctgatcgtggttaactcaggtcgcggagtaaattgcagcgcgatcccgcggctctgcgcatcctggcttaccaactgcaatgagtggcggataagcgcgttgatatcgactgtctggtagtttagatgggcgggccggaccagctccagcagctcgctgaccacccggttcaggcgatcagcctctttggccatcacctgggctaactgatgcgactcgccgccaggcgacgtgcgctcggcaaaatatttcgccagccctttaatcgacgagagcgggttgcggatctcgtgcgcgacccccgccgccagatggccaagcgccaccagcttttccttgcgggccatcgcctccagcagctgtttccgcgagcgacgatagcggcggaaccagaactgagcgaggatcgtcgccgctatcaccagcgcggcggcacccagcatgatggccatatttcgctgcccgcgggcctgcgcggcatccagctcgcggctatcaaaggcgataaaaatcacctgcgggacgatggcctgagccagggcgctattgccgcggttcatcattcccatatggtggccgcgggccggattaagcgggcgaaaatggcgatagatctccagcgccggctgcggttcgctaagccggcgccagcgggcctgttcgccaaccgctaacgcacgcatctgcgccgggctatacagcgttttacccacctgctgcggatcgctatgggcgatatttttaccgttttcatcggtcaccgcgaaccacaggacgcccggttgccaggccatctcttccagcagggcctgcagctgcgcatgatgcatacgcatccccatcccgacgcgcgtgccggactccagcgcgcggatcagcacgctccctttctcttcaatggtttgtcgggcagcggtcgtctcgcgaccgtagtcgcggacgatcatcgcggagaacagcatgaccagcagcacaaccgtgccggtcagcagccagctcagcgcgccagcggcggcgtcccgggagagagatttgatcttcatcggcgagtccttgtcatctctttttcactatctgcaggctccttcagcagaaatcatgccatgtttccgcgcggccaatcctgctctcaaacatatcgcctgcgcttaagcgagtaaaaatgactcgcctgaccctggcggaacgggtcatttttactcgctctcctcggcaaaggcttcggcaggcccacacagacgggctttttcagactggcatggaagatgcaataccgagggaaaccacacaggagaaaatgccatgaaacggaaccgtaccttacctctcgccctcgttacctttgccgcgctgaccttcgccagcaacgcggcctgggccaaccaccactggggcaacaataacgggatgggcaaccagggctacagtcagctgacccaggagcagcaggctaccgtgcaaaagctgcataacgattactatgcgcaaaccagcgccctgcgccagcagctgcagtccaaacgctatgagtacaaggcgctgctcacggcgcaaaagccggacagcgggaagattgaagctgtcgctcaggagatggaaggcttacgccagaagctggatcagcagcgggtgaagtttgatatcgccctggctgaggcaggcgttccccgcggcgcaggaatgggatatggcggctgtcgcggtagcgccggcggtcatatgggcatgaaccactggtaaaggttagaagcttttttccgtcggctgccaggtgcagaagttttcattggcgaccagcagcagttgagagccttccggcgcctccagccaggcaatgctcactgcggcggaagcgtggctctggcggcgttcaatgtgcgccagggcccggctatcgaggtcgggcgtaaccgtctgcccttcgcaggtcagcacggtatgcgcggcagcgttccagcgcccctgccgcaggacgacccgcccctggcggagggcgtcgctggtctggcggatctgttcggcgcgataacgatatagcgcgacctggtcgctggagagctgctgcttctgcccgtccacttcccgttgcataaagctcagatcgccctgcgcgtcgaaacgggcgcgaatatgttccggcggtttgccatagacattgagttcgataagcgccagttgatcgccctgccagcgatattcgctggtcgaagtgtccccgtgacgccacgggctgaaggcggcgagaagatggacttcatcgccagaatctttacgccagatgcgcatcgctccctgattgtccgcatatccgctggcggtaaacggcggtagcgacgtgtcgtggctgcaggcagtcagcaacaggatgcccgccagcgccagaggccggcgccagacagacaaaaggggcttaatagccccttcgataaaactgttcactgccacgcggtcttacttaactgcgtctttcagtgctttgccagaaacaaatgccggcacgttagctgcagcgattttgatctctttaccggtctgcgggttgcggccagtacgctcagcgcggtggttcactttgaaggtaccgaaaccaaccagttgaacagcatcaccttctttcagagactcagtaattgcagccagggtagattccagggcagctttagcctgtgctttggacaggtcagctttgtccgcaattacatcaatcagttgagtcttgttcataagttatccttacaatgtgtttatcgcttgctaagcatcgagtgcgacggaaatgccaaaaaagcaccctcctgcatacacgcaccgatagccactttttttcgccctccaaatgtagaccagacggggggcggaatggaagccttcagacgctacaattcaggcggtaaatcacgttttctggtctcactgctgaaaatttataccaatattgctctcgccagcctcgcgcaggtccgcgcgcaggccttttatcagctcaagatcacgctcttcacagtcggccagcaggcggaaaatttcccactgaatatcccattcctgctctaccgccggattcgctttcaactcttcgtcggtcatttcgcgaccttcctgggtcatttccagcatcgccacggtggtgatggaggtcttgctcacctcgatcgcgtgctcgagcgtttcgccgctcagacgagaatgaatcagttcactcaacgccacgcaagcgtctatggccggatagacaccgtacatgtcgaaatcatctgccgccgggatcgcctcttccagcttctccagctggctgtcgaaattcaccttcgcatctttaaccgtcagcgtttcccagatcaggtccaggatacgacgataaagcaggccgtcgccaaactcggtttgcttgcagaacatcgcgtagttgggatacatacgttcgcacaggcaggccataaaagtgacatgctgccagctttccagcttctccaggcgcaggtgaatcgggttttgtaacatgatgaattctcgaagtcagaaattaggcgcagtgtacctgaatcagctgtgatttgcttgccaacgcacaaacgacggacgacgggacgccaccgcatcggcccagcgcgtcggctcgggcagacggtagcctcgcatgcaacgctcaacccacattaaagcgctgtccatgcctaccctgtggccggtgctaataaacagcgggttgcagcgcactttgctgcgccagacccaggccagttgctcatttttatccatcagcggggccagcgcgccaggctcatcacccaggtcgccgattttgccgcacaggcgttttttcgccactccgatagtcggcacatcaatcatcaggccaaaatggctggcgacgcccaatctccggggatgagaaatgccgtgtccgtcaacgaagagcaggtccggtttttgcgaaagctgctcccacgccgccagcagcgcaggcgtttcgcgaaacgagagaaagccgggaatatagggcatagaggtggcgacccgcgccacctggtactccaccagctcaagctcaggccaggtcagcagcaccatcgcagcccgggtgatctccccttcctgctcaaacccgacgtccgcgccgccgatcaacgccggcgggtcgcgatccagtcgatccgcacgctctaccgacgcggctaactgttgctgttgggtacgtagtgcggctaaatccatagggcttatctcctactggtgatagggtgcggacagacggtgcacagcctcaacaaagacgcccgcatgctcggggtcaacgtcctgatgaataccgtgtccaaggttaaagacgtggccttccccctggccaaagccggcaagaatggtcgccacttcttcttcaatacgcggggcggacgcatagagcatcgacggatccatattgccctgcagcgctactttgttacccacgcgacggcgagcatcggcaatatcggtggtccagtcgagacccaacgcatcgcagccggtctccgccatcgcttccagccactgaccaccgcctttggtgaacagggtcaccggcacgcggcggccttcgttttcccgcagcaggccatcgacgatcttatgcatgtagtagagggagaactgctgatagtcgcggccggtcagcaccccgccccaggtgtcaaaaatcatcaccgactgcgcgccggctttgatctgcgcgttgagatacagggtgacgctcttcgccagcttatccagcagcgcatgcagcgcctgcggctcggcgtacatcatctttttaatcacggtgaaagccttgctgctgccgccctccaccatgtacgtagccagcgtccatggactaccggaaaaaccgatcagcggcacttcgcctttcagttcgcggcgaatggtgcgcacggcgttcattacatagcccagctcctgctccggatccgggatcggcagcttgtcgacgtcggctttactttttaccggcgaggtgaagcgcggaccttcgccagcttcaaagtacagccccagccccatggcgtccgggatggtcaggatgtccgaaaagaggatcgccgcgtccagcgggtaacggcgcagcggctggagcgtcacttcgcaggccagctcggcatttttacacagcgacataaagtcgcccgcttgcgcacgggtggctttgtactccggtaaatagcggcccgcctggcgcatcatccacaccggggtgacatcaaccggctgacgcagcagcgcgcgcaggtaacgatcgttcttcagttcggtcatttttacattcctttagcgttgatacgcccagtgtaacatgtcactcgaactctgcccgacacatcgcgacggtatcttcgataagccgccgcgccactgtccccggcggcggcagaagcggcaggtcgtcatagcgataccagtccgcggtcagtaactcttttttgtcgaccacgatctcgccatctgcgtaatccgccataaaggcggtcatcagcgactgcgggaacggccatggctgagaggtcacgtaacgcagattttttacccgaataccgctctcctccatcacctcgcgagccaccgcctgctcaagggtttcgccgacctcgacaaagccggccagcacggtgtgcacgccgttgcgatggcgcgtatgttgcgccagcaggatcgcatcgtcgcgacggattgccacgataatgcagggggcaattggcgggtagtaacgttcgcggcagtggctgcacagcatcgcccattcgcttttgctggcatgcatcgggtggccgcagtaaccgcaaaatttatgcgagcgataaaattcggcgagctggatcccccgcccagccagctggaagagtcccggatcctgatccagcacctggcgcaacgatcccatgtcatggcgacgatcctggcgcaccatccacacggactcgccctgccactcgccaatatgcagcgcatgctggccgacaagatcgaaattaaccgcttcgccatgtggtaattctccaccaggcaaccataatttttgttcgtgactgacaacccaccagccgcgatctaatttttcaataatacgatccatatctattgcactacctttgcttcactggcatgttgttaacattatatttacattttggtgagcagatttaaatcaaaactagcggagtcaatcatgctaaaccagctggaaaatctgacggagcgcgttggcggtagtaatgaactggtcgatcgctggctacaagtgcgtaagcatctgctcgtggcttactacaacctggttggcctgaaaccgggcaaagagtcgtttatgcggctaaacgaaaaggcgctggatgacttttgccaaagtctggtggattacctctcatccggtcattttagtatttatgaacgcattattggcgaaatggaaggcgatacccctcttttagccgccacccggctttacccgcagctggaagccaatacccagcagatgatggactactacgatacctgcctcgaaaacgccatcgatcacgataactatcttgaatttcagcaggcgctgtcggatatcggcgagtcgctggaggcgcgtttcgcgctggaagataaactgatcgccctggctgtcgcccataacctgagcaatgacgtgcgcgataatattgcgccgaccgcttgagttgtgaaccgttaacgcgtaatttacgtacattatccctctgcggagggatttcatcttgtcggagtgcctattttccatgcgcaggctaacgtggaaaaggctgagaccgttaattcgggatccgcggaacctgatcaggctaatacctgcgaagggaacaagagtaaactgctgttcgcgtcagtccgtcagggccgatcgcatctgttactccatccgtcgtctgacaagccatgtccttttttaactggaatgcgctatgtctactaccaaactaacccgtcgggaacaacgcgagcacgcgcagcgattcattgatacgctggcgggtaccgcttttcctaattcacgccgcatctatgttcacggctcacaagcggatatccgcgtcccgatgcgtgaaattcagctcagcccaactctcgtcggcggcgataaagataacccccggtacgaaaccaacgaaccgatcccggtgtatgacacctccgggccgtatggcgacccggatattagcattgatgtccgccaggggctggcaaagctgcgccagccgtggatcgacgcgcgtaacgactgcgcgccgctcagcgaacgcagctcggcctataccagagcgcggctggccgacgacggtctcgatgagctgcgcttcagcggcctgctgacgcccaaacgcgccgtcgctggcaaatgcgttacccagctgcactacgcccgccaggggatagtcaccccggagatggagttcatcgccattcgcgaaaacatgggtcgcgaacgtatccgcagcgaggttctgcgccagcagcacgcaggtgaaggcttcggcgcccaccttccggaaaacatcacccccgagtttgttcgcgatgaagtggccgccggacgcgccatcatccccgccaacatcaaccacccggagtctgaaccgatgattatcggccgcaacttcctggtgaaagtgaatgccaatatcggcaactcggcggtgacctcttccatcgaagaagaggtcgagaaactggtctggtcaacccgctggggcgccgacacggtgatggacctctccaccggccgctatatccacgaaacccgcgagtggatcctgcgcaacagcccggtgccgattggtaccgtgccgatttaccaggcgctggagaaggtcaacggcatcgccgagaatctcacctggcaagtcttccgcgataccctgctggaacaggccgagcaaggcgtcgactacttcacgattcacgccggcgtactgttgcgctacgtcccgatgacggcgaagcgcctgaccggtatcgtctcgcgcggcggctcaatcatggctaagtggtgcctgtcgcatcatcaggaaaacttcctctaccagcatttccgcgaaatctgcgaaatctgcgccgcctatgacgtgtcgctgtcgctgggcgatggcctgcgccccggctccattcaggatgccaacgacgaggcgcagttttccgagctgcgcaccctcggcgaactgacgaaaatcgcctgggaatatgacgtgcaggtgatgattgaaggccctggccacgtgccgatgcagatgatccgccgcaatatgaccgaacagctggagcactgccacgaagcgccattctacaccctggggccgctcaccactgatatcgcgccgggctacgaccatttcacctccggtatcggcgcggcaatgatcggctggttcggctgcgccatgctgtgctatgtcacgccgaaagagcatctcggcctgcccaacaaagaggatgtcaaacaggggctgattacctacaaaatcgccgcccacgccgccgacctcgcgaaaggccatcccggggcgcagatccgcgacaacgcaatgtcaaaagcgcgttttgaattccgctgggaagaccagttcaacctcgcgctcgacccgttcaccgcgcgggcctatcacgatgaaaccctgccgcaggagtccggcaaagtcgcccacttctgctccatgtgcgggccgaaattctgttcgatgaaaatcactcaggaggtccgcgactacgccgcgaagcaaagtatagaagccggcatggccgatatgtcgaataacttccgcgcccgcggcggcgaaatctacctgaaacaggaggaagcctgatgtatcaacctgattttccacccgtcccgtttcgtctcggactctacccggtggtggacagcgtggcgtggattgagcgcctgctcgaagctggggtacgtacccttcagttacgcatcaaagaccggcgcgacagcgaagttgaggatgacgtgatcgccgccatcgcccttggtcgccgctatcacgcccgactgttcattaacgattactggcaactggcgattaagcaccaggcctatggcgtgcatctcggacaagaagatctggaaaccaccgatctgagcgctatccgccaggccgggctgcgtcttggcgtctctactcacgatgatatggaaattgatgtcgcccttgcggcacgcccctcttacatcgcgctaggtcacgtcttcccgacgcaaaccaaacagatgccttccgcgccgcagggcctcgagcagcttgccagacatattcaacgcctggcggattaccccaccgtggcgatcggcggaataagcctggaaaaggcgccgggggtactggcgaccggcgtcggcagcatcgcggtggtcagcgccatcacccaggcggcggactggcgggcagcgaccgaccaactgctggcgctggcgggagcgggcgatgaatgatcacgactttatgcgctatagccgccagctgctgctggaggatattgccatcgaagggcagcagaagctgttagccagtcgagtgctgattatcggccttggcgggctgggctccccggcggcgctctatctggccggggctggcgtcgggacgctgaccctggccgatgacgacgcggtgcatctcagcaacctgcaacggcagatcttgttcaccagcgcggatatcgatcggccaaaagccgcagcggcacagacccggctcagccagctaaacccgcagatcaaactggtagcgctccagcagcgcttaagcggcgaggcgctccgcgccgaagtggcgaaagcggacgtggtgctggactgtaccgataatatggtcacccgccaggcgatcaatgccgcctgtgtggccctcgataccccgttagtgaccgccagcgccgtgggcttcggcggtcagctgatggtgctcaccccgccctggacgcagggctgctatcgctgcctgtggccggaaagcgatgaaccgcagcgcaactgccgcaccgcggggatcgtcggcccggtggtcggcatgatgggcaccctgcaggcgctggagacgattaagctgctcagcggcatggcgacgccgcgcaacaccctgcggctgttcgacgcccgcaccagcaactggcgcgcccttgcgctacagcgttcccggagctgcccggtgtgcggagggcggcatgcagatctggtttaacgacgagccgctggcgtgcgccgacaatctcagcgtcagcgccctgctgacccagctcgaacaacagcagccgggcgttgcgctggcgcgcaatcaacacatcctgccgcgcgaccggtgggaagatcatctcttgcaggaaggcgatcgggtcctgctttttcaggttatcgctggaggctgacatgttacgtattgcagacaaaacgtttgaatcccatcttttcaccggtaccggcaaattcgccgccccggaggtgatggtcgaggcgattcgcgcctcgggcagccagctggtaaccctggcgatgaagcgcgtcgatttacgccagcgcaatgacgccatcctcgccccgctgctggcggcgggagtcagcctgctgccgaatacctcgggcgccaagacggcggaagaggcggtgtttgccgcccgtctggcgcgggaagccctgggtacacactggctgaagctggagatccacccggacgcccgctggctgctgcccgacccgattgaaaccctgaaagcggcggagctgctggtccgcgaagggttcgtggtgctgccctactgcggcgccgatccggtgctgtgtaaacgactggaagaggtgggctgcgcggcggtgatgccgctgggtgcgccgatcggctccaatcaggggctggaaaccaaagccatgctggagattattatcgagcaggcgacggtcccggtggtggtcgacgccgggatcggcgtcccgagccatgcggcgcaggcgctggagatgggcgcggacgcggtgctggtcaataccgccattgccgtcgccgacgaccccgtggccatggcccgcgccttccgtatggcgatcgatgccggattactggcgcgtcaggccggaccgggggcacgcagtacgcaggcgcaggccaccagcccgctcaccggattcctggaggcgctggcatgaaaacctttagcgatcgctggcggcagctggagtgggacgatatccgcctgcgcatcaacagcaaaaccgccgccgacgtcgaacgggcgctggcggccaaacagctcacccgcgatgatatgatggccctgctctcgcctgccgcggccaattaccttgaaccgctggcccagcgcgcgcagcgcctcacccggcagcgcttcggcaataccgtcagcttctacgtgccgctgtatctctccaacctgtgcgctaacgactgcacctactgcggcttctcgatgagcaaccgcattaagcgcaagacgctggatgccgccgagattgtccgcgagtgcgccgcaatccgcaacctgggctttgagcatctgctactggtgaccggcgaacatcagggtaaggtgggaatggattatttccgtcagcacctaccggctatccgcagccagtttgcctcgctgcatatggaggtgcagccgctggcgactgaagagtatgccgagctgaaaaccctggggctcgacggggtgatggtctatcaggagacctatcatgaaagcatgtacgccaaacaccatctgaaaggaaaaaagcaggatttcttctggcggctggatacgccggatcgcttaggcgcggcggggatcgataagatcggccttggcgcgctcatcggcctttccgacagctggcgagtggactgctttatagtcgctgagcacctgctgtggctgcagcagcgctactggcgcagccgctattcggtctccttcccgcgcctgcgtccctgcgccggcggtattgaaccggcttcgctgatggatgagcgccagctagtgcaaactatctgcgccttccgcctgctggcgccagaggttgagctgtcgctatccacccgcgaatcaccctggttccgcgaccgggtgatcccgctggcgatcaataacgtcagcgccttctctaaaacccagcccggcggctacgccgacgatcatccggagctcgagcaatttgccccgcacgacgatcgccgccctgaagagatcgccagcgcgctggccgcccgcggcctgcagccggtatggaaagactgggatagctggctgggacgcgcttcgcaaacctcatgatgtacagtgtaaacgcctgataattttgcgcgcctgcacgagagatgaaaaacggaggctggcccgcccgacgccgtttttctattctgcccgggtcagcagcggacgctgaccagggcgaaccttttcttcctcattttcgccctgcctctccgcgctgagcagaggcctgcacattatcgccgaatataaatcacgatacatgaaggcctcagagttataattgagcaatagtgaactgattcgatcggcaggcgtcccagacgcaacctgcgttcggacccatggtttatacatccgggacgattaacgattcatggctctacacaacagaaagctctcttttacgacgccgatcgtcgtggggtttgccggtattttgctcagctttatgctgatcgctatttttgtgactctggcgcaacagaaagattttctcgaagattatcacgatattaaccgcaattttacccataacctggcgatcaactatacggaaaccctgctgcgggaaaatgattttatcctcgggcgcgcagccgccttctttgcccgcaatgacgaactgaatcgcgcagtcaatgtggagccggagaaagggttaaccacgctgatgcagttacagaacatgatgccaagcgtctcatccatctcgctggcggataccgagggccactatctgcgcgccccggaggtgctggaaaacgaagacagccgggctttcgatcccagaacgcggccctggtttatcaaacaggcggaagccagcaccttcagccactacaccagtccgtatatggattatttcaccccccatccgacgattaccattttcaaacccatcattcccccggaagggaaactcaagggcagcctggcctttcatctcgatctcacctccatggggttcgcgctgcgccagatggtggcgcccgtacagggggaattttttgtggtgcaacgggatggcaaagtggtcctgcactccgacccgggcgcgctgtttaaacccttcgtcagggacgagctgatggataaaatgaccagcggagaggggcagctttacgatcccgggagcgacacctggtattactattactcctttaccaatcccgactggtttgtgattttccgtgtcgataacgccaccctggtcaatctgacacgtcatgagaccaatttagtgatcggcggtttcactctcgcagcgatcattattatcctgttcggtctttatctgcgtcatgcttcccgtaccgtgctgatgaatatcatcaatgcgattaaaaccggtgacgtcaaacgcgccccgcgccttgaggcgatgctgagtaaagcgattgaaaccaataaacagcgcgaactgtcctacgtccgccaggcgaccatcgacgctctcaccggctgcaaaaaccgccgcgccttcgacagcgatattgccgccctgatgaacgatcaccagccattcgccctcgcgctggtcgatatcgataactttaaatcgatcaacgacacctggggccacctcaatggcgatatcgtcctgcgtaacgtcgctcgcgaagggctacaggtcctccagccgctggagatatccctctatcgctacggcggtgaagagttcgcggtggtctttcctgccgaacatatcgataacgcccgcacgctgttggaaacatggcggataaacgtcgaacgacgcacctggcgcgaagatggcctgacggtcaccttcagcgccggacttggggaatggaatatggagccactggataagctggtggtgagcgtcgatgaagcgctgtacaaagccaaacagcagggtaaaaaccgtatcctgcgcgcgtaagacttcagcgccgccaccgcccacttcggtgggcttttttattttttccggaaaaaatgaaaccggtttcaattattgtgtgatgccttacacacaatcacggtaaagcggttgtcgcatcgacagggccgcgataaagataagacatcacggaacacaagggccactgactatgaagaatatcgttttgtgctgtgccgccggtatgtctaccagcatgctggttcagcgtatgcaagatgccgcgcagaagaagggtgttgaggtctctatcaaggccgtaccggtcgctgagtttaaagataatctggccgccgccgacattattttgctcggccctcaggtgaaatatgagcaggcaaagctgcaggcgctggccgacccgttcggcaagaaggtcgccgtgatcgatatgatggactacggcatgatgaaaggtgatgccgttctggataaagcccttaagatgctggagtaatcgatggaagatttagaaacgatcatcatggagctgctggttaacgcgggttccgcacgtagcgcggcgctgacggcgctacagctggcgcgaaaaggcgattttgccgccgcggagcaggccatggctgaatcccatgagttcgtcaaacatgcgcataaaattcagacccagcttatcggcatggatgaaggcagcggtaaattgccggtcaacctgatcaccgtgcattcccaggaccatctgatgaacgctatggtcattcaggatctggcgaccgacatgattgaactctatcgtcgtctgcccctcgcgcaataatctcacggatttaacgggcgtcgctgccggcgcccgtccttcttacagaaagccgtacatcgccgcgaatacccagccaaacacgcaggagacgccgacgccgatgagcccgggcaggataaagctgtggttaatcacaaagcggccgatatgggtggtccctgagcgatcaaactggatcgccgccagatcgcttgggtaggtcggcagaatatagtagccatagcaggccggcgctgaagccacgatataggccgggtcgacgccgatggccagggctactggcacaatcgccgccagcgctgccgcctgggagttcacaaatttcgaaaccagtagcagcacgatggcataagcccacggatactcttttaccatttcaccaagcacgcctttaatctcggtcatgtgcgcgccaaacatggtctccgccatccacgcgataccgtacaccgcgacgatagcgatcattcccgaacgaaagacctcatttttggaaatcgatgccgggttagtttttgtaatgatgatgatcagcgctccggagagcagcataaacatctggataaccagcaccatcgacagtggtttaccgtcaaaggccgggcgcagttcagaaaaagcgccaagcagcgccaccacggcgatagaggccagaaaaatccacattgctatccagttgctggtcggcagctttttgtccagcagcgtcgccgtatcgccatagacgtaatggcggttctccgggagcgcaataaacgcctggaaggcttcgtcctgatccaggtctttgccgcggaaccagctgaagataccgatggctaaaatacccagcagcgtggacggaatggttatcgccagcagatcgagaaactccaggtgtttcccgttaaaggtaaaatttcccagcatcgccaccagcgataccaccgccaccgagaccgggctggcgatgatccccatctgagcgccaatggagctggcggccatcggacgctccggacgaatgttattcttaatcgccacatcgtagataatcggcaggatggtatacaccacgtggccggtaccgcagaggatggtcagcgtgcaggtgacgaaaggcgccacgatagaaacatatttcgggttacgccgcagcagcttctcggcaatctgcagcatcacgtctaacccgccggacgcctgcagggtcgccgaggcggctaccactgcaatgatcaccagcatcacatcaaccggcggtttgcccggctggagatgaaaaacaaagacgaggatcaccaaaccgatgccgcccagcagccccagcgcaatccccccttttcgggcaccataaaacagacaaattaatataataatgagttgtatcgcgaattccatgcagcccccagagcctgtccactcagatctaaaaatgatccctacctgcctctcgggattatttctgcgccagaccgggagaagcatgagatgcggctatccctctccagcgccgtcgcgccgaagatacagcaacagaagtaatcccatgattcatcaggtattttgaatatataccctttgaattgattattttttgatatgagtagaagttttacccatacataaagaaaggttttagaaaaaggcttctaatagatattttgcatgaattaattgctaagaaaatgaagatttaatatgtcgtaaatgtaattaagggccgggaaagcggcggaaaatagacaataaaaaaagccggtcaggaaacctgaccggctttttagcagtgcatcaacgattaatcgttgtcagaaccgcccagacctgcgttcagcagctctgccaggttggcagacgcttcttccacgctcacctgcggtgccgccggcagctcgccagcagcgcgacggcgcatacgatcctggtgatacgcataaccggtaccggccgggatcagacgacccacgatgacgttctctttcagaccgcgcagttcgtcgcgtttgcccgcaacggctgcttcggtcagcacgcgagtggtctcctggaacgatgccgcggagatgaaggactcggtggccagagacgctttggtgatacccagcagatcgcgggagaacgttgcgcccactttgccgttcgcttccagttcgcggttcgcgatcttgacgcgggagtattccacctgctcgccttcgaggaagtcggagctgcctgcgctttcgatggtggctttacgcagcatctgacgaacgataacttcgatgtgcttatcgttaatcttaacgccctgcagacggtatacgtcctggacttcgttaacaatgtaacgggtcacagcatgtacgccacgcagacgcagaatgtcgtgcggtgcttccggaccgtcggaaacaacatcaccacgttccacacgttcaccttcgaacacgttgagctgacgccatttcgggatcatctcttcgtacggctcgctaccgtctaccggggtgataaccaggcgacgtttccctttggtttctttaccgaaggaaatgataccgctgatttcagccaggatagccggctctttcggacgacgtgcttcgaacaggtccgcaacgcgcggcagaccaccggtgatatccttggtaccgccggattcctgcggaatacgcgccagggtgtcaccagagctgatctgtacgccatcttccagctgaacaatcgctttacccggcaggaagtactgagcaggcatatcagtgcctgggatcagaacgtcgttgccctgagcatcaacgattttcagtgctggacgcagatctttaccacctgcggtacgttctgcagagtccagaaccaccagcgaagacagaccggtcagctcgtcagtctgacgagtaatggtctggccgtcgatcatgtcagtgaaacggatgaaaccgctaacttcggtgataaccggcatggtgtgcggatcccagtttgcgacggtttcaccgccggcaacctgctcaccgtcgcctttcgccataaccgcaccgtaaggtactttatagctctctttggtacgaccgaattcgtcgatcagcttcagctcggtattacgggaagtgataaccagcttaccactggagttcacaaccgacttcgcgttgctgagcttgatgctacctttgtttttcacctggatgctggattcagcagccgcacgagatgccgcaccaccgatgtggaacgtacgcatcgtcagctgtgtacccggctcaccgatggactgtgccgcgataacgccgatagcctcacctttgttgatgaggtggccacgcgccaggtcacgaccatagcagtgcgcgcagacgccaaagtcggtgtcacaggatacaacggaacgcactttgacggagtcaacggagttcgcttccagcaggtcacaccagtgctcatgcagcagcgtgttgcgtggaaccagaatatccgcggtacccggcttcagaacatcttccgcagtcacacgacccagtacgcgatcgcgcagcggctctttaacgtcgccaccttcgataaccggcgtcatggtgatgccttccagggtgccgcagtcgtcttcagtgacgaccaggtcctgcgcaacgtcaaccagacgacgagtcaggtaaccggagttcgctgttttcagtgcggtatccgccagacctttacgagcaccgtgggtggagatgaagtactggagtacgttcagaccttcacggaagttcgcggtgatcggcgtttcgatgatggagccatccggcttcgccatcagaccacgcataccagccagctgacgaatctgtgccgcagaaccacgcgcaccggagtcggccatcatgtagatgctgttgaaggaaacctgctgctcttcctgaccgtcacggttaatcacggtttcggtttgcaggttatccatcatcgctttggatacacgatcgttcgccgcagcccagatatcgataactttgttgtagcgttcgcccgcggtcaccagaccggactggaactgttcctgaatctcagcaacttccgcttccgcttcgctgatgatttcgtattttttctccgggatgaccatgtcatcgataccaacggatgcacctgaacgcgctgcgtaagcaaagccggtgtacatcgtctggtccgcaaaaataacggtcggtttcagacccagaatacggtaacaggtgttcagcatcttggagatcgctttcttaccaagcgcctggttcacgatagagaacggcagacctttcggtacgatcatccacagaatggcacggccaacggtcgtgtctttcaggctggttttcgcgacaaactcaccattgtcgtctttttcgtattcagtgatacgcactttaacgcgcgcatgcagagaggccaggccggcgcgataaatacgctcagcttctttcgggccagtcagcaccatgccttcgcctttggcgttaacactgtcacgggtcatgtagtacagacccagtacaacgtcctgagacggaacgatgattggttcgccgttcgccggggacaggatgttgttggtagacatcatcagcgcacgcgcttccagctgggcttccagcgtcagcggtacgtgaacagccatctggtcaccatcgaagtcggcgttgtatgccgcacaaaccagcgggtgcagctggatggctttaccttcgatcagaaccggttcgaatgcctgaatacccagacggtgcagggttggcgcacggttcagcaggaccgggtgttcgcggataacttcgtccaggatatcccaaacgacagcttcttcgcgctcaaccatcttcttagcggctttgatggtggtggccaggccacgcagttccagcttgccgtagatgaacggtttgaacagctccagcgccattttcttcggcagaccgcactgatgcagacgcaggtatggacctacggtgataacagaacgaccggagtagtcaacgcgtttaccgagcaggttctggcggaaacgaccctgtttacctttgatcatatcggccaaagatttcagaggacgtttgttagaaccggtgatcgcacgaccgcgacgaccgttatccagcagggcgtcaaccgcttcctgcagcatacgtttttcgttgcgtacgatgatatccggcgcagccagatccagcagacgtttcagacggttgttacggttgatcacgcgacgatacagatcgttgaggtcagacgtcgcgaaacgaccaccgtccagcggaaccagcggacgcagatctggcggcagtaccggcagaacggtcaggatcatccactccggcttgttgccagactgaacgaaagcttccagcagcttaatgcgcttggtcagctttttacgcttggtttcggagttggtttcgttcagctcttcacgcagctgctcgcattcctgctccagatccatattgcgcagcagcgcctggatcgcttccgcgcccattttcgcgtcgaattcgtcaccgaactcttccagcgcgtccaggtactgttcttccgtcagaatctggttgcgttcgaggttggtcatgccaccttcgataaccacataggattcaaagtacagtacacgttcgatatcgcgcagcggcatatccagcagcagaccgatacgggacggcagggatttcaggaaccagatgtgcgcagtcggacatgccagctcgatgtggcccatgcgctcacgacgcactttagtctgggtcacttcaacgccgcacttctcacagatcacaccgcggtgtttcaggcgcttgtacttaccgcacaggcactcataatcttttaccggcccaaagatacgggcgcagaaaaggccgtcacgctcaggcttgaacgtacggtagttaatggtttccggctttttaacttcaccgaaagaccatgaacggatcatgtctggcgaagccagagcaattttgatcgcatcaaactcttcggttttagtttgcgctttcagaaactttaataagtctttcacggatttgctcccgtcggagttagcacattccgctgccgggcgttaacccggcagcagtgacctgtttgagcgagaattactcgtcttccagttcgatgttgatgcccagcgagcgaatttctttcaacagtacgttgaaggattccggcatgcccggttccatctggtgattgccgtccacgatgtttttatacatcttggtacgaccgttcacgtcatcagacttaacggtgagcatttcctgcagggtgtaggccgcgccgtatgcttccagcgcccacacttccatctcaccgaagcgctgaccaccgaactgtgccttaccacccagcggctgctgagtaaccaggctgtaagaaccggtggaacgagcgtgcattttgtcgtcgaccaggtggttcagtttcagcatgtacatgtaacccacggttaccggacgttcgaactgttcaccggtgcggccatcaaacagggtgatctgaccggaagtcggcaggtcgcccagctgcagcagctctttgatttcagcttctttcgcaccgtcgaataccggcgttgcgatcggcatgcctttacgcaggttttcagccagacgcagaacttcttcatcgctgaaggtattcaggtcaactttctggcgaacgtcagcgcccagatcgtaagcacgctggatgaattcgcgcagtttcgcgacttcctgctgctgtttcagcatggcgttgatcttatcgccgatgccttttgcagccatacccaggtgagtttcaaggatctgaccgatgttcatacgagacggtacgcccagcgggttcagtacgatatctaccggcgtaccgttagcatcgtgcggcatatcttcgatcgggttgatcttagagataacacccttgttaccgtgacgacccgccatcttatcaccaggctggatacggcgtttaacggccagatataccttaacaatcttcagcacgcccggtgccagatcgtcgccttgggtgattttacggcgtttcgcttcgagttttttctcgaactcgtgtttcagttcgtcatactgctcagccagctgttccagctgattttgtttctcttcgtcggtcaggcccagttccagccagcgatcgcgaggcagcttgtcgagcttctcagcttcaacgccaccggagaccagcaccgcgtagatacgactgaacagaccggcttcaaggatctgcagttcttcagacaggtcttttttggcctgcttcagctgcatctcttcgatttccagagcacgtttgtctttttctacgccgtcacgggtaaagacctgaacgtcgataacggtaccagagacaccgttcggtacgcgcagagaagagtctttaacgtcagacgctttctcaccgaagatcgcgcgcagcagtttctcttccggcgtcagctgggtttcacctttcggcgttaccttaccaaccagaatgtcgccgccggtcacttccgcaccgatataaacgataccggattcatccagtttggagagcgcagcttcacccacgttcgggatgtcagcggtgatctcttccggccccagcttggtgtcacgggacacgcacgccagttcctgaatgtggatagtggtgaaacggtcttcctggacaacacgctcggaaacgaggatggagtcttcgaagttgtaaccgttccacggcatgaacgctacacgcatgttctgacccagcgccagctcaccgaggtcggtggacgggccgtctgccagcacgtcgccgcgctcaataggttcgcccagggacacgcaaggcatctggttgatgcaggtgttctggttagaacgggtgtacttggtcaggttatagatgtcgatacctgcttcgcccgggtacacctcgtcttcgttaactttgataacgatacgggaagcatccacgtactgaacggtaccgccacgtttagccacggcagtaacaccggagtcaacggcaacagcacgttccataccggtaccaaccagcggcttatcagcgcgcagagtcggaaccgcctgacgttgcatgttcgcacccatcaatgcacggttggcgtcatcgtgttccaggaacgggatcagggacgcaccgacggataccacctgctgggtggatacgtccatgtagtcaacctggtcgcggctgaacaagctggattcgcctttgctacggcaggtaaccagatcttctacgaagtggccgttttcatccaggttggagttcgcctgagcgataacgtagttgccttcttcgatagcagacaggtagtgaatttcgtcagtaaccacaccgttggtcactttacgatacggcgtctcaaggaagccatattcgttggtctgcgcgtacacggacagggagttaatcagaccgatgttcggaccttcaggcgtttcgatcggacatacgcgaccgtagtgggtcgggtgtacgtctcgaacttcgaagcctgcgcgctcacgggtcagaccgcctgggccgagtgcggagatacgacgtttgtgcgtaatctcagacagcgggttgttctggtccataaactgagacagctggctggaaccaaagaactctttcactgctgcggaaatcggcttggcgttgatcatatcctgaggcatcagggtatccagatcgccaagagacagacgctctttcaccgcacgctctacacgtaccaggccaacgcggaactggttttccgccatttcgccaacggaacggatacgacggttgccgaggtggtcgatatcgtccacttcgcctttaccgttacggatatcgatgagcttcttcatcacttcgatgatgtcgtctttgctcaggataccggaaccttcgatttcgtcgcgcagcagagaacggttgaacttcatacgaccaaccgcggacagatcgtagcggtcttctgagaagaacaggttctcaaacagactttcagcggcttcacgagtcggcggctcgccagggcgcatcatgcggtagatttctaccagcgcgctcagacgatcgttagtcgggtcgacgcgtaccgtttcagagatgtacgggccgtggtccagatcgttggtgaacagcgtttcgatacgcttgtggccagactggctcagcttagccagcagatccaggctcaactccatgttcgccgggcagatcagttcgccagtcgcttcatcgatatagtctttagccgccactttgcccgcgatatattcaaccggcacttcgatatgcttgatatcgtctttttccagctgacggatatgacgagccgtgatgcgacggcctttctcaacgtacactttgccgttggcttcgatatcgaaggaggcagtttcaccgcgcagacgctccggaatcagctccatctgcagcttgttgtcgcgaatttcaaagaccactttttcgaagaacaggtcaaggatctgctcagtggtgtaattcagcgcgcgcaggatgatggtagccggcagcttacgacgacggtcgatacgaacgaacaggttgtctttcgggtcgaattcgaagtccagccaggaaccgcggtaagggatgatacgtgcgttatacagaaccttaccggaggagtgggtcttacctttgtcactgtcaaagaagacgcccgggctacggtgcagctgagaaacgataacacgctcggtaccgttgataacaaaggtaccgttgtcggtcatgagcggaatttcgcccatgtagacttcttgttctttaatgtctttgacggtgccttctggcgcttcgcgctcgtagatcaccagacgcagttttacgcgcagcggtgcagaataagtcacgccacggatctgacattctttaacgtcaaaaaccggttcgcccagacggtagctgacgtattgcagctcggaattaccgctgtagctctgaatcgggaatacggaacggaaagcagcttccagaccatactgcccttcaggatcttgctcgataaacttctggaacgagtcaagctggatagaaaggagatatggcacatccagaacttgtggacgtttaccaaaatccttacgaatacgttttttctcggtataggagtaaaccatagggttcctcagctcgctgacaagtcgacccatctgcccgcagagggcagttttttatgcaacactattttgttgaccggaaaatggaacactttccgcaatgcctgttgctatcacgcttaaaccatttcattgcgatttacacagcccaggaaccctaacctgtcgcagtatattaagtcgtcgatagaaacaagcattgagaggcaaaccagtagtcaaacagcgtgaaacgctactggcgccttacagcgcaaaaaggctggtgaccaaaaagtcaccagcctcagcctgatttctcaggctgcaaccggaagggttggcttatttaacttcaacttcagcgccagcttcttccagagattttttcagagcttcagcgtcgtctttgctgatgccttctttcagtgcagccggagcagattctaccaggtctttagcttctttcagacccaggccagttgcgccacgtactgctttgataacagcaactttgttagcgccagcagctttcagaattacgtcgaattcagttttttcttcagcagcttcaaccgggccagcagctacagctacagcagcagcagcggaaacaccgaatttttcttccattgcagagatcagctcaacaacgtccattacggacatagcggatactgcttcaatgatttgatctttagtgatagacatttaaattgttcctgaatatcagaataagtttatacgtaagcgaatgctttacaaagataactgcgattaagcagcttctttcgcatcgcgtacagcagccagagtacgaaccagtttgccagccgaagcttctttcatggttgccatcaggcgtgcaattgcttcttcgtaggtcggcagagttgccaggcggtcgatctgcgacgccgggatcagctcaccttcaaaggcagcggctttgacctcaaattttgcattcgctttcgcgaactctttgaacagacgagcagcagcgcccgggtgttccatagagtatgcaatcagggtcggaccaacaaacgtgtctttcaggcactcgaactgagtaccttcaacgacgcggcgcagcagggtgttacgaacaacacgcatgtatacgccagcttcacgacctgctttacgcagttcagtcattttatctacagttacgccacgggaatccgcaactactgcagacagcgcgcctttggctacttcgctgacttcagcaacaatcgcttgtttgtcttgaagatttaaagccattagctttgctcctggatgtttgccagagcctatgctctggaactcacttcactcaattcaacgaaaagagcgtctaaatacggtgagcagaaacaagccagaatatccaaaaataatcttagcgttctgtcaccgtctacgcaggggattaagtttcttgcgaaacacctgcggtcttcgacggaggcctggataggccaggctccaacgaacaaattcttcctatgacttcgtccttcgaaccgcagcggcgttagctgcaattcaaatgactcgcatagcgtctgtcttattgacagaatcgtgggggtaagattgtagacaaaatcaccgcccacgtaaaggcattagtttgcagaagcgttcaggccagcctgatctactgcaacacctgcacccatagtggtggagatgctaactttcttgatgtacacgcctttcgcctgagtcggttttgcttttttcagcgcaaccagcagagcttccaggttttctttcagtttgtcagcgtcaaagtccactttaccgatggtggtgtggatgatgccgtttttgtcgttacggtaacgaacctggcctgctttcgcgtttttaaccgcttcagcaacgttcggagttacggtacctactttcgggttcggcatcaggccacgcggacccagaacctggcccagctggccaacaacgcgcattgcatccggggaagcaataacaacgtcaaagttcatttcgccttttttgatctgctcagccagatcttccatacctaccagctcagcgcctgcagctttagcagcttcagcgtttgcgccctgggtaaatacggctacgcgaacggaacggccagtaccgtgcggcagtacagttgcgccacggacgttctggtcagatttacgagcgtcgatgccgaggttaacggcaacgtctacgctttcggtaaatttagcggtggccagctctttcagcagagcaatggcttcgttgatgtcgtactgtttagttgcatcaactttctcacggatcacgcgcatgcgcttggtcagtttagccatttcttagtcctccactaccaggcccatggaacgtgcagtaccttcgatggagcgagtcatcgcttcaatgtcgccaccagtcatgtcggcagctttggtctgcgcgatttcctgcagctgagcgcgggagattttacccactttatctttgttcggcttaccggaaccagacttgatgcctgcagctttcttcagcagaacagcagccggcggagtcttggtaacaaaggtaaaggaacggtcagcgtaaacggtgataacaaccgggatcggcagacctttctccagggaatcagttttggcgttgaacgctttgcagaattccatgatgttcacgccctgctgacccagtgctgggccgaccggcgggctcgggttcgccataccagctgcaacctgcagcttgacgtaggcttggactttcttagccattcttaaatcctcaaaatgggtattaacgcttcagagaagctccccgtgattaaacatcgttttacgggccgggcccataaaaacaaaaggcgcgaaattgtatgccaatttcgcgccctatgcaacgattaaatcgctgcttttttgatcgccggcttacgccttctcaacctggctgaagtccagttctaccggggtcgcacgaccgaagatagaaacggaaactttcaggcgggacttctcatagtccacttcttccaccacgccgttaaagtcagcgaacggaccgtcgttaacgcgaaccatttcacccggttcaaacagcgttttcggacgcggcttatcgccaacctgctgcagacgattcatgatggcgtcgacttctttgtcgctgatcggcgccggacggtcagaggtgccgccgatgaagcccatcacgcgcggtacgctgcgcaccaggtgccagcttgcgtcgttcatgaccatctgaaccaggacatagcccgggaagaatttacgttcgcttttgcgacgctggccgccacggatctcaaccacttcttcggtcgggaccatgacttcgccaaataactcttccatgttgtgtaatttgatatgttcacgcagcgacgtggctacgcgaccttcaaaaccggaaaacgcctgaacgacgtaccagcgctttttaggagcttcagacatctcagaacctcaggccagtgataaaggagaccaggcgaaccagaataccatccagtccccacaggatcagtgacattactgcagtcacggcagcaacaatcagcgtagtatgcagcgtttcctggcgagtcggccaaatcactttacgaacttcggttctcgcttcgcgagcaaaagcaacggtcgccttacctttcgtcgtcaacagcgcgacgccaccggcagcagcaataagaataaccacggccagcgcacgcaccgccagcataatgtcacgataaaggaagttgcccacgatcgccacgatcagcagcacggcaacgataatccacttcatcgcttccaggccgcgcccgctcccttgagcttcggtattcgcactcataaaccaacctgtcagaagtattctacaaacaatttcaccccgcgggggcgaggcgatccaaaccgaaattaagtttcggattatacacttaactattcaaattgcttcaatgttgacggtggtgtcacccctgccctgctgttgcaaagaaggagttgattagccgtcgccctgaggctcgaatggtttggtgtataaacgccctcttcagagcctgtctcagcaatgattatgacaaataaaatcactgatgagccaggttctggtgtgaaagcgtgcaaaaagggcatcaaatgatgcccttttattgcgcattgcgtcaaatgttatcagcgattagccgagaactttagcaaccacgcccgcgccaacggtacgaccgccttcacggattgcgaaacgcagaccgtcgtccatcgcgatcgggtggatcagggtaacaaccattttgatgttgtcgcccggcattaccatctctacgccttccggcagttcgatggtgccag

SEQ ID NO: 175 - DNA, 33692 bp, Unknown
  source: /note="Description of Unknown: MKP2_2161_1 Mutant Bacteria sequence"
accgcgcgcgttgccgtggaagcgggtatcgctgactactggttcaaatacgttggcctgaacggcgctatcgttggcatgaccaccttcggtgagtctgcgccggctgagcagctgttcgaggagttcggcttcaccgttgataacgtggtcgctaaagcgaaagcgctgctgtaatcgctggtacggtgcgggctgatgccctcaccccaaccctctcccacaggagagggtgcaaacaccaaaacggtaacccctgggttaccgttttgcttttatctcgccacccggcttttttgtatctgctattcctgaaccatgtaatacggttgtaaattattccagcaaaaatgtgatgtgagtcatatagctggtttattgcgctggacaaacattccttttattcctcatttcgcttattctagctgaagcgtttcagtcgtttaaatgttcgacaattaatcaatcagtcgcagtttgcagctggtaaggttcccctcagagcgttgctggattactctgtcagccacctcataacagggacagccttgcaggagatctatgaccattcgcatcgcgattaatggcttcggtcgcattggacgcaacgtggttcgtgctctatatgaatccgggcgtcgtgcggaaatcaccgtggtggcaatcaatgagctggcggatgccgcgggcatcgcgcatttattgaaatatgacaccagccatggccgtttcgcctgggatgtccgtcaggagcgcgagcagctgtttgttggcgacgatgccatccgtctgctgcatgagccgaccattgcggcgctgccctggcgcgaactggcggtggacgtcgtgcttgactgtaccggcgtatacgggagccgtgaacacggtgaagcccatcttcaggcgggggcgaaaaaagtgctcttttcccaccccggcggcaacgacctcgacgcgacggtggtgtacggcgtaaatcaggatgaacttcgcgccgggcatcgcattgtctccaacgcctcctgcaccaccaactgcattattccgatcattaaactgctcgatgacgcctatggcattgagtccggcaccgtcaccaccattcactcggcgatgcatgaccagcaggtgattgacgcttatcatccggatctgcggcgtacccgcgcggccagccagtcgatcattccggtggataccaaactggcggcagggatcacccgtatttttccgcaatttaacgaccgttttgaagcgattgccgtgcgggtgccgacgattaacgtgacggcaattgacctgagcgtgacggtgaaaaaaccggtaaaagcatgtgaagtcaaccagttgctgcaaaaagcagcacaaggtgcatttcatggtatagttgactatacggaattaccgttggtctcgacagattttaaccacgatccgcacagcgccatcgtcgatggtacgcaaacccgggtcagtggcgcgcatctgatcaaaacgctggtctggtgcgataacgaatggggctttgctaaccgaatgctcgacacgacgttagcgatggcggctattggtttcaggttcgacgcgtaaacgtcgacaaaactttatgaatcaacgagaggattcaccatgtctgtaattaagatgaccgatctggatctggctggtaaacgcgtttttatccgtgcggatctgaacgtaccagttaaagacgggaaagtaaccagcgacgcacgtatccgtgcatctctgccgaccattgaactggcgctgaagcagggcgcgaaagtcatggttacttctcacctgggtcgtccgaccgaaggcgagtacaacgaagaattctctctgctgccggttgttaattacctgaaagacaaactgtccaacccggtacgcctggttaaagactacctggacggcgtggaagtggctgccggtgaactggtggtgctggaaaacgttcgcttcaacaaaggcgagaaaaaagacgacgaagaactgtctaagaaatacgctgcgctgtgcgacgtgttcgtgatggacgctttcggtactgcgcaccgcgcgcaggcttccacccacggcatcggcaaatttgctgacgtggcgtgcgcaggcccgctgctggccgctgaactggacgcgctgggtaaagcgctgaaagagccagctcgtccgatggtcgctatcgttggtggttctaaagtgtccaccaaactgaccgttctggattccctgtctaaaatcgctgaccagctgatcgtgggcggcggtatcgctaacaccttcgttgccgctcagggccacaacgtcggtaaatccctgtacgaagcagatctggttgatgaagccaagcgcctgctgggcacctgcgatatcccggttccgaccgacgttcgcgtagcgaccgagttctccgaaaccgcaacggcaaccctgaaatctgttaacgacatcaaagatgacgagcagattctggaccttggcgacgtttccgcacagaaactggctgaaatcctgaagaacgccaaaaccatcctgtggaacggcccggttggcgtattcgaattccctaacttccgtaaagggactgaaatcgtggctaacgctatcgcggacagcgaaggtttctccatcgccggcggcggtgacaccctggcagcgatcgacctgttcggcatcgctgacaaaatttcctacatctccactggcggcggcgcattccttgaattcgtcgaaggcaaagtcctgccggcagtagcgatgctcgaagagcgcgctaagcagtaattcagttcaggcggggaaacccgcctgtttttcagcgcgcttaagggctcgcgaaccttcttcaacggtcgaagatacagatacaggactaagtaacatgtctaaaatttttgatttcgtaaaaccgggcgtcatcactggcgacgacgttcagaaagtgttccaggtagcgaaagaaaacaactttgcactgccggcggtaaactgcgtaggtactgattccatcaacgccgttctggaagctgcagcgaaagttcgctctccggttatcgttcagttctctaacggcggcgcagcgttcatcgcaggtaaaggcgtgaaaactgacgttcctcagggtgctgctatcctcggcgctatctctggcgcccaccacgtgcaccagatggctgaacactacggcgtgccggttatcctgcacactgaccactgcgcgaagaaactgctgccgtggatcgacggcctgctggacgccggtgaaaaacacttcgccgctactggcaaaccgctgttctcttcccacatgatcgacctgtctgaagagtccctgcacgaaaacatcgagatctgctctaagtacctggcgcgcatggccaaaatgggcatgaccctggaaatcgaactgggctgcaccggcggtgaagaagacggcgtggataacagccacatggacgcttccgccctgtacacccagccggaagacgtggattacgcctacaccgagctgagcaaaatcagcccgcgtttcaccatcgccgcttccttcggtaacgtacacggcgtgtacaaaccaggtaacgtagttctgaccccgaccatcctgcgcgactctcaggaatatgtttccaagaaacacaacctgccgcacaacagcctgaacttcgtgttccacggcggttccggttcttccgctcaggaaatcaaagactccgtcagctacggcgtggtgaaaatgaacattgataccgacacccaatgggcaacctgggacggtatcctgcagtattacaaagcgaacgaagcttacctgcagggccagctgggcaacccgaaaggcgaagaccagccgaacaagaaatactacgacccgcgcgtatggctgcgtgctgcccagacttccatggtgactcgtctggagcaggcatttaaagagctgaacgcgatcgacgttctgtaagaaaaatctgtttcttacccggaagcccgcagcaatgcgggcttttttattatcttaacaacaggatagcgtggcagaaaactgtgatccatttggcaaaacgtgcacttattgtttaccctataacctgactgccctgtcgcaggctgagttatttacttccccccaggggattcataaggaatgttaaatggaagatttgaacgttgtcgatagcatcaaccacgccgggacgtggctggcacgcaaccaggagctgctgctgagctatgccgtcaacatcgtcgcggctatcgctatcctgatcgtcgggatgatcgtggcgcgcgtcgtctctaataccgtcaaccgcctgatgctggcgcgtaaaattgacgctaccgtggccgattttctctctgcgctggtgcgctatgcggttatcgcttttacgctgattgccgccctggggcgggtaggcgtgcagaccgcctcggtgattgcggtgctgggtgctgccggtttggcggtgggtttagcgctgcagggatcgctgtcgaaccttgccgcaggcgtactgctggtgatgttccgcccgttccgcgctggcgagtatgtcgaccttggcggcgtggcaggtacggtgttgaacgtgcagattttctccaccaccctgcgtaccgcggacggtaaagtagtggtggtcccgaacgggaaaatcatcgccggcaatatcattaacttctcccgggagcctgcgcgtcgcaatgagtttattatcggcgtcgcttacgatgctgatatcgacaaggtaaagcagctgctgacctcgattatcgaatctgacgatcgaattctgcgcgatcgggaaatgaccgttcgtctgaacgaactcggcgcctcgtcggtgaacttcgtggtgcgcgtgtggagcaaaagcagcgatctgcaaaacgtctactgggatatcctcgagcgtatcaagcgtgaatttgacgccaacggcatcagcttcccttacccgcagatggatgttcatgtggtgcgcctgccggaaaaagcagagtaaagcgcctctcaataactcaggccggccatgccggcctttttcaatagctcatcattagtagttctaattaatgattaattctttcaatttccgctaataattcattcgcgctatagtcagcgccactctcgaactcagcggataaatccttatgtttacttattactttcaggggcttgccctgggagcggctatgatattgccgcttggcccacaaaatgcctttgtgatgaatcaggggatccgtcgtcagtatcatctgatgattgccctgctatgcgcggtcagcgacttgctgttaatctgcgctggcattttcggcggtagcgcactgctgatgcaatccccgtggctgctggcgctagtgacctggggcggcgtggcctttttgctgtggtatggcttcggcgcattgaaaacggcgttcagtcagagtcttgaactcgccaatgcagaggtaatgcagcaggggcgctggaaaatcattatcaccatgctggcggtgacctggcttaacccgcacgtttatctggacacctttgtggtgttaggcagcctgggaggtcagctggcggtggagccgaagcgctggtttgcgctagggaccattagcgcctctttcctgtggttctttggcctggcgctgttagccgcctggctggcgccgcgactgcgtaccgccagagctcagcggatcatcaatattgtggtcggcgccgtcatgtggtttattgcgtttcagctggcaagagaaggcgtcagccatatccaggcgttgcttaactaagcgttgtccgatggactttcctgctgtacgcgctaagcttgctggcatgcgtcccgtaagggcgatttaagtaacatggagaaacgacagtgaagttaaaagtcttagccctggcggcaacactcggattgaccacgatggcggcacaggccagcgaattgccggatggcccgcacattgtgacttcaggcacagcaagcgttgccgcggttccggacatcgccaccctggcgatcgaagtgaacgtgtcggcaaaagacgccgcgtcggcaaaaaaacaggctgacgatcgcgttgcgcaatatctctctttcctcgaaaagagcggtattgctaaaaaggacatcaactcggcgaatctgcgtacccagcctgattacgactatcagaacgggaaaagcattctgaaaggctatcgcgcggtgcgcacagtggaagtgaccttgcgccagctggataaactcaacggtctgctggatggcgccctgaaagcgggtctcaacgaaattcgctccgtctcgctgggcgttgcgcaaccggacgcctacaaagataaagcgcgtaaagcggcgatcgacgacgccgtgcatcaggcgcaggagctggccgcaggcttccacagcaagctgggtccggtgtacagcgtgcgctaccatgtctccaactatcagccgagcccgatggttcgcatgatgaaggccgctgacgctgcgccggtttctgcccaggaaacctacgagcaggcgactatccagtttgacgaccaggtcgatgtagtctttgagctgcagccggcgcaagccgctgctccagccaccccggcgaaaccggcggaaacgccgaaaccggcccagtaagcgatagaaacaaaaaagccacttcagcgaagtggcttttttatgcccgcggtttaatcctgacgcagcaccttgtgtccgtagtcaatgagcgcatcggtcacccggcgcatcatgcggctttccggggcgaagcggtgccagtagagcatgcggcgctggaacaggcccggggtgagatcgataagttcgccgctgttgagctctttttcgatctgcagatgcgggatcatacagcaggtggtgccctggcgcgccagctgcacgaaagcttccgacgagttgacgatgtggcaggggacgctgcccggcggcaggtcgaagttttgctgcaggaacgcctgatgcatatcgtccagatggtcgaaggcgacgaccggcgccttaagcagcgccgaacgcgtcacgccattcgggaaatagcgttgcgcaaactcttttgatgcgacaaacaggtaatcgagcgcccccagctgatccaccaggcagcttggcagcgcctgcggctggatactcactgcgcccactacttcgccacggcgcaggcgctcctgggtgcgggtttcatcttccacctgcaggttgagacgaataggggagtctgacagaacgttggccagcgccggcagcagccaggtcgccagactgtcggcgttcaccgccagcgacagcagcagcggcgtcgagccggtttgttcatcgcccagccactcttcctccagcagttcaacctggcgcaacagagccagcagtttctgtccttgctcggtggggcgcggcggcacggtacgcaccagcagcggctggccgaacatattttccagctgcttaatacgctgtgagacggcggactgggtaatacatagcttctgcgcggcgcgctcaaatcctcgttccctaatcaccgcatccagcgcttgtagtgtcctgtagtccggtcgtttcattattctggcgtgcccccataactaatcgttatctcgcactatgacataaatttttatttgatacagacgaaattggtctgttcagttgtgtgatctgcatcgcagggacatttccactatcgatgttctataatgcgccacaggcattcacatctcggaccagaattatgacgcaggatgaactgaaaaaagcggtaggttgggcagcactgcaatatgtacagccagggactattgtcggcgtaggcaccggctcgacggcggcccattttattgacgcgctgggcaccatgaaggggcagatcgaaggggcggtttccagctccgacgcctccaccgagaagctgaaaagcctcgggatcaccgtcttcgatcttaacagcgtcgatcgcctggggatctatgttgacggcgcggatgagatcaacggccatatgcagatgatcaaaggcggcggcgcggcgctggcccgtgaaaagatcatcgcctcggtcgcggataagtttatctgcatcgccgacgcctccaagcaggtcgatattctgggcaagttcccgctgccggtggaagtcattccgatggcgcgcagcgccgtggcgcgtcagctggtcaagctgggcggccgtccagagtaccgtcagggcgtggtgaccgataacggcaacgtgatccttgacgtgcacggcctggaaattctcgatgcgatcgcgctggaaaacgcgatcaacggtattcctggcgtcgtcaccgtggggctgttcgccaaccgtggcgccgacgtggcgctgattggtactgccgacggcgtgaagaccatcgtaaaatagtctgtccgcagggagccgaccggctccctcgcaaatattttttcaccaggtgcaatttggtgacttctgtcacatttatgcaaccattctgatttacacgctaccatttcttctctttctggtgttttgtcctgcgatttccctctggatgacatttcttcaggacggcgacgcaaacgttcatattgccgcgatagttttttttgatatgttgctgagacgaactttcgttcagcacgacatcagttaagacaaaacaggacggggaaatggctaaggtatcactggaaaaagacaagattaaatttctgctggttgaaggtgtgcatcaaaaggcaatcgatagccttcgcgcagcgggttacaccaacattgaatttcataaaggcgcgctggattcagaacagctgaaagcgtcgatccgtgatgcccatttcatcggcctgcgttcccgtacccatctgactgaagagattttcgccgcagcggaaaaactggttgccgtcggttgcttctgcatcgggaccaaccaggtcgatctgaacgccgctgcgaagcgcggtattccggtgtttaacgcgccgttctctaacacccgctcggtggccgagttggtgatcggcgaactgctgctgatgctgcgcggcgtgccggaagccaacgccaaagcgcaccgcggggtgtggaacaagcaggcggtcggcagcttcgaagcgcgtggtaaaaagctgggcatcatcggttacggccacatcggtacccagcttggcattctggcggaatcgctgggaatgcacgtcttcttctatgatattgaaaacaaactgccgctcggcaacgccactcaggtacagcatctctccgacctgctgaacatgagcgatgtggtcagcctgcacgtgccggaaaacgcctctaccaaaaatatgatgggcgcggaagaactggcgctgatgaagccgggcgcgctgctgatcaacgcctcccgcggtaccgtggtggacattccggcgctatgcgatgcgctggccagtaagcatctggccggggcggctatcgacgtcttcccgactgaacctgcgaccaacagcgaccccttcacttccccgctgtgcgagtttgataacgtgatcctcacaccgcatatcggtggctccactcaggaagcgcaggagaacatcggtctggaagtagctggcaagctggcgaaatactctgacaacgggtcaaccctgtcggcagttaacttcccggaagtttctctaccgctgcacggcggccgccgtctgctgcatatccatgagaaccggccgggcgtcctgaccgcaatcaaccaaatcttcgccgcgcagagcatcaacattgccgcccagtatctgcaaacgtcgccgcagatgggctacgtggtgattgatattgaagcggaagaagatgttgcccagcaggcgctgcaggcaatgaaagcgatcccggggactatccgcgcccgtctgctgttctaatcatttttgcctctcgggcaggtcgcgtacctgcccgtttttttgttaatactttccaggctgaatttctcgtccccgcgtacctaccaacaccaggtttttcccggggtgatgaccgccggcagcgggatatcccactcttcgctcggcaggctatccacctgctggcagtcgtgcgcgtagcccaccggctgcaggcgatactgctgccagttttgcagcgtccggtcgtaaaaaccgccgcccattcccagccgttggccactgacatcgaaggccaccagcggggtcaccagcacatcgagttcagccagcggcagcacatcccgcacatcgagcttcggttcgcggatcttcaggcgattcacgatcagttggctctgcggatggtagtgtaaaaacagcagattgccggggctaaagggatgcagcaccgggagatatacccgcttgccggcgcgccagagctggtcgatcagcggctgggtgtccagctcgccgtcaaaggagagaaacagcgccacgttgtgggcgagaactaccggcggccaggccatcatccgctcggcggcctgttgggcaaacaggcgctgttgctccgggctgagtgcgcgtcgacgatcgcggatctgctggcgaatatgctgacgggagagcagggtatcgggctgtatagtcatgcaggtctcgttacgagctggcgaaacaataggagcaagtgtaatacagggcggcttcagccgaaaacacgtatgggggatgatgcgaagtaaagaagggaatctccgagatgccgccgcaggctgtaacccttgaacccttggttcaaggtgaatgtgtcgtcacggttttaaggcttctcggacgaaccgagcatgctcaccaaccgtggagcgccacattcttgtggtatgaaatatcggctcaggggactggcccacttgcaaacatctcagagaaattttgttcttgcgattactctaacacagttaactgcaaagtgttattcaaacttcgaccctggcttttcgcttatgcgaccttgctcaagcaatgcttgttcgatggtctgctgaagcatgcgaatgcgctgctccatgctggaagcgtagtcgcgggtcttcgctttttcctgagtcaactcatagctgatgttcaacgccgcgatgaagaccagctgctcagtatttgtgactctagtgcgttcttttaaatcttgcaaccgctgattaaggtcttcagctgcctgattcagggcatccctttgttcaggcgggcaattcactcgcagtgaacggccgaaaatttggagatctacgggttgtgcagacatgccaccttcctgctgattgactgcgctgccttcacaccctggcccgggtctgcgaaggggcgacactatagctaccctggtgcgaagatacaagccctattctggttcaccagggtccaaagtggtagcataccatgaatattcctcccaacgatgacgaatgcgcatgtctatacagaacgaaatgcctggttacaacgatgtagaccagttactgaaccaacaaggggtaggtctcaccccggccgaaatgcacggtttgatcagcggattgctgtgcggcggcaacacggacagcagctggcagccgctggtgcacgacctgaccaacgaaggtctcgcctttggccatgaactggctcaggcgctgcgtaacatgcattccgccatcagcgattcactggatgacgacggtttcctctttcaactgtatctgccggaaggcgatgcggtgagcgtctttgaccgtgccgacgccctcgccggttgggtcaaccacttcctgcttggtcttggcgttagccagccgaagctggataaagtgaaggatgaaaccggggaagcgattgacgatctgcgtaatattgcccagctgggctacgatgaagacgaagatcaggaagagctggagatgtctctggaggagattatcgagtatgtccgcgttgccgcactgctgtgccacgacacctttgcccgtcagcagccaaccgcaccggaagtccgcaaaccgacattacactaactaaaattcgttcagggggcgtcatgactcagcaggaatttctatcgcgtcgccagacgctgttggcgcagatgcagccaggcagcgcggcgctgattttcgccgcaccggaagcggtgcgcagtgcagattcggaatatccctaccggcagaacagcgatttctggtacttcaccggctttaacgaaccggaagcgctgctggtgttgattaaaagcgattaaacccacaaccatagcgtgctgttcaaccgggttcgcgatctgaccgctgagatctggtttggacgccgtctgggccaggaggccgcgccggcgaagcttggcgtcgaccgggcgctggcgttcagcgaaatcaaccagcagctgtatcagctgctcaacggtctggacgcgatctacttcgcccagggtgaatatgcctatgccgatgagattgtgttcaacgccctcgaaaaactgcgcaaaggcgcgcgccagaatctgcaggcgccgaactcggttatcgactggcggcccattgtgcatgagatgcgcctgtttaaatccgcggaagagcttgccgtgatgcgccgcgccggggagatcaccgcgctggcccatacccgggcgatggaaaaatgccgccctggcatgttcgaatatcagctggaaggtgaaattctccatgaattcaaccgccacggggcacgtttcccctcctataacaccatcgttggcggcggcgaaaacggctgtattctgcactacaccgaaaacgaatctgaactgcgcgacggcgatttagtcctgattgacgccggctgcgagtatcgcggctatgccggggacattacccgcaccttcccggtaaacggtaaatttacccagccgcagcgcgagatctacgacattgtgctcgaatcgctggagaccgcgctgaaactctatcggccgggcacctcgatctgtcaggtcaaccaggaagtggtgcgcattatgattaccggcctggtgcggctggggatcctgaaaggcgagattgacgagcttatcgccaacaacgcccaccgcccgtactttatgcatggcctgagccactggctgggtctggatgtgcacgatgtcggtaattacgacaccgaccgttcgcgcgtcctggagccgggaatggtgctgaccgtcgagccgggactgtatatcgccaccgatgccgacgtgccggcgcagtatcgcggcatcggcatccgtattgaagatgacatcgtgattaccgaagacggtaacgaaaatctcaccgccggcgtggtgaagaaggcggatgagatcgaggcgctgatggcggcggcgcgccagtcatgagcgtgctgatcgtcgggggcgggatgaccggggcgacgctcgcgctggccatctcccgtttgactggcggcgcgctgccggtccacctcattgaagcgcaggatccgcattcgtcacgccaccctggctttgacgaccgggcgatcgccctggctgcgggcacctgccagcagctggcgcgtatcggtatctggcaacgcctcgccgaacgcgcgacgcccatccagcgagtacacgtcagcgaccgcggtcatgccgggtttgtgaatctggcggcggcggattatggcctgtcggcgctgggccaggtggttgaactccacgatgtcggccagcggctgtttggtctgctgcgcgaggcgccaggcgtcacgctgcactgtccggcgaaagtggaagcggtcagtcgcagccaggagagcgtcagccttacgcttgagggcggcgaaatcattaacggtaagctgctggtggcggcggacggttcccgttcggcactgggcgcccgctgcggcatcagctggcagcagcagccgtatgagcagatagcgatcattgctaacgtcagcaccgcgttgccccacgaaggtcgcgccttcgagcgctttaccgagcatggcccgctggcgatgctgccgatgtcgcaagggcgctgctcgctggtgtggtgtcatccgcagtcgcgccgcgatgaggtgcagagctggtctgacgaacgcttttgtcaggagctgcagcaggcgttcggctggcggctggggcgtattacccacgccgggaagcgcagcgtctatccgctggccctcaccaccgccagccgcgcggtgtcgcaccgcctggcgctggtcggcaacgcggcgcagacgctgcacccgatcgccgggcagggctttaatctcggcctgcgcgatgtgatgagcctggcggaattactcgctgacgcccatctcagcggcgaagatttcggtcattatccgctgctgtgccgctatcaggcgcgcagggcaggggataaagccgccaccatcggcgtgaccgatgggctggtgcatctgtttgccaaccgttgggcgccgctggtggcggggcgcaacgtcggtctgatggcgatggaattatttaccccggcgcgcgatgcgctggcgcagcgtaccctcggttgggttccccgttaaggagtagaacgtgcaaagtgttgatgttgccattgttggcggtggaatggtggggctggcggtagcctgcggtctacagggtagcggcctgcgcgtcgcagtgctggagaaagcagagccgcgaccgctggccgccgatgcgccgccggcgctgcgcgtttcggcaattaatgccgccagcgaaaagctgctgacaaagctggacgtctggcgcgagatcgtcgcccagcgggccagctgctatcacggtatggaagtgtgggataaagacagctttggccacattagcttcgatgaccagagcatgggctttagccaccttggctatattatcgaaaatgccgtagtgcatcatgcattgtggcagaaggcgcagcgttgcgctgacgttaccctgctggctccggcggaacttcagcaggtggcgtggggcgagaatgaagcctttctcagcctgcaggacggcagcatgctgaccgcgcggctggtgatcggcgccgatggtgccaattcatggctgcgcaataaagccgatattccgctgaccttctgggattaccatcatcatgcgctggtggcgaccatccgtaccgctgagccgcatcaggcggtggcccgccaggcgttccatggcgacgggatcctcgccttcctgccgctcagcgatccgcacctgtgctcgatcgtctggtcgctatcgccgggggaagcgcagcggatgcagcaggctgatgaaaccaccttcaaccaggcgctgaatatcgcgttcgataatcgccttggcctctgccagctggcaagtgaacgtgaagttttcccgctgaccggccgctatgcccgtcagtttgccgcccaccgactggcgctggtcggcgatgccgcgcataccatccatccgctggccgggcagggggtcaacctcggttttatggatgccgccgagcttattgacgagctgaagcgcctgcacgctcagggcaaagatatcggccagcatctttatctgcgccgctacgagcgcagccgcaagcacagcgcggcgctgatgctggcgggcatgcagggcttccgcgaaatgttctccgggagccatccggcgaagaaatttcttcgcgatgtgggactcaaactggccgatacgctgccgggcgtgaaaccgcagctgattcgccaggcgatgggcctcaacgatctgcctgcctggttacgttaaccgcgtcacacttctttcacccggcctgggcgccgggttttccccctcatttgaaatattctaatttcacctcttttttcgcattagatttattaatgcgcccttttttttgttaaagaaattagagccgtaaaatcgcataaaacaccatcattacctaattgccgcgccgttaatgttaattttatgtggcgtaaatcgcttttttccagtcaataactctgtaggcttttcggcggattttagccataagctaatgtgatgccctgaatgagcttatggtttagcgccgggttcggtggtaagttcaggccaaagataacgtttgcgtcggcgtccgtcagcgatgccgacgccgaatttcgtggcgcaaaatcgccgacaatttcgtggctggttccgttttattcgatgaggaaaagatggctcaacagactccgttgtatgaacaacacacgctgtgcggcgcgcgcatggtggatttccatggctggatgatgccgctgcattacgggtcccagattgatgagcaccatgcggtgcgcggcgatgcagggatgttcgatgtgtcgcatatgcccatcgtcgatttccacggcagccggatccgcgagttcttgcgctatttgctggccaacgatgtggcgaagctcaccaccccaggcaaagcgctctacaccggcatgctgaccgcctccgccggcgtcatcgacgacctgattgtctatttcctttctgaagattatttccgcctcgttgttaactccgccacccgcgaaaaagacctcgcctggatctccgaacaagctgaaccttacggccttgaaattaccgttcgcgacgatctgtcgcttatcgcggtccagggcccccaggcgaaagcgaaggcggcgacgctgtttaccgacgctcagcgtcaggccgtggaaggcatgaagccgttcttcggcgtgcaggcaggcgacctgtttatcgccaccaccggctataccggcgaagcgggttatgaaattgcgatgccgaacgagcaggcggctgatttctggcgcggtctgctggacgctggcgttaagccgtgcggtcttggcgcgcgcgacaccctgcgcctggaggctgggatgaacctgtacggccaggagatggacgaaggcgtttccccgctggcggcgaacatgggctggactatcgcctgggagcccgccgatcgtaacttcatcggccgcgaagcgctggagatgcagcgtgaaaaaggcaccgagcagctggttggcctggtgatgaccgagaaaggcgtcctgcgcggtggtctgccggtccgttttaccgatagcgacggtaatcaaaaagaaggcattatcaccagcggcaccttctcgccgacgctgggctacagcatcgcgctggctcgcgtgccggccgggattggcgacaccgcggtggtgcaaatccgtaaccgtgaaatgccggtaaaagtgactaaacctggttttgtacgcaatggcaaagccattgtgtgatttcccttttttggagatgaattgatgagcaacgtaccagcagaactgaaataaagcaaagaacacgagtggctgcgtaaagaagcggacggtacctataccgtagggatcaccgagcacgcgcaggagctgcttggcgatatggttttcgttgacctgccggaagtgggcgccaccgttgaagcgggcgccgattgcgcggttgccgaatccgtgaaggcggcctccgatatctacgcgccgattagcggtgaaatcgttgccgtcaacgaagagctgaacgactctccggaactggtcaacagcgacccgtataccgacggctggatcttcaagatcaaagccagcgacgaagcgcaggttgccgcgctgctggatgccgccgcgtatgaagctttactggaagacgaataaatacgcttcatccttcacgctgcaggggcgttggcttcctggctccccccggtcacttacttttgtaagctcccggggagtcgctgtgtcgccgccttcctgcaacgcgaatgattttgcgtattctggcccggtaagcatcagcgcttgccgggcaaaccagtcagacaaccacgattcaccgcacgtttcaggaaccatcgctcatgactcagactttaagtcagcttgaaaaccgcgacgcctttattgaacgtcacattggcccggacgctcagcagcagcaagagatgctgaagaccgtcggcgcggattcgcttaacgccctgatcggccagattgtgccgcaggatatccagctggcgaccccaccgcaggtgggcgacgcgactaccgaattcgccgcgctggcggagctgaaggcgattgccagtcgcaacaagcgcttcaagtcttacatcggcatgggctataccgccgtgcagctgccgccggtcattcagcgcaacatgctggaaaacccgggctggtataccgcctataccccttaccagccggaagtatcccagggccgtctggagtcgctgctcaacttccagcaggtcactctggatctgaccgggttggatatcgcttccgcttcgctgcttgatgaagccaccgccgccgccgaagcgatggcgatggccaaacgcgtcagtaaactgaagagcgccaaccgcttcttcgttgccgccgacgtccatccgcaaaccctggacgtggtgcgcacccgcgcggaaaccttcggcttcgacgtcatcgtcgatgacgccgacaaagtgctcgatcaccaggatgtcttcggcgtgctgctgcagcaggtgggcaccaccggcgaaatccacgattacagtaaactgatcgccgagctgaaagcgcgcaaagtgattgtcagcgtcgccgccgactttatggcgctggtgctgctgacggcgccgggcaagcagggcgcggatatcgttttcggttccgcccaacgcttcggcgtgccgatgggctacggcggcccgcacgcggccttcttcgcggcgaaagatgaattcaaacgctccatgccgggccggattatcggcgtatcgaaagatgcggcggggaataccgcgctgcgcatggctatgcagactcgcgagcagcacatccgccgtgagaaagcgaactccaacatttgtacctcgcaggttctgctggccaacatcgccagcctgtacgcggtattccacggcccggcgggtctgaaacgtatcgctggccgcattcatcgtctgaccgacattctggccgacggcctgcagaagaaagggctgaagctgcgccatgcccactacttcgacaccctgtgcgtcgaagtggcggataaagccgcggtgctggcgcgtgccgaagccctgctgattaacctgcgcagcgatattcacggcgcggtgggcattacgctcgatgaagcgaccacccgcgaagatgtgctgaacctgttccgcgctatcgtcggcgacgatcacggtctggatatcgataccctggataaagacgtggcgctggatagccgttcgatcccggcggcgatgctgcgcgacgatgcgatcctcacccatccggtgtttaaccgctaccatagcgaaaccgggatgatgcgctacatgcacgccctggagcgtaaagatctggcgctgaaccaggcgatgatcccgctgggctcctgcaccatgaaactgaacgccgcggcggagatgatcccgatcacctggccggaatttgccgagctgcacccgttctgcccggtcgagcaggcggaagggtatcagcagatgatcgcccagctttccgactggctggtgaaactgaccggctatgacgccgtctgtatgcagccgaactccggcgcgcagggcgagtatgctggcctgctggcgattcgccactatcacgagagccgcaacgaaggccatcgcgatatctgcctgatccctagctccgcgcacggcaccaacccggcttccgcgcagatggcgggtatgcaggtagtggtcgttgcctgtgataaaaacggcaacatcgatctcgccgatctgcgtgaaaaagcagagcaggcgggggccaatctctcctgcatcatggtcacctatccgtcgacccacggcgtgtatgaagagaccattcgcgaagtgtgcgagatcgtgcaccagtttggcggccaggtttatctcgacggcgccaacatgaacgcccaggtcgggatcacctctccgggctttatcggcgccgacgtttcgcacctcaacctgcataaaacgttctgcattccgcacggcggcggcggtccgggcatgggcccaatcggcgtgaaagcgcacctggcgccgttcgtgccgggccacagcgtggtacagattgaagggatgctgacccgccagggcgcggtttccgccgcgccgttcggcagcgcgtccattttgccgatcagctggatgtatatccgcatgatgggcgcggaagggctgaagcaggcgagccagaacgcgatccttaacgccaactacatcgctacccggctgaaagacgcctacccggtgctctacaccggtcgcgatggtcgcgtagcgcacgaatgtattctcgatattcgtccgctgaaagaagagaccggcattagcgagctggatatcgccaagcgcctgatcgactttggcttccatgccccgaccatgtctttcccggtagcggggacgctgatggttgagccgacggaatcggaaagcaaggtcgagctggaccgctttatcgacgcgatgctggcgatccgcgcggaaatcgaccgcgtcaaagccggcgaatggccgttggaggataaccctctggtgaacgcgccgcacacccagggcgagctggtgggcgagtggaaccatccgtacagccgcgagctggcggtattcccggcagggttgcacaacaagtactggccgacggtgaagcgtctggatgatgtctacggcgaccgcaacctgttctgctcctgcgtgccgatgagcgaataccagtaagtttgcgttttagctaaacttttaaaggcgctgcggcgcctttatttttttggagggaaggtatgggaatagctcttattagcggcgcgagccgcggcataggccgggcgacggcgctgctgttggcgctggaaggatataccgtggcggtcaattaccatcacaacattaacgccgccaccgaggtggtgaataccattgtggcgtctggcggcaaagccacggcgctgcgggcggatatcagcgatgaagcgcaggtgatggcgatgtttgaggcggttgaccgcatgggcgaaccgctggcggcgttggtcaacaatgccgggatcctgtttacccaatgtacggtagagagcctgagcgccgagcgtattaaccgcgtactggccaccaacgtcaccggatactttctttgctgtcgcgaggcggtaaagcgcatgtcacatcggcatggcggcaagggcggggcgatagttaacgtgtcgtcggcggcgtcgcgccttggcgcgccgggggagtacgttgactatgccgcgtcgaaaggggcggtagataccctgaccaccgggctggcgctggaggtggcggcgcaggggatccgggtcaacggcgtgcgtccggggctgatttataccgagatgcacgcctccggcggtgagccgggacgcgtggatcgagtgaaaggttcgctaccgatgcagcgcggcggccagccggaagaggtcgctcaggccattgcctggctgctgagcgacaaagcgtcgtatgtgacgggtagcttccttgaactggcgggcgggaaataacccgtagatgtctattgcccggcggcgctgcgcttgccggccctacggggtcaaagccgaatggtaggccgggtggcggatacgccttacccggcataaaaaccgctaaagcccgacggcctaccaggaggccagccacagccgcaggcgcattccccaactgctggtccagccggtggtaaccgactttacctcgccttgagaaatgaccaccagcgttggcgttacctggatatcccattgccgcgccagctggccgcttggatcattcaccgtcggcagcgtcattttcttcctggtcagccacttctccagcgtgacgttatcgccggaacgcagggctaccgtcagcacattgccgccgtcggcggcaagcgatgccaccgacggcgtggtatagcgacaaactccgcaccaggtcgcccagacgtacagcagcagcggcttttgctggcttatggcgttcagatccagcgtcctgccgtcgagtgtctgcagcgatgtggcgctgacgttttgcggcagcgcgggctggcgaaaataatccaccgccaggctcaccgccgcgccaatcagcagccacaccgccagctcgcgcagccagcgcctgattttactggccacgggctttcgccagctgttctttcaccagcccctccagctcatcagcagggatcgcgccggccaccatctgatcgccgatgatggtcgccggggtgccctgaatattcagcacctgcgacaaaatcaggttcatcttcagcgaatccatggtcttgtcatcgatatttacgctatcggtagcggttttcttctgcgcggcggcgatactggcgtcatcgtgatagccttttttcgccatcagccgctgatgcagcgcccagaatttatcgggctgctgacgccaggtggagagcgcgattttagcggcattcaccgaactctgccctttaaacggcagcagcttaacgatgagctggatgtccggattatcgtggacgattttttccagcagcggatcaaactgtttgcagtaagggcagttgtaatcggtaaacgagacgattgtgagttttggctctttcgcgccggtgcgcgggctattcggatcgttaaacagcagctgggctaactggtcattaccgttcgattgtggttcttccgccggggcggcgaagctgaaggccgatacgcacagcagtaataaggcggtgatagctctcatgttattttcctttagcggcggacagggtagcgataagttgttcgcggtctaacagcgcaggcagaatctgtccctgcggcaattccggtccgtaaatctggttaaacggcaccgcggcgctgccgcgtgcggttaaaaactggctaatgtcagcggaggggcggctccagtcgccgcgcagggcgactacgtctggcgctaacagcgcctgctggacgtcgtcgcgcagcagcacgttgtatttattggctttacaggtcacgcaccagtcggcggtgacatcaataaatacccgcttatgctccgccagggcgctggcgatagcctgctcgctgagcggctgccagttaacccggtcgcggcgcgggccctggccgtcctgttgggcgacaaaggcgacggcgcccgccaccacgatggccagggcgcccgcgcgcagcgccgtccgccagcggtagcgccaggcggtggccactagcagggcgatggccagaatcaccagcagggtaagcaccggcgtacggccgatgtggatcgtcagcaggctgaccagccatagcgctgaaccaagcatcattagccccagcaccacccgcagatgattcatccagcggcccgggcgcggtagacgttgcgccagacccggccaggcaacgatcagcagccacggcaggctcatgccgatccccatggcgaagaaaatgccccacagcagcggcaggggcgccaccagcgccaccgacacggcggtaccgaggaacggcgcggtacagggcgtcgccagcagggtggcgaaggcgccctgccagaaatggcccattaagccgttgccgccgcgggtggcgaggaaagtgctggcgctggaggagaggcggatttcgaacagccccaataaactggcgctgaacagcaccatcaccagcgccatcgcgccgataaaccacgggttctggaactggatgccccagccgagcgcctgattccccaggcgtagcgcggtcatcatcagcgccagcgccaggaacgagacgacgatcccgcacaccgaggcgaggaactgccgccgcaccgcgccgcgttcgcgacgttcggtttgcaccagcgagccgagtttcatcgccagcaccggcagcacgcacggcatgacgttgaggattagcccgccggccagcgccatcagcagcacccagcctaacgccagccccggcgcggcgctgccggcggcgatggcgatatggctttcctgcgcctgaccgctatccgccagcaccagcgacagcgttttgccgctcaggtccggcgccgcttcgccccagctatcggtgaccggtacggtggtggtcaacgtatcgccgcggctggtaaagctcggcttaccgaaatcgacatcctccatgctgtcgataaacagcgctggctgctgccagccggcatcgcggcgggcggtcaccgtcagtttgccgctgacgtagctggcggtcagttgcgaagtcaggccatcgcgcagcggcagtgtgcccatcgcgcgggtaaaatcataattaaatcgctcccccgccggagtcgtcatatccagcgaaaagggatagtcagtgagaatacagacattgctgcaggtagagagcgtcaggacgccgctaagcgtcggtggtatcttcccgcgcagcgtcatcggaaagctgacgtcgccgtgatagccctgagtggaaatgcccgcgacgtcgaagcgctgcggcgtcggccagcgccagttcacctccagcggcgtgtgccaggcgatagccggcgcgatgccgccttcccctggcgagcgccagtaggttttccagcccttttccagcgctacgtctaaaagcaggcgagtgtcgccattgctctcggtttgcgcccgcaggcgcacgctggcgtgttgattgtcggcggcgcgcagccagccgctgtcggcggcctggctgacgggcagccatagccaaagcaggcagaccagtagtcgcctgaataccatatacataagtttgctccgtaagtgatgaattaacctgaactgtcaggagaatcaatcactcacggaagacgcataatcgcagatgcacccgcaatcggggtgaggagataacgcggggaggccactggcgttcgatacgcggcgggatcgccgccagcaccgccagcagcagggtgatagccaacagtgccccttcaaacagcatcggcggaacggccatcagcgacttggcgctgagctcgcacggcgtgaccggcgcctcggcctgatcctggtttttctgtagcgacgggctgtcggcggtgaggttcatgaccagcgcgtgcatcccggccatccgttgagcggtgcaggttagcaccaccagacaggccaggaggacaaaaagaatggctttgcgttgtcgcttaatcatgattgcctcaaatattcacgaggcttatcttaacgggcgaacgggttttggcaatggtaaagctgtaaagaagtgtctggcggataagcaattagccctcccccggccgggagagggcggttagttacaggttctcaccgttgctggcgatgacctctttgtaccagttaaagctcttcttgcgcgagcgggacatgtcgccggtgccatcgtcgtgtttgttgacgtagatgaagccgtagcgtttgctgtactgcccggtggtgaaggagacgcagtcgatgcagccccatggggtatagcccagcagatcgacgccgtcataagtgaccgctttgatcatctcttcgatgtgggcgcgcaggtagtcgatgcggtagtcatcgttgatgctcccgtcggattctactttgtcgtaggcgccaaagccgttttccacgataaacagcggcttctgataacgctcatacagttcacacagagaatagcgcaggccgaccgggtcaatctgccagccccagtcggaagctttgacgtgcgggttcggcacgctgccttcgaaaccggaaatggcgtcgccagtgccgccctcggctttcaccgcgttggtcatgtagtagctgaagccgagataggcgcaggtaccttcgcgcaggatctgcgcgtcgccgtcttccatcctgatgttgaagccgcggcgttcccattcattcaacacatagctcgggtagtaaccgcgcagctggacgtcggtaaagacgtagcgctcgcgcatcgactcctgggcgaacatgacatcttccggtttgcaggagtaagggtagagggcgaccatcgccagcatgcagccgacctgcatgtccgggttgatgcgccgcgccgctttcaccgccagcgcgctggccacgaactggtggtgcagcacctggtacatggtctcttccggattgtcatgctcggtatagaccaccccggagcagcagtagccgaacagcggcgcgcgccagttgcgctggttgttgatctcgttaaaggtcatccagtatttcactttgtgcttatagcgctcgaagaccacttcggcgaagcgtacaaagaaatcgaccactttgcggttggtccagccgccgtactgctgcaccaggtgcaggggcatctcgaagtgggagagggtgatcaccggctcgatgttgtatttcagcagctcgtcgaacatgtcgtcgtagaacttcagtccctcttcattcggctgggtttcgtcaccctgcgggaagatgcgggtccaggcgatagaggtgcggaagcacttgaagcccatctcggcgaacagtttgatgtcttctttgtatcgaccgtagaagtcgacggcttcgtggttcgggtagtattttcccgcttcgacctggtgggtgatttcgcgcggcacgccgtgcgccccgccggtcaacacatcgcagatgctggggcctttgccgccctgatcccagccgccttcaacctgatgcgcggcgaccgcgccgccccataaaaaatctttcggaagggttaattttttcatcctggctaatctctctaataactattgttctggagtctagcaaagtgaaagtgaatgtcacgatataacaaattccgccaaaggtaatatgttacatcaaaaaaacaggctgttatttttagctgattttgcgcgctaatttacgtccgagggattcgagaatatagatcactggaatttgcgttgtaatatcgtagacgccgccaatgcgcgtctgcggcacgtgccaggagagattgaaatcagccagtttggccagccgcgaatgctcatggctggtaatcgacatcaccttgcaatgatgcaggctgaactggctggcaaagcgcaggatctcttccgtctcgccagagacggaaagcacgatcgccagcgcgttgcgggccatatcgttggttacaggaaaataggggtcgtcaatatggttgctgaatttaccgacgttggagaagaagcgtgcgccatatttcgccagcgcgccggaggtgccggcgccgacaaaaataatacgttcggaggcgagaataatatcgacggcctgctcgagtaattcatcaaactcgtcattattgacgcttttaaaaaagctcattatttcgctggcgccgatatttgcctgttgaggctcattctgctcgagatataatttaaagcgcacgcgaaattcagagtagccctcgcactgcagtttgcggcagaagcgtaacacggtggtcgtggagaccccggcggcctcggccagttcgcggatggtcatgtacatcactttgtcacgatttttaatgacgtagtggtagaccatcatctcaagattattgagactggcgacagcggcgtgggagaacatactcacagggcgaactcacaattcataatgaccaggacggaattatatcatgcaggccaatgacattaccttttttcagcgttttcaggacgacatcctcgccgggcgcaaaaccatcaccattcgcgatgcagcggagtcgcactttaagcccggcgatgtgctgcgcgttgggcgctatgaagatgacggctatttttgcaccattgccgtgaccgcgacctcgacggtgacgctcgatacgctgaccgaacagcatgcgcaacaggagaatatgactctcgggcagctgcggcaggtcatcagcgacatctatcctggcgagagccagttttatgtcattgaattcaaaacgctttaagataatcaggaacagctgtgagttgaaataaaaatgtaactttatgattttaaagtatttacaaatatacatcgttttattttagctaacaggtgttcactggaatcattctcagttaccctaagtgggcaatgaaagcgttcttgttttcacggagtccagtatggttcgcaaaccattaatcactcagggatattctctggcagaggaagttgccaacagcatcagccacgggatcgggctggtgttcggtatcgttggccttgtgttgctgctggtgcaggcggcggatacaaacgccagcgcgacggcgatcgccagctacagcctgtacggcggcagcatgattatgctgttcctcgcttccacgctctatcacgcgatcccgcatcagcgggcgaaacagtggctgaagaaattcgaccactgcgctatctacctgttgattgccgggacctacacgccgtttttgctggtggggttgaattcaccgctggcgaaggggctgatgatcgtcatctggagcctggcgctgctggggatcctgtttaagctgaccatcgcgcaccgctttaaaattttgtcgctggtgacctatctgaccatggggtggctgtcgcttatcgtggtctatcagctggcagtgaagctggcggtgggcggggtaacgctgctggcggttggcggggtggtgtactcgctgggggtcatcttctacgtctgcaaacgtattccttataaccacgctatctggcacggcttcgtgctcggcggcagcgtgtgtcacttcctggcgatttatctttacatcggccagtcctgataaacatcccacggtggcgctgcgcttaccgtggctacaaaatactgcggccgggtagcccggctaaggcgcaagcgccgcaagccgggaacttttccttaattttcttccagcgaatacggcaatggtttgatgctcaggctgccagcatcgtcgcgtacacggaacacgctgtccggttccatgtcgttattcatcactacctggaccatcaggcttccgtcatccagctgtacggctgccagcaccgtaccggtgcggcgccagttgtcgcccatcttcagctccaggtcttccccggcttccggcacccggctggcggtccctgacagcgtccacagcgcgcgcttattggcgccgcggaatttcgccctcgcgaccatttcctggccggtgtagcagccttttttgaagctgatgccgcccagcgcctgcaggttggtggcctgcggaatgaactgcccgctgttggcgctgtcgataaccggcagaccggcttcaatattcagcgccagccactgttggctgttgttaaactgcgcttcgccgcgcaacgcgtcggtgacgcggttggcggtgtcgacatcggtcaccagcaggaagcgctcgcccgggtgttcaaaccacagcaggctggtagcgccttcgctgaccaccggggtggcagcgtcgggcaaggcggcgaacagcggcgccagcgcggcgcgcgcctggaagccggccacccccagcagaaccagatcgtcgttggcggcgatggtgactttggagaagacggcatattttttcagctcggtcagctgcgcgtcgcgcaggctgcggcgctcaatccacgcgaagccgccctcgcgacggaatacgcgcaggttgctccacatcttgcctttggcatcacagtgggcggcaagcagatgctgggcatcggtgagatgactcacatcggcggtaatctgcccctgcagatatttttcgctgtccggcccgctaattgtcgccagcgcccagtcatccagggtcatcagcgttaacggcagacgagcggaagaggaaggctgacgcggaggaaaaggtgtaaaagccatagtcatatcctgaatcgcttaacgcagtgtgtgtgaccaatggtaaaagagctatagtgcattgcaagtgctttcaacaggccatttgtgcgctggcgtgagacagccgcctgacgcagggaatcaataaacccatcattattttaaggtttttatggaaggatgctcgcattcagcgatattcctgtaaagttacggcagaaaacgggttaaactaacctatattttgctgctggaaggtcaacatggacattaacaataaagcacgtatccactgggcatgccgccgcgggatgcgcgaactcgacatctccatcatgccgttctttgagtatgagtacgataccctcagcgacgctgacaaacagctgttcattcgcctgctggaaaatgacgatccggatctgttcaactggctgatgaaccacggcaaaccggccgatgcggagctgcagcggatggtaaccttaattcagacacggaatcgggaacgtggtcctgtggcaatctgatctccgtatctcctggcgcgcgcagtggttttccctgctgcttcacggcgtggtggcggccctggtgctgttggttccctggccgctgagctataccccgatctggctgctgctgctgtcgctggtggtcttcgactgcgtgcgcagccagcggcggatccatgcccgtcgcggggagataaaactgctcaccgattcccgtcttcgctggcaaaacgccgaatgggaaatcctcgggacgccgtgggttatcaatagcggtatgctgctgcgtttgcgccatgtcgatacccggcgcggacagcatctttggctggcggcggacagcatggacgccggagagtggcgcgatctgcgccggctggtgctgcaaaaaccggcgcaggagtaagccgcgtcaggaaaagtgttcggccatttcgccgaggatctgctcgcaccagctctggatgcgctcgtcgctcaggtcgtactggttggtttcatccagcgccaggccaacgaacagttggccatcggcgatcactggtttcgggctggtgaactcatagccttcggttggccagtagccgacaaacttcacgcccttggtcgccagcttgtcatgcagcatgccgagcgcgtcaaggaaccattcgccgtagcccagctgatcgcccatgccgtacagcgcgacgatctttccctcgaggttcagggtgtccagctgatcccagaccgcttcccagtcttcctgaatttcgccgaaatcccaggtcgggatgccaaggatcagtacgtcgtactggctcatcagcgcgggggagtcatctttcagattgtgcagcgtcaccagctcggggccgatgatatcgcggattttctccgcggccatttcggtgtagcaggtactggagccgtaaaacagacctatattcatcgcgtaaacatctcgattcttgccgtgaatggcgggcagtgtaccagaaaggcgtcctcttaaggcataatgagagcgtttaacgaacaatgaggccgatgtgaaacaggatctggcactaatcgaacagtttctcgatgccctttggctggagcgcaacctggcggagaatacgctcagcgcctaccgtcgcgatttgacgatgttagttgagtggttgcaccatcgcggcctgtcgctggcaagcgttggcagcgacgatctgcaggcgctgctggctgagcggcagtccggcggctacaaagccaccagcaccgcgcgcctgctgagcgccgtgcgccgttttttccagcatctgtaccgggaaaaaattcgcccggacgatcccagcgcgctgctggcctcgccgaagctaccgcagcggctgccaaaagatctcagtgaggcgcaggttgagcgcctgctgcaggcgccgctggtggagcagccgctggaattgcgcgataaagcgatgctggaggtgctgtatgccaccggcctgcgcgtctcggagctggtggggctgacgatgagcgacatcagcctgcggcagggcgtgctgcgggtggtgggaaaaggcaacaaagagcggctggtgccgctgggggaagaggcggtactgtgggtggaaaattacctcgagtatggtcgcccctggctgctgaacggcgtggcgtcggatgtcttatttcccagccagcgcgcccagcagatgacgcgccagaccttctggcatcggattaaacactatgccgtactggcggggatcgacagcgaaaagctttccccgcacgtgttacgccatgcgttcgccacgcatttgctcaatcatggcgccgatctgcgcgtggtgcagatgctgttaggacacagcgatctctccaccacgcagatatacacccacgtggcgaccgagcgtctgcgacaacttcatcaacagcaccacccgcgggcgtgagtgctgaacaaaaggactgagtatgaaaaaaggtttattgatgttcaccctgctggcggcctccctttcaggagcggcgcacgccgatagcgcggcaattaaacagtcgctggcgaagctgggtgtgcagagcaccgatattcaaccatcgccggtttccgggatgagcacggtgctgaccgacagcggcgtgctgtacgtgaccgacgacggcaaacatattatccaggggccgatgtacgacgtgagcggcgcgcagccggtcaatgtcaccaaccagctgctgctgggtaagctgaacgcgctgagcaatgagatgattgtctacaaagcgccgaaggagcagcacgtcatcaccgtcttcaccgatattacctgcggctactgtcataaactgcacgagcagatgagcgactacaacgcgctggggatcaccgtgcgttatctggccttcccgcgccagggtctgcaaagccaggcggagcaggacatgaaggccatctggtgcgcgaaagatcgcaacaaagcgctggatgacgccatgaatggtaaaggcgtgcagccggcgagctgcagcgtagatatcgccaaacattacaccctcggcgtgcagatgggcgtcaacggtacgccggcgatggtcctcagtaacggcatggtgctgccgggctatcaggggccgaaagagctgaaggcgttcctcgatgagcacaaaaaacagacaagcggtaactgattcgcgtgaaacaacagatacaactacgccgccgcgaggcggttgacggcgtcgaactccccgccgacctgccgccgctgctgcagcggctatatgccagccgcggggtgcgcagcgcgcaggagctggagcgcagcgtcaaaggcatgctcccctggacgcagctcaccggcgttgaaaaagcggtcgagatgctacatgacgcgttccagaaagggttgcacatcgtggtggtcggtgattttgacgccgacggcgccaccagcaccgcgctcagcgtgttggccctgcgcgcgctgggttacggcaacgtctcctatctggtgccgaaccgctttgaagacggctacggtttaagcccggaagtggtcgatcaggcccatgctcgcggcgcgcagatgatcatgaccgtcgacaacgggatctcgtcccatgccggcgtcgatcatgcccatgcgctggggatcccggtgctggtgaccgatcacccccctgtcgcgtatacacatctgacgccgccgacgagcgagctagtgtagatcccgagggtcgccgggtcagtgaagaaaaaaaaacgagaacaaaaaacaatagaaggacagagagaaaaacacagcgggaaggacgcacgcaatatgtagtcaatacata

SEQ ID NO: 176 - DNA, 32950 bp, Unknown
  source: /note="Description of Unknown: MKP2_2161_1 Mutant Bacteria sequence"
atccggaatggcgccaatggcaccgcggcgccgcgccaggcgaccgagcgtcagacagcagcgaccccgcgtccggctgaacgtaagcataccgttatcgaagcgaagccgcagtcgaagccacaggccgtggcgaaaacgccggtagaatcgaagccggtccagccgaagcatgttgaaagcacggcgaccaccgctccggcgaaaacgtccgtcagcgaaagcaaaccggtggccaccgctcagagcaaaccgaccacgacgaccgcagcgccagcggcaacggcagctgcggcagcgccggcagcgaagaccgggaagacggcaggtgacgtcagctcaatgaaaactgcgccgtcgggtcactatactctgcagctcagcagctcctctaactacgacaacctcaacaactgggcgaagaaagagaagctggataaatatgttgtctatgaaacgtcgcgtaacggccaaccatggtacgtgctggtgagcggtatctatgcatcgaaagatgaagcgaaacgtgctgtcacctcgctgccggcggacgtgcaggcgaaaaatccatgggcaaaaccgctgcatcaggttcaggctgacctgaaataatgccgtggggtagtcttaagcgcaggatgctgtcggagctttctccacagccggagaacgtgtaattagttaggcagcatgaaaaagaatcgcgcttttctgaagtgggcagggggaaagttccccctgcttgacgatattaaaaagcatttgccggaaggcgagtgcttgatcgagccctttgtgggcgccgggtcggtatttcttaataccgacttttctcgttatatcctcgcggatatcaacagtgacttaatcggcctgtacaacatcgtcaaactgcgcaccgacgaatacgtcgccgccgcccgtgagatgtttaccccggaaaataacgtcgctgagcgctactacctgtatcgtgatgaatttaaccaaagccaggatccgctgcgtcgcgcggtgctgttcctgtatttgaaccgtcacggctacaacggcctgtgccgctacaatctgcgcggcgagttcaatgtgccgtttggccgttataaaaagccctatttccccgaagctgagctctatcatttcgccgagaaggcgcaaaacgccgagttttactgcgaatcttacgaagagtgcatgcaacgtgcggatagccgcacagtggtgtattgcgatccgccctatgcgccgctaacggcgacggcgaactttaccgcctaccacaccaacagtttcaacctggaacaacaggtactgctggcgcaaaaggcggaatcgctgatgaaaaagcgcatcccggtgctgatttccaaccaccgcacgccgctgacgcaggaatggtacaaaaacgcggcagaaacgcatattgtgaaggtgcggcgcagcatcagcagcaacggtggtacgcgtaaaaaggtggacgagctattagcgctctaccgtccgcctaagaccaaataaatttcaaggagatgcggatgaagcagtatttgattgccccttcgattctgtcggctgattttgcccgtctgggtgaggataccgcgaaggcgctggcggcgggtgcggatgtcgtgcacttcgacgttatggacaaccactacgtgccaaacctgacgattggcccgatggtgctgaagtcactgcgtaattacggtattaccgcgccaatcgacgttcacctgatggtgaagccggtcgaccgcatcattcctgattttgccgaagccggcgccagcattatcaccttccatccggaagcctccgaacacgtcgatcgcagcctgcagcttatcaaagagcacggctgtaaagcgggcctggtgtttaacccggcgacgccgctgagctacctcgattacgtgatggataagctggacgtgatcctgctgatgtcggttaacccgggctttggcggccagtcctttattccccagacgctggataaactgcgtgaagtgcgccagcgcatcgatgcgtccggctacgacatccgcctcgaagtggatggcggcgtgaaagccagcaatatcggcgaaatcgccgcggcgggtgcggatatgtttgttgccggttcggcgatcttcggtcagccggactacaagcaagtcattgatcaaatgcgtatagaattagcgaaggtgagtcatggataaattacaggcgatccgcggcatcgcatttgatctcgacggcacgctggtggacagcgcgccgggtctaacctcggcggttgataacgccctgtacgccctggagctgccggtggcgggagaagaacgcgttatcacctggatcggtaacggcgccgatgtcctgatggagcgggcgcttacctgggctcgtcaggagcgagcaacgttacgtgcggcgatgggtaagccttctgtcgacgatcatgatattccgcaagacgagcagctgcgcattttgcgtaaactgtttgaccgctattacgccgaagcggcggaagagggcagtttcctgttcccggcggtggccgatacgctcggcgcgctgcatgccaaaggcctgccgctggcgctggttaccaataagccgacgccgtttgtcgccccgctgttggacgcgctcgatattgcgaaatattttaccgtggtgattggcggcgatgacgtgcagaataaaaagccgcatccggaaccgctgctgctggtggcggaaaagctctctctggctccagccgagctgctgtttgtcggcgattcgcgcaatgatattcaggcggccaaagcggcaggctgctgctctgttggtctgacctacggttataactatggtgaaccgcttgcgctgagcgagccggactatctcttcgaccagtttaacgaactcttacccgctctcgggttaccgcacagtgaaactcaggaattgaaacatgactaagcccatcgtttttagtggcgcacagccctcaggtgaactgaccattggcaactatatgggtgcgctgcgtcagtgggtaaacatgcaggacgattaccactgcatctattgcatcgtggaccagcacgccatcaccgtgcgccaggatccgcagcagctgcgcaaggcgacgctggacaccctggcgctgtatctggcctgcggcatcgacccgcagaaaagcactatcttcgtgcagtcgcacgtgccggaacatgcccagctaggctgggcgctgaactgctacacctatttcggcgaactgagccgcatgactcagtttaaagacaagtcagcgcgctacgcggagaacatcaacgccggtctgtttgattatccggtactgatggccgctgacattctgctgtaccagaccaaccaggttccggtgggcgaagatcagaaacagcaccttgagctaagccgcgatatcgcccagcgttttaacgccatctacggcgatatttttaaagtgcctgagccgtttatccctaaatccggcgcgcgcgtgatgtcgctgctggagccgacgaaaaagatgtccaagtccgacgacaaccgcaacaacgtcatcggcctgctggaagatccgaaatcggtggtcaagaagattaaacgtgcggtcaccgactccgacgagccgccggtagtgcgttacgatctgaaagagaaagcgggcgtctccaacctgctggatatcctctccgcggttaccgggaaaactattcctgagctggaacagcattttgaaggcaaaatgtatggccacctgaaaggcgaagtcgccgaagcggtatcgggcatgctgattgacctgcaggagcgctatcaccgtttccgtaacgacgaagcgtttctcaatcaggtgatgaaagacggtgcggaaaaggccagcgcgcgggcttctcaaaccctgaaagcggtatacgaagcgattggctttgtcgccaagccgtaagcgacgcaacagctaaaagggcgggatgctatcccgcccttttttatgcctgtcactttatgggaggcaaggttaatggttcgaaaaccagttcagtttatcccgcagaccgaccacgcggccgacgatgatcagcgccgggctggccatctgctgcgccagaatatccagttgtcctaaggtgccgctgaccactttttgcgtcacagcggtgccgttctcgacgatggcggcgggcatatcttcagccatgccgtgagcgataagcttctcgcggatcgccggcgcctggttcagacccatgtagaacaccagggtttgcttctccaccgccaggttcgcccagtccagctcgccgccggttttcaggtggccagtgaccaggcggacgccctgggcgaaatcgcggtgggtcaaagggatccccgaataagcggagcagccggaggcggcggtaatgccaggcacaacggagaaggggatgcccgcctcgcaaagcgtctccagctcttcccctccgcggccaaagataaagggatcgccgcctttcagccggaccacgcgtcttcctttttgcgcttcgcgcagcaggatctggttgatctcctcctgcgggacgcagtggtagcctgagcgcttgccgacgaacacccgatcggcatcgcggcgcaccagattcatgatgtcatcggagaccagccgatcatagaccaccacgtcagcctgctggatctgctgcaggcctttgagcgtgagcagcccggcgtcaccggggccggcgccaaccagcaccacctcgccgcgatgctccaacggctccgtcagcaactgctcagtggtatccgcgactgcctgccgatcgtcattagccagcgactgcgccagacggtcgttaacaaacagcttctcccagaagcggcgacgctcgcctacggtggcaaactgctgcttaacccgcgcgcgcagatggccggcatagcgggccagctggccgagatgcaggggcagaattgactccagtttctcgcgcagcaggcgcgccagaaccggtgatgtcccgcccgaggagacggcgaccatcagcggcgagcgatcgattatcgacggcatgataaagctggcctggcgcggggcatccaccacgttacagaagatacgccgcgcttcggccgcctcgctaacctgctggttgaccgtctcatcatcagtagcggcgatggccagccagcagttatccagcagcgaggggataaactccccctgcaccagagttagcatctgtgaatcagcccacacctgaaactggggcgtgaagtcgagcgcattgaccgtgacgttagcgccagcatccagcagcagacgggctttgcgttcggcgacatccccgccgccaaccagtaaacaatcgcgctggcgcaactggcagaatatgggtaagtgatccacagaataacctcataaaaataaggggtagaaaacgagtggtcgtagaatagcagcaaaggtaatacaaaacatgcgacatatcccgcactcatgcgctgtcggtcagaactgttacttatatctccccccgtggccggggggagggagaaggacttacgctttaagctgaacgtgtccgtctttcacgcgggcgtcgaagcgggcgatagagtggctggcatcttccatgcacaggccgtcgctcaggcggaagcgctgttttttcagcgggctggcgacccatagcgcgccgtcatgctcggcgataatcccgcgagacagtacgctggcgttgaagaacggatcaatgttgctgatggcgaataccctgtcgtcatggtagggacggaagatcgccacctgctgctgaccgagcagggcgcagacgccggtggccggcaggatgtcgtcgatgctgcagatatttacccactggctcatgctttttcctccaccagagtaaccgggatacgctcatacggcgtggccgggcggtgctggtcacgttcgggcaccacctgaacgttcgggtcgcgctggtcgctgttgataaagtgtttgaagcgggtctgcgccgccgggttgttgacggtctcggtccactcgcaggcgaaggcggcgcgcaggcgagccagctcttcttccagatggtcgttcagaccgagcttgtcatcgatgatgacgctgcgcagatagtcgataccgccttccatattgtccagccacggggcagtgcgggtcagcttatcggcggtgcggatgtagaacatcataaagcggtcgagatatttgatgagcgtatcgcgatcgaggtccgcggccagtagatcggcgtgacgcggtttcatcccgccgttaccgcacacgtacaggttccagcctttctcggtggcgatgatcccaacgtctttaccctgcgcttccgcgcattcacgggtgcagccggagacgccgaacttcattttgtgcggggtgcggatgcctttatagcggttttccagttctacgccgaagccgacgctgtcgccaacgccgtagcggcaccaggtgctgccgacgcaggttttcgccattcgcagcgctttggcgtaggcgtggccggtttcgaatcccgcttcaatcagctgccgccagatctccggcaggtcgtctttctgcgcgccaaacaggccgatgcgctgagagccggtgattttggtgtacagattgaattcacgcgcgatgcggcccacggcgaccagcccttccggcgtgatttcgccgccagctgagcgcgggatcaccgaataggtaccatctttctgaatgttggcgaggaagttgtcgttgctgtcctgcagcggcgtgtgctgcggcttgaggatgtactcattccagcaggaggccagcagggaaccgacggtcggcttacagacttcacagccgtagccctgaccgtgtttttccagcagctcgtcgaaggttttaatgccttccacgcggatcaggtggaacagctcctgacgggagtaggcgaagtgttcgcacagattgttgttgacctcgatgccctgtttcgccagctcggcgttgagcacctgagtgaccagcggaatacagcccccgcagccggtcccggctttggtttccgctttcagcgccgccacggtgtggcagcctttgttgatagcggcgatcaggtcgcctttgctgacgtcaaagcaggagcagatctgcgcgctgtccggcagtttatccacgccgatcgatggcttgccgctgccggcgtgggccgggaggatcagcgaatccgggttttccggcagctcgatggcgttgagcaccagctgcagcagattgccgtagtcgctggtgtcgccgaccagcaccgcgccgagcagcgttttgttgtcggcgctgacgatcaggcgcttataaacttctttgctttcgtcgagatagacgtagctacgggcgcccggcgtgcggccgtgggcatcgccgatcccgcccacgtccacacccaacagcttcagcttggcgctgaggtcggcgccggtgaagctattttcactgccgaggagatggtcgacggccacctgggccattttatagccgggggcgaccagaccgtagacgcggttgttccagctggcgcattccccgatggcatagatatccggatcggaggtctggcagctatcgttgaccatgatgccgccgcgctgggcgaccgccagcccgcactgggtggccagcttatcgcgcgggcggatcccggttgagaagacgatgaaatcgacctgcagctcgctaccgtcggcgaagtgcatggttttgcgcgcctcggtgccctgctgaacaatctctttggtgtttttgctggtgtgaactttcacgcccatgctttcgattttgcgccgcaactgctcgccgcccatctggtcgagctgttcggccatcagcatcggcgcgaattcgataacatgggtttccacgccgaggtttttcaacgcgccggccgcttccaggccgagcaggccgccgccgactaccgcgccgcgtttgctgcggcgggcgcaggattcgatggcgttaagatcttcaatagtgcgatagacgaagcaatcctgggtttccgcgcctttaatcggcgggatccacgggtatgagccggtcgccataatcagcttgtcgtagaacacggtacgcccggcgctggagtggatcactttctcctggcggttgatggtgatcgcccgttcgccgaccagcaccttgacgccgtgtttctcatagaaaccttcgcgtaccagcgacagttcttccgcagtgtgatgggagaaataagacgacaggtggacgcggtcgtaggcgatacgcggttcttcacagaacacggtaatgtcgaactgtccggcaggcgccttatcgagaagctcttcgataaagcgatggccaaccatgccgttaccgataatagcgattctgactttgctcatttttgcctcgatttcttttctattaccgcctaccttaacgattcagccatcaggcttattgatgcaaatcaatgacaacttcacctaccacttaatgggtatgcgtttgatttgtcagtatttttataagtcatggaaaacgctgacttttcctttttgctgattttgtgtacaagaattgggtaagccgcgattggggttagacagaaaacaagccgtattgaatagagagggtgatatgacagcagcgccgctttggttgattcagaacgtacgcctggcagaccgcgacggcctgtggcaaatagccattgataagggccgctttggcgagatcacgccgatgggggaggcgcacgatgaaagctacgaggtattgaacgctcgcggcgggctagcgatcccgccttttatcgagccgcatatccatctggataccacccagacggccggcgagccgaactggaatcagtccggtactctgttcgaggggattgagcgctgggcggagcggaaagcgctgctcagccatgaggacgtcaaagcccgggcgtggaaaaccctgaagtggcagatcgccaatggcgtgcagtttgtccgcactcatgtcgatgtttccgatcccacgttaacggcgctgaaggcgatgctggaggtcaaacaggaggtggcgccatgggtcgagttacagattgtcgcttttccacaggaggggatcctctcttaccccaacggcgaggcgctgctggaggaggccctcaagctgggggcggacgtcgtcggggcgatcccgcattttgagttcacccgtgaatatggtgtggaatcgctgcatatcgccttccgtctggcgcagcaatatgaccgcccactggatattcactgcgatgaaattgacgatgagcagtcgcgctttgttgaaaccgttgccgcgctggcgctgaaagcggggatagggccgcgggtaacggccagccataccaccgctatgcactcctataatggcgcttatacctcgcgtctgttccgcttgcttaagctctccggcatcaactttgtcgccaatccgctggtgaatattcatctgcagggccggtttgacgactacccgaagcgacggggcattacccgggtgaaggagctgttggcggcggggatcaacgtttgctttggtcatgatgacgtctttgacccgtggtacccgctggggaccggcaatatgctgcaggtcctgcatatggggctccatgtttgccagctgatgggctaccagcagatcaacgacggcctgcagcttatcaccgacaacagcgcccgtacgtttggcctcgaggattacggcattgtcagcggcaacccggctaacctgatcattctcccggcggagaatggctttgaggccgtccgctgccaagtgccggtgcgctggtcaattcgccagggaagggtgatcgcgaccacccagccggcacaaagctggatccaaactgaccgcggtggcgaggagctttcttttatgaggaacagcccccttgcggatgcaaaggggccgaaggcttagtgagacgccgcctgagcgttgttctggcgatgacgggagacgaagccgaggataaagcacattacgaataccacggcatagaggccgttagcggtgtgcagcgcggccaggggaccgctggccgccacaatcgggccggtgaccacgaaagtgagcatggtgccgatggtgccgcaggtgaggataaagttcaccagcttcggcgaagcgacccgcgtctgctgcgaaccgagcgtaatgatcgaggtgtaaatggcgctggagaagaagcccagggtcagaataaaccacggcatatgctccggcgaaccattgataaacaggtacatcagcaccgtcgcgagcccggcgaggacggttaagatacgctgcaggtcgaagaagcgcaggatgaagctgaatgaccacatgccgatcatgtaggacatccagaaatcgctcaccagtttaccggcgtcgccgaggctcatgcccaggctcttcgcatattccggtacccaggagataaagcccagctgaccgaggatgtagcacagcgccgcaacggagaggaacagtacgccgatgccccacttctctttcaccaccggctggctgttttcgctctgggcttttttgcccagcaccggaaaatcacagccgaaagtcaggacgaaaatagcgacatataccagaccaatacaggcgtagacccagtaccactcgatgctgcgcgccagcaggacggcggcgaccatcgggaaaatcatgcccgccatgctaaagaaggagtcggtaaacagcagacgcgccccgcgctgacggccttcatacatatgggtgatcaggaaggtcccgatcgacatggtgatcccgctcaccaggccaagaacgaacattgacgcggagaacagcgccaggctgtggctgagcatcaggccggccaccgccagcaccatcaaaataaagccaaagcgcagttgagttttcagcggcacgatttccatcagccaggcattgaggaagatggagataagaataccggcgttcagaaaggtaaaggtgttgctcatactggaaacgggcagatggaaataatccgcaatgttacccatcaccatcccggtgacgatcaccaacgcgccggtcagggcgtaggagaagaagctgatccatgtgagcttaatacggttgctgttagtcatgactggcctgtgaatagaaaggtaaagcgcgttgacgctgcgccgggcggacagattttattcgttcaggtgatgtaattaaatgtttattgtgaaatgggttatcttttgcatgttttaatgtgatctgtatcacgcttgttcgctgcaaaggagatcgtttgcgcggttacaattattacagctaagtaaaatttggtaaaaggctggcccaggatgcaaaggctctttagaatcaaggcactcgcttttattctgctccgttaaggaatttccatgctcaaatcaacactggcggcgatggctgccgttttcgctatttcagcgttctccccggccatggcggcaaagggcgatccgcatgtgctgctgaccacttcggcaggtaacattgagcttgagttaaacagccagaaagccccgatttccgtggataacttcctgaagtacgtcaacagcggcttctacaacaacaccacctttcaccgcgtgatcccgggattcatggtgcagggcggcggctttaacgaacagatgcagcagaagcagcctaacccgccgatcaagaatgaagcagacaacggcctgcgcaacacccgcggtaccatcgcgatggcgcgtaccgccgatcaggatagcgccaccagtcagttcttcatcaacgtggcggataacgccttcctcgaccatggccagcgcgactttggctatgcggtattcggcaaagtggtgaaggggatggatgttgcggataagatctcccaggtccagacccataacgttggtccgtaccagaatgtgccgaccaaaccggtcgttatcctctctgcgaaagtgctgccctaatcctcccgcggcgcggtggtctatcgccgcgcccggtcgcctcccggcataacctgaaattgctgcttatacttgtggcacacaggggacgataaggggggcgacgatgcgtccactcaccgataagcaaaaatcccgactctgggaacagacacgcaataccaattttcaggccagccgtcgccttgaaggcgtgacggtgccgctggttacgctgactgccgaagaggcgctggcgcgtctggcgacgttgcggagggagtatgagcgataaattcggcgatgaacgcgatccttacctttatccggcgctgaacgtgctgcgcaaccgtctcggcatccgccaggctaaaaatctgcagcaggccgcctttgagatgacagcgctgcgggcggccactctgccgctgggcccgcgggtgcgcggcttaccctatctgtgcgctattcatcatcagttgtatcaggatctgtttgactgggcgggccgcttgcgtgaagtgaacctctacctgggcgatacgccgttctgccactttgcccggatcgaggaggaggggaatgccctgatgcaggcccttgagcaggaggattatctcaatggcctgccgcgcgataccttcatcgaacgcctgagctggttctatggtgaaattaatgtgctgcacccttttcgtcttggcaatggcctgacccagcgtattttctttgaacagctggcgatacatgccggctaccttcttaactggcgtgacgttgaccccgccggctggagtgcggcctgccagcagagcgcgatgggcgatctggccccgctggtggcgatctttcgcaaagtggtaagcgaagcgcgggaatctgagtagaatagcccggttttgattgttccggagccgctatgatcctgcttatcgataactatgactctttcacctggaatctgtatcagtacttctgcgaactgggggcggaagtgctggtcaggcgcaacgatgcgttgacgctggaggagatagcggcgctggcgccggagaaaatcgtgatctcgccaggcccctgcacgccggatgaggcggggatttccctcgcggttatccgccactatgcggggaaaacgccgctgctgggcgtctgtctcgggcaccaggcgatcgcccaggcgtttggcgcgactatcgtgcgggcggcccaggtgatgcatggcaaaacctcgcttatcgagcataacggcgaaggggtgtttcaggggctgaatattcccctgacggtgacccgctatcactcgctggtgattgacccgccgacgctcccgtccgagtttaacgtcactgcccgcagcgccagcggtgagattatggggatccgtcaccgcgaatgggatctcgagggcgtgcagtttcatccggaaagcatcctcagcgagcagggccatcaattgctggccaactttttgaaacggtgattttcagttgctattgactgattttttatgcatattttgtgattagattatcataatcgcatctgcgtaacgaagagggatgggcaagacatggcaactgaacaaccggcaatcacccgcgccacattcgatgaagttattttgccaatttatgcaccggcagaattcatcccggtgaaggggaaaggcagccgcgtctgggatcagcaggggaaagagtatatcgatttcgccggcggtatcgcggtgacggcgcttggccattgccatccggcgctggtggcggcgctgcatcagcagggcgaaacgctgtggcacaccagcaacgtctttaccaatgagccggcgctgcgtctgggacgtaaacttgtcgaggctaccttcgccgagcgcgtggtgtttatgaactccggcaccgaagccaatgaaacggcctttaagctggcgcgtcactatgcggtgacccgccatagcccgtataaaaccaaaatcatcgccttccataatgcctttcatggccgctccctgtttaccgtttccgtcggtggtcagccgaagtattccgatggtttcggcccaaaaccggcggatattgtccatgttcccttcaacgatctgcaggcggtaaaagcggtgatggatgaccacacctgcgcggtggtggtggagccgattcagggcgaaggcggcgtgacggcggccacgccggctttcctgcagggactgcgcgagctgtgcgatcagcaccaggcgctgctcgtctttgatgaagtacagtgtggtatggggcgtaccggatcgctgttcgcctatatgcactacggcgtgaccccggatattctgaccagcgccaaagcgctgggcggcggcttcccggtcagcgccatgctgaccacccacgagatcgccagcgccttccatgcgggctcccatggctcaacctacggcggcaacccgctggcctgcgcggtcgccaacgccgccttcgatctgatcaataccccggcggtgctggatggcgtgagcgcgaagcgcgaactgttcgtcaaacacctgcagcggctggatgccgagtttgatctgttcagtgatatacgcgggatgggcctgctgatcggcgcggaactcaagccgcagcacaaaggccgcgcgcgtgatttcctctatgccgcggccgacgccggcgtcatggtgctcaacgccgggccggacgtgatgcgttttgttccctcgctgatcatcgacgagcaggatattactgaagggatggcgcgctttgcccaggcggtggcaaaggtgattaacggttgatcttccgcagccagatgccatggtgcggccgctgacgccatgccactgacgaaatggtgtgcatggtgttcagatggcccagaatgcgttgcagatgctgctccagggtgcttaacggaccgatcggcgcctcgctttccggcgactccataatattggcatcccctgcgctgccgggaccatcgctgtccagccgctgctggcagcgctgcagcgcaatctcacaggattcgagatagcgctgggcaagatccggggtcagcatcgtatgctcccgggccagggtggtcatagcgttgatgtgttcgacgataaactggctgtgcgtcacccacagcttcatatcttccagatagtgggtattaaacccgggttcctgcatcgcctgattcagggagttgtagagcgcgttgtgcgcctggttgacgcgcatgcgttgataggccagcgcgggggcttttggatcggcgctgaggatcaggcgaatcgcctgctggtcggcctccagcgcatcgtgggcattttttttcagcaggccgctctgccactgcggccacagccagaccatcccgccgaaggcgatcaggcagccgataagggtgtcgatcagccgggcgataataaactgttcgccgttaagcgtcagcagctgcagggtatataccgccgtcaccgtaaacccaaccatcgcccagccatagtgtttgcgaatgatcagatagctgagcagggtaatcagcagcatcccgctcagggtgtagctctccggaacgtgaaaatgcaaggtcagcccggcgatcgtcaggccggcgagcgtccccgccgcccggtgaacaatacgcacccgggtggcgccatagccgttctgggtgacgaaaagcaccgtcatcaggatccagtagggcttaggcaagtgcagggcgttgcccatcaggctggcgacgctcagcatcacgctgatgcgggcggcattgcgcagcgcgggcgattttagcgacaggtagttctttagcgcaggcaatagcggtaaacgacgctctttgtcggccatcaggtcccgggcatacagcgggcgctgggtatgcagcacccgggcgatgcggctgaagtgccaggcgcagaagtggccgaccgggttatccggatgttgtctggcgatcttttccagagcctcgatctgtttatccatctgaaagcgctttggaaagcgatgatagagcatgtcatccgccagcacgcgcaggcgagcggcgacggtctgcgcgttccagcggatcaccgcttcggcatggctgcgttccaccagcttttgcacctcttccggctgatgcaggctgaccgaaatatgctcctgcagatccagccccatctgaaacgcccgcagcaggcgcttatgatcgttgcgttggttagcggccagcatatgcatctgctgatagcactgagtaatcagatcgaccactttctgctggcgggtgagcagcggcggcagggcggtcgagggatcggtatgctgggtcagcaggctgtatttggcttcacagtagtccgccagctcccggtaaagcaggctaagcgactcccgtagcggctgttcgcgccacagccagaaccagaaccagttaaacacgccgtaccacagcgtgccgaaggcgtagatcagcagcggctcccagatgggcatattgcccgccaggctcagggtaaagatggcggcgatcagcgacgcgggcagcagccgcgcgtgcagcgaactgatctccgcggtaacgccgagcaagagcgccaggccgctgagaataaacggcaggggtatcgcctgggcaagcagcaactgcaccaccagactgcatccggcaaacaggcagccgccgataatcaggcgtttgaaaaagcgcttatgcggggtatcaagaccggcaatgttgcagcaggcggggactaaggaaaataacagcccctgctggagatggccgagcagaagaccgatggccacgggcagacacagcaccagcgtttgccgcagtgcatagttgacttccgggtggtaaatcagcctgcgccacatgagggaaaaacaaaaacggcgtactgcgggagcaatacgccgcttagcaacttaacgggtgccgtagacgacgatggttttaccgtgcgcggaaatcaggttctgatcttccagcattttcaaaatacgaccaacggtttcacgagagcagccgacgatctgaccaatttcctggcgggtaattttaatttgcataccgtccgggtgggtcatggcatccggttgcttcgccaggttcagcagcgtctgggcgatacggcccgtcacgtcgaggaaggccaggttgcccactttctcagacgtgacctgcagacggcgagccatttgcgaagagagacgcatcagaatgtccgggttcacctggatcagctgacggaatttcttataagagatttcggccacttcacatgcggttttcgcccgtacccaggcgctacgctcctgaccctcttcaaacaggcctaattcaccgatgaaatcgccctggttgaggtaggagaggatcatctctttaccttcttcatccttgatgagtacagccacggagcctttaacgatgtagtacagcgtttctgctttttcaccctggtggatcagcgtgctctttgatgggtacttatgaatgtggcaatgagacaagaaccattcaagggtagggtctgtttgcggtttgccaagcaccatgcgcggttatcctctgttataagctatctccgggcgccgacactacacggcgtccgggcatgcaatcgtattgtttccctatacctgggaagctggctgatgatttttcgacagcccgtaatgtgaactcctctgcatacatgcagtacatcaatgtattactgtagcatccagactgttttagcatagctttcgccgcatgtctcctggtgtctcgcttcagcatgacgcaggtcgccttccgttgcgagaattgttatgtgcgcgtaatctgacaggaatattgcgatactggagttaaattttatgcaagcgcgtgtgaaatgggtagaagggttaacctttatcggggagtccgcatcgggacaccagattctgatggatggcaactccggggataaggctcccagcccgatggagatggtgctgatggcggcgggcggttgcagtgcgatcgatgtggtctccattctgcaaaaaggtcgtcacgacgtgaccaattgcgaagtgaagctgacctccgagcgtcgcgaagaggctccgcgtctgttcacgcatattaatctgcattttattgtcaccggcaaggcgctgaaagatgccgcggtctcccgggcggtggacctgtcggcagagaaatactgctcggtggcgctgatgctggaaaaagcggtgaacatcactcactcctatgaagtgatcgaggcgtagtcttcgcctgccgttgtatcgaatctcaaccccggccaggccggggttttttggttagcctatcttacggccttccatcaggcgctcgaccagcggcgtcatgataagctccatcgccagccccattttaccgcccggcaccaccagggtgttcatgtgcgagataaacgagccctgcagcatcgccaacagccaggggaaatcgatattctgcagattgcggaaatggatcaccacaaagctctcgtccagcgaggggatcgctttggcggcaaacgggttggaggtgtccaccgtcggcacgcgctgaaagttgatatgggtgcgagaaaattgcggggtaatgaagttgatgtaatcttccatcgagcggacgaccgagtccatcaccgcctcccgggagtggccgcgttcgctggtgtcgcgaataagcttttggatccactcgaggttaacgataggcaccaccccgaccagcaggtcgacatggctggcgacatcatgctgcggcgtgacaaccccgccgtgcagcccctcatagaacagcacgtctgtcggctccggcagcggctgccagggggtaaaggtccccggcacctgattccacggcacggcttcgtcataggtgtggaggtatttccgcgactgacctttgccgtggcgaccatagtcgacaaaggtctgctccagcaggccgaagtcgttcgcctccgggccaaagtagctgatatgtttaccctgatcccgcgccttacggatcgccatgtccatttccgggcgggtgtagcgatgaaagctatcgccttccacctccgcggcgtgcaggtttagctgcgcgaagattttgcgaaaggcaaggctggtggtggtagtgcccgcgccgctggagcccgtgacggcgatcaccggatgtttggcagacataacaactccctggttaaacgatgtagtggcgtcgccttagccgttaaacagcgcgcgcggcataatattgaccgtctcatgcacttccgaccacacaaggaccgcctctccgcgtttcagctgctgttttacatcggcgactttatcggcaagtgaacgttcatgttcaccataatcggtgccttcacgtaacacaaagctttcaatcaggttatccagcgtttcgggatccagatcctgccagggaataatcatacgggaacctccagccagcggtttaaccagtcgggaatgcgtctttccagccacatctccggtttacgcagagtgccgctgacaaagccaacgtggccgccttgctcggtcaattgatactctacgttcgctggcagttgctcctgcggcggaatagagtggtgatccataaacggatcgtctttcgcgtgaatgatgagcgtcggcttagtgatatcgctgagccgcggcatggcgctgcattgccggtaataatccagcgcatcggcaaagccatggattttggcggtgatcatatcgtcaaattcccggatgcggcgcatccctttgagctggcgtaaatcgacgggcagcgagcccgggtacgctttcagcttgcgggaagcgttggcttttaacagattgagcagatagcgctgataaacccgcgagaagcccttatccatatgatagctgcaggcttcgagcatgaaaggcgcggagacgatcaccgccgcatccagcgggcagcggtcgccttcttctgccagcaggcagcccagcatattgccgcccagcgaatagccgacggccgcggtcggcgcgggaccaaactcgcgcttcagccagtgcaaaaaccaggtgccatcttccgtttcgccggagtgatagatgcggtgattgcggttaggttcgccgctgcagccgcggaaatgcatcaccacgcccagccagccgcgctgcatcgccgcgtggatcagaccatgggcgtacgggctgtgcagactgccttccaggccgtgaaaaacgacgaggcgcggcttatggcgcgcctggtgcgggtcttcgctccaggccagatcgacaaaatcgccgtccggcagctcaaggcgctgccagtgcggggtaaagcgcaatttacggcgaatcagccgcggcagcatggtttgcagatgacgattgcccacgccgcgcatcggatggaactcacgcgaatcgttttcggggggcgtcatgtctgtggggatgatttcaaccatagcaccagaacaattaataaacgtgatgatgactataccgcgcagggcatgcagggggttagccaatatgtggtcttgcggccagtgacgccagcttacagcaaaaacaaatcattgatgtcgctgatggccaggccatgaagagggcagaaacccaccctgccagcggcagcgtacgcgcaggcaggatgaagaggaagagtttagccttcctgaagcatgcgctccagctgctcctgggcctccagccaggccatctcgcactcctccagcccggacttcgcgctggcctgctgctgcaggcattcggtcagctcggctttacgtgaggcgtcataaagctcactgtcgccaagtttttcttccgcactggccaactgcgcgttgagcttgtccatctctttttccagacgggcgatctctttgcgcagcggttgggtctggctgcgcagctccgcttcccgacgcttctgatctttgcgcgcctgggcgctattgccgctctcttttggcgcctcgccgctctgggactcctgtttttgcgagtcgctgagccactgctgataatcttccagatcgccgtcgaacggctcgactttaccatcgtggacgaggtacagatcgtcagtggtggaacggatcaggtgacgatcgtgcgatacgaccaccagcgccccttcaaagtcgatcagcgcttcggttaaggcctgacgcatatcgaggtcaaggtggttggtcggttcatcgagcagcagcaggttagggcgctgccagacgatcagggccagtaccaggcgcgccttttctccaccggagaagcggcgggtttcttcgctcaccttatcgccctggaaaccaaagccgccgagataatcacgcagcttctgctccagctcctgcggcgccagacgcgccaggtgctgcagcggcgactcatcggcgcgcaggaattccagctgatgctgggcgaagtagccgagcttgatgcctttcgcgaggccgatctcgccgcttacgggctggagctcgcctgccaggagcttaatcagcgtcgacttcccggcgccgttgcggcccagcaggccgatacgcgagcccggcaccaggttaagcttgatggagtcgagaataatacgctcgccgtagccggcgctgactttctccatcttcagcagcgggttaggcaagctctccggctggcggaagctgaagtggaacgggttatccacgtgcgccggagcgataagctccatccgctccagcattttgatccggctttgcgcctgcttagccttggtggctttggcacggaagcgatcgatatagctttgcaggtgcgcgacgcgctgctgctggctttcgtacatcgcctgctgctgagcgaggcgggtggcgcgctgcacttcaaacgaactgtagttgccggtgtactcaaacattgtctgctgttcgatatggataattttgtcgacgataggatcgagaaaatcgcgatcgtgggagatgaggatcagcgttcccgtatagcccttcagccacttctccagccaaatcaccgcatcgagatcgaggtggttagtcggttcatcgagcagcagcagatcggagcggcagatcagcgcctgggcgaggttaaggcgcatacgccagccgccggaaaaatcgctgaccggccgctcaagctgttcattgctgaaccccagaccgtgcagcaggctggcggcgcgcgaacggatagtccaggcgtcgatggcgtccagcttaccgtggacggtggcgatagcatgaccgtcattgcgttcgttagcctgctggagcgcggcctccagctggcgatactctcgatcgccgtcaatgacataatcgattgccggctgcggtagcgccggggtttcctgattcacccaggccagctgccagttgccgggaaaggtcatactgccgccgtcagcgcttatctcgtttttcaaaagcgatagcagcgtcgatttcccgcagccgtttttccccaccagaccgaccttttggccaggattgatggtagcggtggcgttgtccagcaggacgcgtacgccgcgacgaatttgtaacgaggagaaaacaatcataaggcgccgtatgttcagactatgttaatttgtcattatgataatgtagtgtggaagcgaatcgcttcaccgggccgccatggtagcccaaaacgaagacgatacacaaagtcattctggctgtgtcaaaacgccggggctgtgcaggccgccagaagacctacgggaggggaatgatgtctcagacagcgaaagtgttgctgctgtatgcccacccagaatctcaggattccgtggccaaccgggttttattagagccggccttacagttgccgaacgtcaccgtgcacgatctctacgcgcactatccggatttttttatcgatattgcttacgaacaggacctgctgcgccggcatgaggtgattgttttccagcaccctttatatacctggagctgtccggcgctgcttaaggagtggctggatcgtgtgttaagccgcggcttcgccagcggcgccggagggaacgaactggcgggaaagtactggcgcagcgtgatcactaccggcgagcctgagagcgcctaccgtcgcgatgctaatcgctatccgatgaacgatattttacgtccttttgaactgaccgccggcatgtgccgtatgcactggatgagccccattatcgtctactgggcccggcggcagcagccagaggagctgcgcagccgcgccctggcctaccgggactggttggccaaccccatcgccgccggaggtgtccatggcgggatctgatttgctgctggcgggggtgctgtttttgttcgcggccgtcatcgccgtccctctggctgcaaggctggggattggcgcggtgctgggctatctgctggccgggatcgccattggtccgtgggggctcgggtttatcagcgatgtggatgaaattctccatttctcggagctcggcgtagtgtttctgatgtttatcatcggcctggagctcaatcccgccaagctatggcgactgcggagctccatcttcggcgttggcgcggcgcaggtgatgctcagcgcggcgatcctcggtgggttgctgatgacgaccgggttttcatggcaggcggcggtggtcggcgggatcggcctggcgatgtcttccaccgccatggcgctgcagctgatgcgtgagaagggaatgagccgcagcgaagcgggacagctaggcttttcggtgctgctgtttcaggatctggcggtgatcccggcgctggcgctggtgcccctgctggccggttcagcggatgagcatgtgaactggttgacggtcggcatgaaggtcctggcctttgccgggatgctgattggcggacgctatctgttgcggccggtgttccgttttatcgccagctcgggggtcagggaggtgttcactgccgccacgctgctgttggtcctcggatctgccctgtttatggaggcgctggggctgtcgatggcgctgggcacctttattgccggcgtgctgctggcggaaagtgagtatcgccacgaactggagatcgctatcgatccgttcaaggggctgctgctcgggttgttctttatttccgtcggcatggcgctgaaccttggcgtactgtatacccatctgctgtgggtggcggtgagcgtggcggtgctggtggcggtaaaaatgctggtgctctatctgctggcccgtctctatggcctgcgaagttccgagcggatgcagttcgcgggcgtattaagccagggcggcgagttcgcgtttgtcctcttttcgctgcccgcctctcagcgattgtttcagcacgaccagatggcgctgctgctggtggcggtaacgttgtcgatgatgacgacgccgctgctgatgaaggggatagataagctattgtcgcgacggctgaatccggcggacgataccggtgaggcgccgtgggtggaggatgacaagccgcaggtgattattgtcgggtttggtcgctttggtcaggtcattggtcgcctgctgatggccaataagatgcgtattacggtactggagcgggacatcagcgcggtaaatctgatgcgcaactatggctataaagtctattttggcgatgccacccagctggagctgctgcgctcggcgggagcggaagaggcgcagtcgatcgtcatcacctgtaatgagccagaagataccatgcggctggtggaaatgtgtcaacaacactttccacatctgcatattctggcccgcgctcgcggacgcgttgaggcgcatgagctgctgcaggccggcgtgacgcagttttctcgtgaaactttctccagtgcgttggagctggggcgcaaagcgctcatcaccctcgggatgcatcctcaccaggcccagcgcgcgcagctgcacttccgacgcctcgatatgcgaatgctgcgcgagctaatgccagtgcatactgatacggtacagatatcacgcgtgcgggaggcccggcgcgaactggaagagattttccagcgcgaaatgcagaaagagagccggcagctggacggctgggacgagtttgaataaaggtaaatcttatggcagtgcgtaaacgttttattgccggggcgaaatgtccggcgtgccaggcgcaggattcgctggcaatgtggcgtgagaataatgtcgatgttgttgagtgcgttaagtgcggtcatcagatgcgtgaggcagataaagaggcccgtgagcatgtacgcaaagaggagcaggtgattggcatttttcatcccgactagcgttatccgtcggctttttttaagctaaagggtacacggcagcagaattccgctacaatctgcgccactattcttcccatctcaggagatatcatgaaagtagcaaaagacctggtggtcagcctggcctatcaggtacgtacagaagacggtgtgttggttgatgagtctccggtaagcgcgccgctggattacctgcacggtcacggctccctgatttccggcctggaaaacgcgctggatggccacgaagtgggcgacaaatttgacgttgccgtcggcgctaacgacgcttacggtcagtatgacgaaaacctggtgcagcgtgtaccgaaagacgtcttcatgggcgttgatgaactgcaggttggcatgcgcttcctggcggaaaccgatcagggtccggtaccagtagaaatcactgaagttgaagacgaccacgttgtggttgatggcaaccacatgctggctggccagaacctgaagtttaatgtggaagtcgtcgccatccgcgaagcgactgcggaagagctggagcacggtcacgtgcacggcgcgcatggccacgatcacgatcatgaccatggtcatgacggttgctgcggcggccacggccacgatcatggtcacgaccatggtaaaggcggctgcggcggccacggtggctgcggctgccactaatctttgcgcttcggcacgaagacgacaaaaaagcggggaaacccgctttttttacgcctcaatagtgcggcggtggcgtttcttccgcctgggaggcgatatgggagggttgggtcgccttcagcttctcgatcatcagacgcatatgctcccgcatcttcgccatctcgatctcgtgggcggtcacggttttgttgaggtcttcgatggtgatttcctgaaacgccagccggctttccagctccgcaaggcgcgtttctaatgtgctatcgtgcatgggtaacctctttagtctgatcctgcgggcggattctacttaagtttcccctggcgcgcagcatcgctgcgccgtacaggaaacttattcatacaaaaatagtcctaaaagaggcgatattcaggaacgtccgtatgtagattttaacggcaacgttctatagtacgttttttgctttttacgataaccctggggcgagaggccccggccctggagaaatggatgaaatcactgtttaaagtaacgctgctggcggccacaatggccgtcgccctgaatgcaccgctgaccttcgctgcagatacggcaacgaaggcagccccggcggctgagagtaaatcggcatttaaaaatgacgatcagaaatcggcctatgcgctgggcgcgtccctggggcgttacatggaaaactccctgaaagaacaagagaagctgggcattaagctggataaagcccagctgatcgccggcgtacaggacgcgtttgccgataagagcaaactgtccgaccaggagatcgaacagactctgcaggcctttgaaacgcgcgtgaagaccgcggctcagcagaaaatggaaaaagacgccactgagaacgaagctaaaggcaaagctttccgtgacaactttgccaaagagaagggcgtgaaaacctcaaaaactggcctgctgtataaagtcgagaaagaaggcgctggcgatgcgccgaaagacagcgataccgtggtggtaaactacaaaggtaccctgatcgacggtaaagagtttgataactcttatactcgcggcgagccgctctctttccgtctcgacggcgtgatcccgggctggactgaaggcctgaagaacatcaagaaaggcggcaaaatcaagctggttattccgccggacctggcctacggtaaaactggcgtcccgggcatcccggccaactctacgctggtctttgatgtagaactgctggatatcaaaccggcgccgaaggcagatgcacagccggaagccgcaggcgatgcgaaagccgcggacgcgaaagctgacgctaagaagtaatcaggttcaggccgccgtctcgtcagaggcggcggcttttttattgagcgcagatataattaaaactggaaagatcctcaggcgctgtattactttagatagcttaataatgatgatgagcctgccctgacaataacgacaggctcctgaaaaggagtgctttttttcatgtccaggtcgcttttaaccaatgaaaccagcgagcttgacctgctggatcaacgtccctttgaccagaccgatttcgatattctcaaatcttatgaagcggtagtggacgggttggcgatgctcatcggttcgcactgtgaaatcgtgctgcattctttgcaggatctgaaatgctctgccatccgtatcgccaatggtgaacataccggccgccaaatcggttcaccgattaccgatcttgcgctgcgcatgctgcacgatatgacgggcgccgatagcagcgtttccaaatgctactttacccgtgctaaaagcggcgtactgatgaagtcggtgacgattgccattcgcaaccgcgatcaccgggtgattggtctgctgtgtatcaacatgaatctggatgtgccgttttcccagatcatgagcacctttattccgccagaaacgcctgaagtgaactcgccggtgaactttgcttcttcggtagacgatctggtcgcccagacgctggagttcaccattgaagaggtgaatgccgatcgcagcgtgtctaacaatgcgaaaaaccgtcaaatcgtgctgaatctctacgagaaagggatcttcgatattaaagacgctattaaccaggtagccgatcgtctgaacatctccaagcacaccgtctacctctatattcgccagttcaaaagcggcgatttccaggggctggataagtaatgcgttttgccctcacggtgaccggcccagcctatggcacgcagcaggcgagcagcgcctggcaatttgcccaggccgtgctgcaggaaggccatgagctggcgtgcgtttttttctatcgcgaaggcgtgcttaacgctaaccagttgacggcgcccgccagcgatgagttcgatctggtgcgcgggtggcaatccctccacgatgagcacggcgtcgcgctgcatatctgcgtggcggccgccctgcgtcgtggcgtaacggacgaacgcgaagcgcaacagctcgctctgcctggccacaatttgcagccgggttttaccttgagcgggctcggcgcgctagcggaagcggcgcttacttgcgatcggatggtgcagttctgatgaaacgtgtggcttttgtattttcctctgcgccgcacggcagcgccgccggcagggaaggcctcgatgccttattagcaacctccgcgctcaccgacgatattggcgtgttttttgtgggcgacggcgtgtttcagctgttacccgaacagcggcctggcgctgtgctggcccgcgactacatcgctacctttaaattgctgtcgctatatgatatcgaccagtgctggctgtgcgccgactcagcgcgagagcgcggcctggatcccgcgaccccgtgggtggtggatgtcgaatgcctggcgccggatgccctgcgcgcccgtctgcatgaatatgatgtgattttgcgtttctgaggcccccatgctccatacgctcagtgtttccccctggcatgccgacatcgcagcgatgcttcgtttgatggagcacggcgacgatctggtactactgtctgacggcgtcaccgcggccatcgccgatggtcgcttccttgagatcctgcaatccgcccccataaccctatacgtgctgcaagacgacgttgacgcccgcgggctggctggtcaaattgcggacagtgtcggcagggttagctatactgatttcgtcagactcacagtcaaacatgccggtcagttggcctggtgatggcgggatcgttgtatatttcttgacaccttttcggcaccgccctaaaattctgcgtcctcataatatatgaggcgatttattacgtgtttacgaagcaaaagctaaaaccaggagctatttaatggcaacaattaaccagctggtacgcaaaccacgcgcgcgcaaagttgcaaagagcaacgtgccagcgctggaagcctgcccgcagaaacgtggcgtatgtactcgcgtatataccaccactcctaagaaaccgaactccgcactgcgtaaagtttgccgtgtgcgtctgactaacggtttcgaagtcacctcctacatcggtggtgaaggtcacaacctgcaggagcactccgtgatcctgatccgtggcggtcgtgttaaagaccttccgggtgttcgttaccacaccgttcgtggtgcgcttgactgctccggcgttaaagaccgtaagcaggctcgctccaagtacggcgtgaagcgtcctaaggcttaatggttctccgttaagtaaggccaaactgatttatcttaatgtcatactaaactcttagagttttggacaatcctgaattaacaacggagtatttccatgccacgtcgtcgcgtcattggtcagcgtaaaattctgccggatccgaagttcggatcagaactgctggctaaatttgtcaatatcctgatggtagatggtaaaaaatctactgcagaaactatcgtatacagcgcgctggagaccctggctcagcgttctggtaaatctgaactggaagccttcgaagttgcgctcgaaaacgtgcgcccgactgtcgaagttaagtcccgccgcgtaggtggttctacttatcaggttccagttgaagttcgtccggtccgtcgtaatgccctggcaatgcgttggatcgttgaagctgctcgtaaacgcggtgataaatccatggctctgcgcctggcgaacgaactcactgatgctgcagacaacaaaggtactgcagttaagaaacgtgaagacgttcaccgtatggccgaagccaacaaggcgttcgctcactaccgttggtaatcccttcggagtcatagtcaccaggcgggcgcttcagatgagtcgcccgctctggataacttaactgaacgcctaaagaaataaacgaggaatcaaatggctcgtacaacacccatcgcacgctaccgtaacatcggtatcagtgcgcacatcgacgccggtaaaaccactactaccgaacgtattctgttctacaccggtgtaaaccacaaaatcggtgaagttcatgacggcgccgctaccatggactggatggagcaggagcaggaacgtggtatcaccatcacttccgctgcgactactgcattctggtctggtatggccaaacagtatgaaccgcaccgcgtaaacatcatcgacaccccggggcacgttgacttcactatcgaagtagaacgttccatgcgtgttcttgatggtgcggtaatggtttactgcgcagttggtggtgttcagccgcagtctgaaaccgtatggcgtcaggcaaacaaatataaagttccgcgcatcgcgttcgttaacaaaatggaccgcatgggcgctaacttcctgaaagttgttggtcagatcaaaacccgtctgggcgcgaacccggttccgctgcagctggcaattggtgctgaagaaggtttcaccggcgttgttgacctggtgaaaatgaaagccatcaactggaacgatgcagaccagggcgtaaccttcgaatacgaagatatcccggctgacatgcaggacctggctgatgaatggcaccagaacctgatcgaatccgcagctgaagcttctgaagagctgatggaaaaatacctgggtggtgaagaactgactgaagaagagatcaaaaaagctctgcgtcagcgcgttctgaacaacgaaatcatcctggtaacctgtggttctgcgttcaagaacaaaggcgttcaggcgatgctggatgcggtaattgattacctgccatccccggttgacgtacctgcgatcaacggtatcctggacgacggtaaagataccccggctgagcgtcacgcaagcgacgacgagccgttctctgcactggcgttcaaaatcgctaccgacccgttcgtggggaacctgaccttcttccgcgtgtactccggtgtggttaactctggtgataccgtactgaactccgtgaaagctgcacgtgagcgtttcggtcgtatcgttcagatgcacgctaacaaacgtgaagagatcaaagaagttcgcgcgggcgacatcgctgctgctatcggtctgaaagacgtaactactggtgacaccctgtgtgacccggatgcgccgatcattctggagcgtatggaattccctgagccggtaatctccatcgccgttgagccgaaaaccaaagctgaccaggaaaaaatgggtctggctctgggtcgtctggctaaagaagacccgtctttccgcgtatggactgacgaagagtctaaccagaccattatcgccggtatgggtgagctgcacctcgacatcatcgttgaccgtatgaagcgtgaattcaacgttgaagcgaacgtcggtaaacctcaggttgcttaccgtgaagcgattcgcgcgaaagttaccgatatcgaaggtaaacacgccaagcagtctggtggtcgtggtcagtacggtcacgttgtgatcgacatgtacccgctggagccgggctctaacccgaaaggttacgagttcatcaacgacatcaaaggtggtgtaattcctggcgaatacatcccggccgttgataaaggcatccaggaacagctgaaagctggtccgctggcaggttacccggtagttgatatgggtatccgtctgcacttcggttcttaccacgacgttgactcctctgagctggcgtttaaactggctgcgtctattgcctttaaagaaggctttaagaaagcaaaaccagttctgcttgagccgatcatgaaggttgaagtagaaactccggaagagaacactggtgacgttatcggtgacttgagccgtcgtcgcggtatgctgcgcggtcaggaatccgaagtaaccggcgttaagatccacgctgaagtaccgctgtccgaaatgttcggttatgcaactcagctgcgttctctgaccaaaggtcgtgcatcatacactatggaattcctgaagtatgatgatgcgccgaacaacgttgctcaggccgttattgaagcccgtggtaaataatccacaggattaaaacctaagtcccgtgctctctccgaaggggagagcactatagtaaggaatatagccgtgtctaaagaaaaatttgaacgtacaaaaccgcacgtcaacgttggtactatcggccacgttgaccatggtaaaactaccctgactgctgccatcactaccgttctggctaaaacctacggtggttccgctcgcgcattcgaccagatcgataacgcgccggaagaaaaagctcgtggtatcaccatcaacacctctcacgttgaatatgacaccccgactcgccactacgcgcacgtagactgcccgggccacgccgactatgttaaaaacatgatcaccggtgctgcgcagatggacggcgcgatcctggttgttgctgcgactgacggcccgatgccgcagactcgtgagcaca

SEQ ID NO: 177 - DNA, 31807 bp, Unknown
  source: /note="Description of Unknown: MKP2_2161_1 Mutant Bacteria sequence"
taggcctgccgccagcgttcaatctgagccatgatcaaactcttcaatttaagtttgatgctcaaagaattaaacttcgtaatgaattacgtgttcactcttgagacttggtattcatttttcgtcctaggacgttaagaatccatgtcactttgagtgcccacacagattgtctgataaattgttaaagagcagttgcgacgcgctttagcgctctgtcgcgaggtcccgtataatacgttttcctcattcagagtcaagcgcttattttgcttttctctgtcggctttcaacgtcgatttccgtcgctgaatcctcccggcccggcggcttgtttgccgttgttccgtgtcagtggaggcgcattatagggggtaattctgaagtgacaaggataaattcaaaaaaagaattcaaccgctcacttttcaaccaaatcaggtattgagctttaattcttgcctggtttttaaacaaaaacgagcccgctgggcccgtttttgtcgttttgtgatttactgcactgccacaatgcggtcgtcttttactaccagctcgatggttttacccggaaccagctcaccggaaaggatctgctgggctaacgggttctcaatctgctgctgaatagcacgtttcaatggccgcgcgccgtataccggatcgtaaccattggcgctcagcagcttcagcgcctcatcggacatctgcacttcatatccgcgctcttccagacgtttatacagacgctgcagctggatctgggcaatagaggcaatatgtttctcgcccagcggatggaagaccaccacttcgtcgatacggttgatgaactccggacggaagttctggctgactacccccagcaccaggtccttcatatgtccgtagtccagctcgccgaaccgttcctgaatcagatcggaaccgaggttcgaggtcatgatgactaccgtattacggaagtcgaccgttctcccctgcccgtcggtgagacgcccgtcgtcgagtacctgcagcagaatgttgaacacatccgggtgcgctttttccacttcatccagcaggatgacggaataaggacgacggcgcaccgcctcggtcaggtaaccgccctcttcatagccgacgtatcccggaggcgcaccgaccagacgcgagacggagtgtttctccataaactcggacatatcgatacgcaccattgcgtcgtcgctgtcgaacataaagttagccagcgttttacacagctcggttttaccgaccccggttggaccgaggaacaggaacgaaccaatcggccggttcggatcggacagcccggcacggctgcggcgaatggcgttcgataccgcttcaaccgcttcatcctggccaatcacccgatgatgcagctcctgctccatacgcagcagtttgtcacgctcgctttccatcatgcgggagaccgggataccggtccagcgagccagcacttcggcgatttcagcatccgtcactttattacgcagcagacgcatggttttcccttcggactgagtggccgccgccagctgtttctccagttccggaattttgccgtactgcagctcggacatccgcgccagatcgccgacgcggcgcgcctgttcgatggcgattttcgcctgctccagctcagctttgatggtctgggtgccggagagcgacgctttttccgctttccactcttcttccagcaccgagtactgccgttctttatccgccagctcctcgttgagcatatcgagacgcttcaggctcgcctcatcagactctttcttcagcgcctgctgttccagtttcagctggataatacgccgatcgaggcggtccagctcttccggtttggagtcaatctgcatacggatgctggatgccgcctcatcgatgaggtcgatggctttatccggcaactgacggtcggcaatatagcgatgcgataaggtcgccgccgccacgatagccgggtcagtgatctgcacgtggtggtgcagctcataacgttctttcagaccgcgcagaatcgcgatggtatcttctaccgaaggctcggcgacgaacactttctggaagcgacgttccagcgcggcgtctttttcgatgtactgacggtattcatcaagcgtcgtcgccccgacgcagtgcagttcaccacgcgccagcgccggcttcagcatgttacccgcatccatcgcgccgtcggctttaccagcgccaaccatggtatgcagttcgtcgataaacagaatgacgttgccttcctgtttggacaggtcggtcagcacgcctttcagacgctcttcaaactcaccgcggtatttcgccccggccaccagcgcccccatatccagcgccaatacccgacggcctttcagcccttctggtacttcgccgttgacgatacgctgcgccaggccttcgacgattgccgttttacccaccccgggttcaccgatcagcaccgggttgtttttggtacgacgctgcagtacctgaatggtacggcgaatctcttcatcacggccgatcaccggatccagcttgccctgctcggctcgctcggtgagatcgacggtaaatttcttcaatgcctgacgttggtcttcggcaccctgatcgttcacgctttcccctccgcgcatttgttcaatcgcctgagtcacgttggcggttgttgctccggcggattttaaaaggtcggtcagcgtaccgcgtgattcaagcgccgccagaacgaacagttccgacgaaataaagttgtcctttttcttttgcgccagcttgtcgcaaaggttgaggatccgcactaaatcctgagaaggttgcacatcgccgccggtgccttccacctgcggtaaacggctcaaggcctgttcgatgtcagtgcgcagtttcccggcattcacgcccgccgaggttaataaaggacgtaccgatcccccttcctgattcagcaaggcgctcattaaatgaagaggttcgatgaattggttgtcgtgcccgagtgcgagcgactgggcatcggcaagagcaagctggaatttattggtaagacgatccagacgcataactcctcccataaacaggtcaaatttgctactggagattaaatgaggtcatccctcaattattcaaggttaaagacctgaactatgcgaaaaataagtttgccttctggatcgtcttgattctctaggttatatcagccaaatgaaacttgccatacgaccggtggtcttgtcgcgccggtaagagaaaaaatcatccttttcgcttagcgtgcagcgatcgccgccgaaaatctgctcaacgccgacgtttgccagacgctgccgcgccagttggtagatatcagcaaaatatttttcgcctgccggacgaaaagcccggtgcgcattctcgtccttcgccataaaggcatcccggacttccggtcccacctcaaacgcctgcggaccgatggcgggccccagccacgccataatattttcggctttatcggcgaaacgagcaaccgtcgcttccagaaccccttcgcataagccgcgccatcccgcgtgcgccgcggcgacttcggtgccgtcgcggttacagaacagaaccggcaggcagtcagcggtcatcaccgcgcagacggtccctggcgtacgactataagaggcatccgcgcgtttcgacggatagggtccgccgtccagcgtcagaacctcggtgccatggacctgctccagccaaaccgggtaagacggcaagccgccggcggcaaacatccgccgccggttttcttcgacatgctgcagattgtcgccgcaatgggcgcccaggttgagcgagtcatagggcggcagactcacgccgccgatgcgggtagaactacaggccgccacgctgccgggcattggccactgcggtacaatcagtttcgtcataaccagtcaatatcgtccttatgggcttcaaaatcggcgcgcatcgcctcgatgagctcgaccatatcctgtgggatgggcgcgtgccactccatttcaatgccggagatcgggtgatacaggcgcagcatggtggcatgcagcgcctggcggtcgaatttacgcagcgcggtgatgaactcctccgacgcgcccttcggcggacgcggccggccgccatagacctggtcacccaccagcggatgggtgatatgcgacatatgcacgcggatctgatgcgtacgaccggtttccagacgcagacgcaggcgggtatggatgcggaaatgttccataatgcggtagtgggtcaccgccggtttgcccatcggatgcaccgccatatgggtacgcttggtcgggtgacggctgatcggctcttccactgtgccaccggcggtcatatgaccgatcgccaccgcttcgtattcacgggtgatctcgcgcagctgcagcgactccaccagccgggtttgcgccggaatggttttcgccaccaccatcagaccggtggtgtctttatccagacgatgaacaatacccgcgcgcggcacatcggcaataggcggatagtagtgcagcagcgcattcagcacagtaccgtcagggttgcccgcgccaggatgtacaaccagatcgcgcggtttattgatcacgatgatgtcatcatcttcgtaaacgatattgagcggaatatcctgcggctggaagcgcgcctcttcttcgatttccacatcgatagcgatgcgttctccccccagcactttttctttcggtttatcgccaatggtgccattgactaatacgcgttggtcgaggatccattcttttatccgcgatcgcgaataatcagggaacaattcggccaaagcctgatctaagcgttgaccgagttgattttcggtcaccgttgcggtgagttgtactcgttgtgccatatacagcttcttcgtttaacgttgggttttacggctttgccgtttaatatagtgtgctattgtagctggtcttaatcgggagcaggaacagagattctcccgcataaacattttgaggaagtcaaaacgtcatgacgcgcatgaaatacctggtggcagccgccacactgagcctggctttggtgggttgctccggctctaaggaagaggtgcctgataatccgccgaatgaaatctacgcgaccgcccagcaaaaactgcaggacggtaactggaaacaggcgataacgcaactggaagcattggataatcgttatccattcggcccttattcccaacaggtacagctggatctgatttatgcgtattataaaaacgccgatcttcctctggctcaggcggctatcgatcgcttcatgcgtttgaaccccacccatccgaacatcgactatgtcatctatatgcgcggcctgaccaacatggccctggatgacagcgccctgcagggcttcttcggcgttgatcgctccgaccgcgatccgcagcacgcgcgcgatgccttcaatgacttctccaaactggtgcgtggttatccgaacagccagtacgccactgacgcctataaacgcatggtgttcctgaaagatcgtctggccaaatatgagctgtcggtcgtggattactacaccgatcgtggcgcatgggttgccgtggttaaccgtgtggaagggatgatgcgtaattatccggatacccaggccacccgcgatgccctgccgaagatggaaaacgcctatcgtcagatgcaaatgaacgctcaggcggacaaagtcgcgaagattatcgccgcgaacagcaagaacacctgagcctgactcatcgatcgcaaacggcagccactggctgccgtttttttatacgtttcccgacgagctgaagcggtttagcgccgggttaactcatcaaatatggcctgctttatcgggttcgacaagtaaaatctcacttcttcctgccctgtctcacaaaatgaatttgttgacaaaaagtgacaataaaatgtgatttagatcacacattttgacattgggaaaggtatgctggattcaccaagacgggaaagacaagaggtaaaatttatgacaatgaacattaccagtaaacaaatggaaattactccggcaatccgccagcatgtcgcagaccgtctcgccaaactggataagtggcaaactcatttaatcaacccgcacatcattctgtctaaggagccgcagggttttatcgctgatgcaaccatcaacacgccaaacggccatctggttgccagtgcgcgtcatgaagatatgtacgccgccattaacgaattgatcaacaagctggaacggcagctcaataaagtgcaacacaaaggggaagcccgccgcgccgcgacgtcggtgaaagaggcaggctttgtggaagaagaagagtaatccttaacttaagttgtgtcatgccacgcgccttcgggcgcgttttttattgacagagtgaaaacagtacaggtactgtaatccccactacctaaaggaatttaccatgaaacttgtcccgttcttcttcgcattcttttttaccttcccctgaccgggaggcaattcgtcgtataagaaagaatgcgaagacgaacaataaggcctccctcccgggaggccttttttatttgataacaacaaaggcaacatctatgaccgaggaaaacccattactggcgctgcgcgataagataagcgccctggacgagaagctgcttgctttgctggcggagcgccgcggactggctgttgaggttggaaaagccaaactggcctcccatcgtccggtgcgtgatattgaccgcgaacgcgatctgctggagcgcctgatgactatcggcaagcgccataatctggatgcgcactatatcacccgcctgttccagctgattatcgaagactctgttcttacccagcaaaccctgctgcagcagcatctgaataaaattaacccgcattcggcccgcgtggcgttcctcggtcccaagggctcttactcgcatctggcggcgcgtcagtacgccgctcgccactttgagcagtttattgagagcggctgcgcgaagttcgccgatatttttaatcaggtagaaaccggccaggccgattacgcggtggtgccgattgaaaacaccagctccggcgggatcaacgacgtctacgatctgctgcagcacaccagcctgtcgatcgttggcgagctgacgatccctatcgatcattgcgtactggtgagcacctcgacggatgccgataaaattcagaccgtttacagccatccgcagccgttccagcagtgcagccagtacctgagccgctacccgcactggaagattgagtataccgagagcacctcggcggcaatggaaaaagtggcgcaggcgaactccccggccgtcgcggccctgggtagcgaagcgggcggcgctcggtatggtctgcaggtgctggagcactgccaggccaaccagacgcagaacatcacgcgcttcctcgtcctggcgcgcaaagcggtgaacgtctccgaccaggtgccggccaagaccacgctgttaatggcgaccggtcagcaggcgggcgccctggtggaagccctgctggtgctgcgcaaccacaatctgatcatgaccaaactggaatcccgcccgatccacggcaatccctgggaagagatgttttatctcgatattcaggccaacctggattcgctgcccatgcgcaaggcgctgaaggagctggcggatatcacccgctccatgaaggtcctcggctgctaccctagcgaaaacgtggtcccggtggatccggtttaacattcgcggaacggtaatttcttcatccctgccaccgctaccggcagggtgaagatggcgcctgacagcggatactgcgccagctcatcgtcctccatgttttcccgggtggtggtgatatagagcgttttcatatccgccccgccgaagcagaccatcgtcgggcaacgtaccggcatcgggtaggattccagctcctcgccctgcggcgagaaacgggcgatccgccagccgtcgaacattgcgctccagtaacatccctccacgtcgatcgccgccccgtcagggatcccttcgccaggctgaaaacggcgaaagacttcgcgtcggccaggctcaccctgctcatccagcggcgtacggtagatcacggcgttcggcgtatcagaggtatacatccagcgccggtcggcgctaaaggccaggccattggcgccatggatgtcacactggatcactttcggctgcaggtcgttatccactcgcatcagcagcgcgccgttgtaatccccaggcccccagaaggtaccggcataaaagcgcccatcgcgatcggtcccgccgtcgttaaaccgcgccagctccgggttgctcgggttatcgcagactttccgccgcagcaggccgtgggcgtcggtcagccagatgccgctgcgcaatgccacgataaacccgcccttctcgcgcagggcaaaacagccgacctcctctggaaactgcagcacctggtgttctccgctgcggatatcgtagcggtgaatttcacattccatgatatcagcccagtagagggcctgctctgcctcgctccaggtcgggcattccggcaggtatccggtgtagtcaaacagcggttgtggttcagccatcgttgtcatccctataaaaaaagccagcggtcgctggctttattgtatacatctttttcgctttactgccgattatcgttcgcctgacgcagcagcgtgcggctctcgctctggaaacgctgggcgtaatcgccaaaccagtgttcgactttacggaagctgtcgataaacgcctgcttatcgccctgctccagcaggccgatcgcttcgccgaaacgctggtagtagcgcttaatcagcgccaggttgtttaccgatgacataataatatcggcgtacagctgcggatcctgggcaaacagacggcctaccatcgccagctccagtcggtaaatgggcgacgagagcgccagcagttgctcaagacgtacattctcttccgccaggtgcaggccataggcgaaggtggcaaagtggcgcagcgcctgaataaaggccatgttctgatcgtgctcaacggcgctgatgcggtgcagccgcgcgccccaaacctggatttgttcgaggaaccactgataggcctccggctggcggccatcacaatagaccaccacctgcttcgccaggctgccgctgtccggaccgaacatcgggtgcaggccaagaaccgggccctgatgcgccgccagcatcgcctgcagcggctccgctttcaccgaggcaaggtcaaccagaatgcaatccgccggaaggggcggcagcctgccgatcgtctccacggtggtgtgaatcggtacgctgacgataaccatgccggcatcggcgacgatatccgccgcccgggcccaatcgtttttttccagaatacgcacctggtagccggacagcgttaacatcttctcaaacagacgccccatctgcccaccgccgccgacgatgaccactggccgcagattcggctgcagggttttgaagcctttgtcgttttcgctggaataggattcccgcatcacgcgacgcagaacgtcctcgatcagatccggtggtacgccgagcgcagccgcctcttcacgtcgggaggcgagcatcgccgactcgcgctccgggacgtaaatcggcaggccatactggctcttcacctcgccgacttcggccaccagctccagacgcttagccagcaggctaagcaacgctttatccacttcatcaatttgatcgcgtaacgcggtcagttcagcaaccatactttcctcttaaaccaaacgggccgccaggtggccgcggagatccttatccagttcacgcagcagcgcctcggtagtctcccagctgatgcaggcatccgtcaccgagacgccgtatttcatcgcctcacgcggctgttcagaggactgattgccttcgtggatattactttcgatcatcaggccgataatggagcggttgccatctttgatctgcgcgaccacggattcagccacggccggctggcggcggaaatctttattggagttcccatgactgcaatctaccatcagcgacggcttcagtcccgcctgcgccatctctttttcgcatttcgccacatcttccggaccgtagttcggcgccttgccgccacggaggatcacatggccgttcggattaccctgcgtttgcagcaggcagacctgcccggcctggttgatgcctacgaaacggtgcggcatcgccgcggcgcgcatggcgttgatggccgtggccaggctaccgtcggtaccgtttttaaagccgaccggcatcgacaggccagaggccatttcgcggtgcgtttgtgattccgtggtacgcgcgccaatagcggaccagctgaacagatccccgaggtactgcgggctgttgggatccagcgcttccgtcgccagcggcagtcccatattgacgagctcgaccagcagacgacgcgcaatcttcaggccgccttcaacatcaaacgaaccatccatgtgcggatcgttaatcagccccttccagccgacggtggtacggggtttttcaaaatagacgcgcatcaccaggtagaggctatcgctgacctctgcggcaagggctttaaaccgacgagcatattcaatcgcagcttccggatcgtgaatggagcaaggaccacataccaccagcaggcgcggatcgcgaccggcgatgatatccgaaatggtctgacgggcgtgcgcgatctgcgcttcctgctcgacgctcagcgggaattccgccttcagttgctccggggtcattaatacatgttcgtcggtaatatgtacgttgttcagcgcgtctttttgcatgattgcgatcctgtgtagctcgtttgcgataagggttgcctcagagggcatgacgtaacgataccacacaaagtaaagaattcaatccatattccgtaaattttaatttacacaaacgaattaattgccactcacaatggcgcgatgcgtataacaatatttacacatagaaaaaacaagccaaacttgcgcacccacggtatcggtactacgaaaaatcctggtgagaattgtcccaaagcaaagggcgcatctaatgacgggttttattaacagtggtattcttcgccgggcatcggcagcggcttttcccgcgctatggcgactttgacggaagcgttaatgacagtattacaccgtcttttattgactgtattttttctcatcgcggtatctcctgtttttgctgccggaccttcagaacatgttcgcgctattgtttccgggatcgtgacctacacccgttggccgtcattaacaggagcgccaaagctgtgcatttttgcctcatcacgcttcacccatagcctggctcatgaagatccggatgcattaccctatcaaccggtgatagtacgtaatcgtgaagaagcgttaaaaacgacctgcgatggtttttattttggcagcgaatcgccgactgaacagtcagaactcactcgccgctatggcccgaggccgctgttactcatcgcagaacaaaatacggattgttcaattggtagcgcgttttgcctgatcatcaatgacgaccgggtccgcttctccgttaatctggacgttctgacgcacagcggggttcgggttaacccggacgtcctgatgcttgcccggaagaaaccacatgaataaggacttttcacagactccgcgcccgactttcaaacgcgcgctccgtcgcattagcgtgataagcgtggtgatctccatgacgctggtctggctgctgctgagtacagcctcaatcttcacgttcaagcagtacgcgcagaaaaatcttgagctcactgccgcgaccatggggcgcagcctcgaagccgccctggtgtttggcgacagcgcggcggcagaggagaccctcgcgtcgttgggcaagcaagggcagatctcccaggcaatcgtgctaaacggccagatgcagcacttcgccgcgtggcgccatgaaccgctggccaacaaagagcaagtgagcgggcttatcagtaaatggctgtttccggagcccacggtgcagcccatctggcaccagggcaaacaaatcggcgagctgagattgaccgcgcttgatgaactgattagccactttctcggtatctcgattctggtgctgaccggcagcattctgctcgcctcgttcatcgccctgctgctgacccactccctacaccgggggatcgtcgccgccctgcagagcatcactgaggtcgtgcatgatatacgtgaaaaccgccacttctcccggcgggtgccggaggagcgtatcgaggagttccatcttttcgcccaggactttaacagcctgctgggggaaatggaggactggcagcgccagctgcaggccaaaaacgcgcagctgttgcgcagttcgttacacgatccgttgaccggcctggctaaccgcgccgcctttcgtaacgcgctcgccgagctgatgcagaatgaagtcgatcatcaaacctcggcattgctgtttcttgatggcgataatttcaaactgattaacgacaactgggggcatgcggcgggcgataaagtgctgatggaggtcgccagccgcctgatgacttttgccggtaaacgccatctggcgtggcgtcttggcggcgatgagtttgccgttctgctgcgcgaggtgcgctcggaagcagaagtgcaggccctgtgccaggcgctaacggaacaatttcttccgccattcaacctgcacaacggtcatagcgccacgctctcgctgagcgtcggttatgccctggcgtgggagcacgccaccgcggaatcactgcaagaacttgccgatcagaatatgtatcggatgaaaaaccaacgtatccagcagacgctgaaataataaaggactcattatgatcagaaaatatttcgtccccgccctgatggcggcggcgcttttgacaggttgccaggctcctcagggaaaatttaccccggagcaggtggcggcgatgaaatcttacggcttcactgaaagcaatggcgattggtccctgggcttatccgatagcatcctgtttgacaagaatgactaccgactacgtcccgacagccgccagcagatcaccacgatggcctcgcggctggcggctaccgggatcacccatagccgccttgaaggccataccgataattatggtgaagatagctacaatgaagccctgtcgcttaagcgggccaacagcgtggccgatgcctgggcggaaggcgctcatgtcccacgcagtaatttagtcacccgcggccttggcaaaaaatacccgatcgccagcaacgacacggcggccgggcgcgccgaaaaccgccgggtaacggtggtcatcagcacgccgtaagtcttcacttagtcgctggacttcatcatcctcattgccgttgccgcgcgccagcgcaggtagtcaacggcaatgaacagcagcaggctggctcccattaacggcatggccaatccaagggcaaacgccagcccaagcaccaggcttcgggcaggccaggcgagcgacagccacgcctgcagcagcgaatgcgccggatcccaggccgcctgaggcggacggcggatccaccataaccggtaccccaccccgatggtaacgcacagcgcgcagccaaatcccaccagcagcagctgattcgccagaccaaaaaggatccccatatggaaatcgacgccccagcgggtgagcttcgccatcagcggaaagtcggcaaaacgcgtgcgatccaccacctgcatcgtggcgccatcgatcgccaccgcgtccacctgcgtcggccagcgacggtcgatctcattcaccgtccaggcgcggtcgtctgacactggcggacggatctccagccggctggcgttcagccccgcctgacgggccgccgccagcgcctggtcaaactgggccaactgcagcgccggctgatgctgggccatggccatcgcatccatatgatgtccggcatggggatcgtgcgtcatcggcatctcgccatgcagctgggtattgacctgcggcgtcagccagccgaacgctgcccgcattttgtccacattgccgccggcccattgcgaccaggtcaggccggtggcggagaagagcagcatacccaccagtaagccccagcccagcgtcacgtgcagccgacgatggttctgcagggcgttattcagccgccgttttggacgcgtcatcgcccacagggcaatgcctccgagcgcggccacccacatccaggaggcggccagttcgctgtataacctcccgctgtcgcccagcagcagagagcgatgcgcataatcaatccactggcgcagcggcaggatgccgctggtgccgtagaccgtcatatcgcccttcacccgcagcgcgatcggatcgacaaaaatagcccgggattccgactctccgagacccggatcggcaaacataatgcgcgtggtctcgcccaacgcaggcgccggacgcaccgccagcagccgcagattgccctgggtcgcttcttcggccaccgcaatctgggcgctgagcggctgcggagtcccctcggcaaggccatgcagcgcgtcgtgatagagccagttttccagctgcggcgtcgccacgtacaacgtgccggtcagggcagcgacaaagataaacggtccgataaacagaccaatatagaaatggaggcgacgcagcaggttcagccatgccgcgcgcgaggtgcaggttgtcatacttttccttttttaaagcaaaagaggttgttgcgcggtgcgcagattgatttttattaaagggaaaaagcagacagccgcggcggggcgcgggtttcggggtagagccagggaaagtagtgccagtgctttaataccgggcgagaaaccggcaggcgaatgcgccgcaggagcatggcgacgaacagcgccagcgcgaaaaggagccccgggacatgggctaacagcacgcaatagccacacgcttcggcatggtccagcagcatttcgtgtccggtatgcgtagcgccgtctgtgctgtgcatcatcgccatcttgtgcccgggcatctgcgccatgctcgcggacgagctatccatcatcatggcgtggtgcatgccgggcatggcgcttatggggtctttttgcagggagacggagatcaggggggccaccacgatcagcaggatcgccaacagcgccagccaggcggctcgccgtttaggtgtcgtttgctgaaaactgttactgaccaccgcccctccgtatagagggcgtattgtaaatgatttacatcacgatggttacaacaaagataaaaaaagggccagccatctggccagccctttctatcaggatgtcgcgaaagcgaatcttagttaagacgctctttgatacgagcagacttaccagtgcgctcacgcaggtagtacagtttagctttacgtacagcaccacgacgtttaacagcaatgctgtcaactaccggagagtgagtctggaagacacgctcaacgccttcgccgttggaaattttgcgaacagtgaatgcagagtgcagaccgcggttacgaatagcgataaccacgccctcgaatgcctgcagacgttttttggaaccttcaacaacccatactttcacttccacggtatcacccggacggaaggaaggtacgtcctgcttcatctgttcttgttcaagttgcttaataatgttgctcataatttaatctcttatcctgggtaaactgatattgggggctcacgcctgcccatcatgtttatgctgctgttgcgcgtgttcagttttgaactccgccagcagctttgcttgctcttcagtcagagccaggttttccagaagttcaggtcttctaagccaggtgcggcccagcgactgcttcagacgccagcgacgtatctcagcatggtttcccgacagcaatactggcggtacttccatctcctctaacacttcaggacgggtatagtgggggcaatccagcaacccatcagcaaaggaatcttccgttgccgatgcttcatggcccagtactcccggaatgaaccgggaaacggagtcaatcagcgtcattgccggtaactcaccaccgctgagaacgtaatcgccgattgaccattcttcgtcaatttcggtttggattacgcgctcgtctatcccttcgtagcgaccgcacaccagaatcagtttctgattcgttgccagttcgctgacgcccgcttgatcaagcttgcgtccctgaggtgacagataaatcaccttcgcgccttcacctgccgcggcttttgctgcatgaatggcatcccgtaagggttgcaccatcattagcatccccggtccgccgccgtaaggacgatcgtccacggtacggtgccggtcatgcgtgaagtcgcgaggactccagctttcgatgctcagcaggccattttttactgcccggccagttaccccgtaatcggtaattgcgcggaacatttcaggaaacaggctaattatgccaatccacatagcgccgtcttttaccgtttatccggagaatttaaaaaccaggatcccaatctacttcgatagtacgcgtagtgagatcgactttcttgataacctgcccatcgaggaacggaaccaaccgctccttgataccaaatgcatctttcaggtttgccttgatgacgagcacgtcattcgacccggtttccatcatatcgatgactttaccgaggctatagccttccgtcgtaactacctggcagcccatcaggtctttccagtagtagtcaccctcttccagctccggcaactgcgatgaatccacgataatttcgcaattagtcagtagattcgcggcatcacgatcgtcaacacctttcagcttgatgatgatgtcctgattgtggtggcgccagctttccagctcaacgacctgccactgacccgccttctggattaaccagggctgatagtcaaaaatgctttcggcgtcttcggtggaggaaaacactctgagccaaccacggataccgtaggaagaacccattttccccaatacgatcggatcaacaggtgcttgcgcggtgtgttgcttgctcatcatgaccaccgtgacagattaagctgctttgttagcggctttgatcagcgcggcaacgcgatcggaaacagtagcgccctggccaacccagtgagcgatacgatccagatccaggcgagtttcttcttccgcaccgttagcgatcgggttgaagaaaccaacgcgctcgatgaagcgaccgttgcgtgcattacggctgtcggtgacaacaacctggtagaacggacgctttttagcgccgtgacgtgctaaacgaatagttaccataacatcctcttgtgtgaataaaacaaccgggccccatcgaggaacggagcccggtgtcatattaaaagcccgaaaattttactgatttctggggaaaatgcaatcagcagttgataagtctgctgtaaaaggccgtcggcggtgcagccagtttagtaccagcgtgtgcgcaaccactgtaacgtacaggtagtacgtgaggatggcgagcacaccccggcgctaaaatggcaaacaagataaccttatgcccttgtttttaacgacccgggaagcctggcggcatcatccctttcatcccgcgcatcatcttcatcatgccgcctttcgacttcatcttcttcatcatgcgctgcatgtcgtcgaactgcttgagcagacggttcacatcctgcacctgcatgccgcagccggcggcgatacggcgcttacgcgaacctttgatgatttccggcttagcgcgctctttcagggtcatcgagttgatgatcgcttccatacgcaccagcactttgtcgtccatctgcgctttcacgttgtccgggatctgccccatgcccggcagcttgcccatcaggctggccatgccgcccatgtttttcatctggcgcagctgctcaaggaagtcggtgaggtcgaaaccgtcgcccttcttcagcttggaggccagcttctcggcctgcgcgcggtcaaccttgctctcgatatcttcgatcagcgacagcacgtcgcccatgccgaggatacgggaagcgacgcggtccggatggaacggctccagcgcttcggttttctcgccgacgccgaggaatttaatcggcttgccggtaatatggcgaatcgacagcgccgcgccgccgcgggcgtcgccgtccactttagtcagcaccacgccggtcagcggcagcgcttcgttaaaggccttcgcggtattcgccgcatcctgaccggtcatcgcatcgacgacgaacagggtttcaaccgggttaatggcggcgtggacgtgcttgatttcgtccatcatcgcttcgtcaacgtgcagacgaccggcggtatccaccagcagcacgtcgtagaatttgagtttcgcttctttcagcgccgcgttgacgatatcaaccggcttctgcccgacgtccgacgggaagaaatcgacgccgacctgctcggccagggtttccagctgtttgatcgccgccgggcggtaaacgtccgcggaaacgaccagcactttcttcttgtgcttctcgcgcaggaatttccccagcttaccgacgctggtggttttaccagcaccttgcaggcccgccatcagcaccacggccggcggctgcgcggccaggtcgagcgtctggttctcttcgcccatcgccgccaccagctcgttgcggacgattttgacgaactcctgacccggggtcaggcttttattgacttcatggccgaccgcgctctctttgacgcggctgatgaaatcacggaccaccggaagcgcaacgtccgcttccagcagcgccatgcgcacttcgcgcagggtgtctttaatattgtcttctgtaaggcgtccgcggccgctaatgttgcgcagcgtacgcgacaaacgatcggttaaattatcaaacattgtctctcgcctgaggtggaaacggtcggtcgccgcagcgacacacaaaacgaatgtggcggagtataacacgacatcaatctgaatgtgctgcaacggttggagcagaggcctgctaacgttatactgcttctctttcttatttagccaacagccgacacctatgcctgtttttgctctactcgcccttgtcgcctactccgtcagcctcgcgctgattatccccggcttgctgcaaaaaaacagcagctggcggcgaatggcgattttatctgcgactatcgccttgatctgccatgcttttgcgctggaagcacggatattccccggcggcgagagcgggcaaaatctcagcttactgaacgtcgggtcgctggtcagcctgatgatctgtacggtgatgactatcgtggcctcgcgcaatcgcggctggctgctgctgcctatcgtctatgccttcgcgctgatcaacctggctttcgccacattcgtgcctaacgaatatatcacccacctggaaaccaccccggggatgctggtgcatatcggcctgtcgctcttctcgtacgccacgctgatcattgccgcgctgtatgcgttgcagctggcgtggatcgactaccagctcaagaataaaaagctggccttcagcagcgaaatgccgccgctgatgagcattgagcgcaaaatgttccacatcacccaggtcggcgtggtgctgctgaccctgacgctgtgcagcggcctgttctacatgcacaatctgttcagcagcgaaaatatcgataaagcggtgctgtcgattattgcgtggttcgtctatatcgtcctgctgtgggggcactatcatgaagggtggcgcggacgtcgtgtggtctggttcagcgtcgctggcgccggtctgctgacgctggcctattttggtagccgcgtgctgcagcagttcgtgagctaagtcttttaaggaatcctacgtggaacatatctccaccaccacgctgatcataacgctgatcgtcatggtgattatctctgcctatttctccggttccgaaaccggcatgatgacgctgaaccgctaccggttgcgccacatggcgaaacaaggcaaccgccccgccaagcgcgtggagaagctgctgcgcaagccggaccgcctgattagccttgtgctgatcggcaataaccttgtcaacattctcgcctcggcgctgggcaccatcgtcggcatgcgcctgtacggcgacgccggcgtcgcgatcgccaccggcgtacttacctttgtggtgctggtatttgccgaagtgctgccgaagaccatcgccgccctctatccggaaaaggttgcctaccccagcagcttcctgttggcgcccctgcaggtgctgatgatgccgctggtgtggctgctgaataccatcacccgcatactgatgcgcatgatgggcatccgcaccgataccgtcatcagcagcgccctgagcaaagatgaactgcgcacgattgtgaatgaatcccgttcacaaatctcacgacgcaatcaggatatgctgctgtcggtactggacctggagaaggtcagcgttaacgacatcatggtgccgcgcaatgagattgtcggcatcgatatcaatgatgactggaaatctatcgtccgccagctgacccactccccgcatggccgcatcgtgctctaccgcgattcgctggacgatgccatcagcatgctgcgcgttcgcgaagcctaccgtctgatgacggagaagaaagagttcacaaaagagatcatgctgcgggcggcagatgagatctactttgtgccggaaggcacgccgctcagcacccagctggtgaaatttcagcgtaataaaaagaaagtcggtctggtggtcgatgaatacggcgatattcaggggctggtcaccgtcgaagatattcttgaagagattgtcggcgacttcaccacctccatgtcacccaccctggcggaggaagtgaccccgcttaacgacggcacggtgattatcgacggcagcgccaacgttcgcgaaatcaacaaagcgtttaactggcacctgccggaagatgaagcgcgcaccgtcaacggtattatcctcgaagcgctggaagagatcccggtcccgggcacccgcgtgcgcattgagcagtacgatatagatatcctcgacgtgcaggacaacatgatcaaacaggtgaaagtgatgccggtgaaatcattacgcgagagcgtcgcggagtagcgcgagcgaaggaagtaatatcacggtgggctgcggcccgccgtttttttatctcgcgccagcagcgatgacacaaaaaacggccgcccgcaggcagccgttgagcaaggcagcaagcgttatttcgctttcgctaccgtcaccatcgcggcgcgaatagtacggccgttcagggtataacctttctgcatcacggacagcacgttgcccgccgccacatcttcagactcgaccatcgcaatggcctggtggacgttcggatccagcggaacgttggtgtcggcgatcacttccacgccgaacttacgcactacgtccagcatagatttcagggtcagttcgatcccttccaccatcggcgccagctccggattagccttgtcggccacttccagcgcgcggtccaggctgtcgatcaccggcagcagttcattgacgaatttttccagcgcgaatttgtgcgctttctcgatatcctgctcggtacggcgacgcaggttatcttcgtcggctttggcacgcagcatcacttcacgttcacgtttctgcgcttcagccagctgggcttccagattcgcaattttttcatcgcgcggatccacctgctcagccgaaacttcaggctctactgcctcaacgtcgtcgtgctgctccgtgataatttcttccggggcttgcccctcaggcgttttctgttctttactactcatgaatttctccgcgtttttttcgcattcatctcgctaacttcgcttattatggggatcagtttccgggtttcaagggaagcggacagattgtcactatttcatttaacgcaaggacatccagatcatgaagaaccatttcaagtgtatcggcattgtgggacatcctcgtcaccccaccgccctgaccacacatgaaatgctctggcgctggctgtgcagcaaagggtatgaagtgctggttgaacagcagatcgcccatgaacttcagctcagcaacgtgaaaaccggcacgctggcggagattggccaacaggccgatctcgcggtggtggtgggtggcgacggcaatatgctcggcgcggcgcggaccctggcccgttacgacattaacgtcatcggcattaaccgcggcaacctcggctttctcaccgaccttgacccggacaacgccctgcagcagctcgccgacgtgctggaaggccactacatcgccgagaaacgctttctgctggaggcccaggtgtgtcagcaggattgccagaaacgtatcagcaccgccatcaacgaagtggtgctgcaccccggcaaagtggcgcatatgattgagttcgaagtctatatcgacgaagtctttgcgttctctcagcgatccgatggcctgattatctccactccgaccggctccaccgcctattcgctgtcggccggcggcccaatccttacgccgtcgctggacgccatcaccctggtgccgatgttcccgcacaccctttcagcgcgaccgctggtgatcaacggcgacagcaccatccgcctacgcttctctcaccgctgcagcgatctggagatcagctgcgacagccagattgccctgccgatccaggatggcgaagatgtcctcattcgccgctgtgattatcacctcaatctgattcaccctaaagattacagctatttcaatacattaagcaccaagctcggctggtcgaaaaaattgttctgattttcacggctgcctctttactggataaaaaaccagtctatactgtacgaaaacacagtattggtttttcatacaggaaggcagctatgttggcgcaactcaccatcagtaattttgctatcgttcgtgaactggaaattgatttccacagcggcatgaccgccatcaccggggaaaccggcgccgggaaatccattgccatcgacgcgctggggctgtgcctcggcggcagagcggaagccgacatggtgcgtcgcggcgccacccgtgccgacctgtgcgcgcgcttcgcgctgaaagatacccctgccgcccagcgctggctggaagagaatcagctggagagcgggcgtgagtgtttacttcgccgggtgatcagcgccgacggccgctcgcgcggcttcatcaacggcaccgccgtcccgctctcgcagctgcgcgagctgggccagctgctgatccagatccacggccagcatgcccaccagctgctgaccaaacccgaacaccaaaaaacgctgctcgacggctataccggtgagtatgcgcttactcagcgtatggccgagcactatcgccagtggcaccagagctgccgcgagttggcccagcatcagcagcagagccaggagcgcgccgcccgcgccgatctgctgcagtatcagcttaaagagctgaacgaatttaacccgctgccgggagaattcgagcagattgacgaagagtacaagcgcctggccaacagcggccagctgctcagcacctgccagcacgcccttacggtactggcggacggcgaagaggccaatctgcagagccagctttataccgcgaagcagctggtcagcgagctggtgggcatggacagcaagctttccggcgtcctggatatgctggaagaggcggccattcagcttagcgaggccagcgacgagttgcgccactaccatgaccgtctggatctcgatccgaaccgtctgtttgaacttgagcaacggatttcccgacaaatcgcgctggcgcgtaaacatcaagtgatgccggaagagctgccggcggtttatcaggcgatgctggaagagcagcgcctgctggacgacagcgccggctcgctggaatccctcagccagcaggtggtcgaacatcatcagctggcgctggagaccgcacgccagctgcatgccctgcgccaggccagcgccgacgagctgacccagcttatcaccgaaagtatgcactcactttcgatgccgcacggggtcttcgcgattgaggtcgcgttcgatgaacgccatctcaccgccgacggcgccgaccatattgagttccgcgtcaccactaaccccggtcagccgctgcagccaatcgccaaagtggcctccggcggcgaactgtcgcgcattgcgctggcgattcaggtgatcaccgcgcgtaaaatggaaaccccggcgctcatcttcgacgaagtggacgtcggcatcagcggcccgaccgccgccgtggtcggcaagctgctgcgccagctgggcgagtccacgcaggtgatgtgcgtgacccacctgccgcaggtcgcaggctgcggccaccatcatttctttgtctgcaaagagaccgatggcgagatgaccgaaacccatatgcagccgctggataaacgtgctcgcttgcaggagctggcccgtctgctgggcggcagcgaagtcacgcgcaacaccctggcgaacgcgaaagagttgcttgcggcgtaaactttttgattttcacagggtcatagtgaacagcaaattgcctgctgacctgcagccggaggtttccaacggcgcgaaggtctattattatcggcatattacagatgagccacgtactgctcgggcccaaaaaggaatcaaatcactatgcgctgtaaaacgctgactgctgccgcagcggttcttcttatgttgaccgcaggctgttccactctggaacgagtggtttaccgtcctgacatcaaccagggtaactatctggcaccaaacgatgtagcaaaaattcgtgtcggtatgacgcaacagcaggtagcttatgctctggggacgccaatgatgacggatccgttcggcaccaatacctggttctatgtcttccgtcaggagccgggccaccagaaagtgactcagcagaccctgaccctgaccttcaacagcggcggtgtgttgactaacattgataacaagcctgcgctgaccagtcagtaaggcccggaaaagcaaaaagcgctcggtgagcgctttttttatggctgatagccggtctgctgcaggttactttgcggcgcttttctctgcccgctggcgacgcagctctttcgggtctgcgatcagcggacgatagatttccacccggtcgccgtcgtgaacttcgtcatgcagctttaccggacgactgtagatacccagcttgtttttcgccagatcgatgtcatcacgcagcgccagcagaccgctggcgataatcgcctgctcgaccgtcgccccctcgtccagggtgacccgctgcagatactgcttttcaggcagcgcgtaggcgacttcaacacgaatattagccggcactgtaaacctctttggcgcgcgaagtgaacgcctgcaccatgttagcggccagctctttgaagatccggccaaaagccatctcaatcagtttattagtaaactcgaaatcgagatggaattcgattttgcaggcctcggggctcagcggaataaacttccagccgccaatcagcttcttgaacgggccatccaccaggctcatcaaaatgctctggttgctggtcagtgtattgcgtgtggtgaaggtcttactgatgccggctttggacacatcaaccgccgccgtcatttgcgtcggccccaattccagcacgcggctaccggtgcagcctggcagaaaatcaggataggacttcacatcgtttaccagttgatacatctgttccgcgctgaaaggcaccagcgcagtacggctaatctgaggcatagcaggttccacatttaaacacagtgcaaataatatcatttatctgctgctaaaaaaaacgctgtgccgcaactcgtgctaagatgcgcagtacacctcgcaggatgcgatcgaggtaactgtgtataagacgatgacttcaggacattatgactaagaaaaaagcccacaaacctggatcagccaccattgcgctgaataaacgcgcccgtcacgaatactttatcgaagatgaatacgaggctggtctcgccctgcagggctgggaggtcaaatccctgcgtgcaggcaaagccaacatcggcgatagctatgtcatcctgaaggatggcgaggccttcctgttcggcgccaactttacgcctatggccgtggcttccacccactatgtctgcgacccgacgcgcacccgtaagctgctgctcaaccagcgcgaactcgacacgctgtacggccgcattaaccgcgaaggttacaccgtcgtcgccctgtcgctgtactggaagaacgcctggtgcaaagtgaaaatcggcgtcgccaaaggtaagaaacagcacgacaagcgtaccgacctgaaagatcgtgaatgggcgctggataaggcgcgtattatgaagcacgccggacgttaatttcccctccccgagggccagctctcgctggcccttacgctatatccttgttgatgctgctttttcgtccaccctgctgaaataatcctgcgtgatggggctggtaacgacattcacaaatctgttatacttgacctacacattggggctgattctggattcgacgggatttgcgaaacccaaggtgcatgccgaggggcggttggcctcgtaaaaagccgcaaaaaatagtcgcaaacgacgaaaactacgctttagcagcttaataacctgctctgagccctctctccctagcttccgctcttaagacggggatcaaagagaggtcaaacccaaaagagatcgcgtggatgccctgcctggggttgaagcgttaaatctaatcaggctagtttgttagtggcgtgtctgtccgcagctggcaagcgaatgtaaagactgactaagcatgtagtgccgaggatgtaggaatttcggacgcgggttcaactcccgccagctccaccactttagataggactgcaaccagacagtgatagttaaaacagtcacttacggacaccgaccagacggtaagcagaccaaataaagacaaaaatatgcacgcaaaatgcacgtgcacttcaaaagaaccccagatttcacagtctggggttttctatttgtaaataatcgtaacaaaaatacacacctaaaaagcatagacaccaggcatacactggatatacttacagcaatacaactgtatatccagccagtaaatcgaggtgttgatcatgcgtgtagaaatcagcattgccaaagagaaagccgggaaaatgccaaagggttcactggaggctttgaaagacgagatgacccgccgtgtcagtaagcaatatgacgatgttgaagtgatcgtgaaaacggccagtaatgatgggctgagcgttttgtgggcgactgataaggaaattgctaaggagtttgtagagactactctgaaagacgcctgggaaacggctgatgactggtttataaactgagcagccaatacaatcattcacggtgtccattccgggcatctgtccgccgggtagctcttgcatacggctaccgggcgggcttccttatcccgctgggaagtacttataaatagtcttcaccccaaccccgatgacatctgccacctgctgccgggtagagccgttctccagcattctgcggcaccgctccaccacttcttcagtcattacccggcggcggccgccgactctcccctgctccctcgctgcggctaacccggctcgggtacgctccacaatcaactcgcgctccatttccgccagggcgctcatgacgtggaagaagaaacgtcccgcaggcgtcgaggtgtcgatgctgtcagtaagactgcggaaattcaccccgcgcgcctgcaactccgacacgagcgtaatcagatcgcgtacgctgcggccaagccgatccagcttccagaccaccagcacatcccccgggcggagccgccgcagcgctcgctttaaccctggccgccgggcatttttcccgctggccatatcctcaaaaaccagttcacattctgcgcggatcagcgcgtttttctgtaaatcgaggttttgatcccctgtagagacccgtgcatagccaatcagcatgttgtaacccgttgaaatagctgattgtaaaaagctgcggccattcgctcaaaccctcgtttgggcgaagcctctttttggagcaaaaaacatggcctttaacccggagctggggagcacgtctcccgctgtgttgctcgataacgccgagcgcctggataagctggtcaatgggcccgccgcagatgtccccgaccgtggtggtgagcctctttattcatggcgtcagatgatggcgaaaaatgatgagatacggcagaacatcattccgctcagcaagcagtatgcgacgctggcagcggcccaggcggatatagcgaatattccggtgaactccacaacctacgtgcgtagcccggacggcagtgcgctggctgacgagtacatgaatgtagccgggacgctgactgccaccgggcgcaggatgccgtcacaggcctacgttgatggtatgcagggagatatcgactcgctcaatcagatgcggattacgttatcagattcgctgagcgacacatggcgggacgaccgtgatgacaaaacagaggtagttctggtggcggataatgcgctaaggaaacttgtcaaactaaatatcgaaaagcagaaactggttgtgttcgggaatgaggtaccgcgacagggcgaagtggatgaggccagggaggcaggatctgaaacatggtcctacaacggaagtgatgcaggcaggataattcttctggcggacagtgccggccgtattgttcgggagttgcgattatctgagcaggcggaatacctgttcggtaaaaaggtcggcaccggcggtgacgccagttacacccccccgcaatactggcctgagtttgtggactgtcgcgcattcggacaaagtctttccatcagcctgaacgctggcgccggaatactcaccccggtaaccaacgcatttatgtttgatacggggatcgtaacgtataacaaaacactcacctcactggtcaccgtacccgacacaacaacgcagcaatatcacgatacgagcctgattcatcagctggaatatgattcgccagcaccagacagaaagtatatggctgcggcgtctggcgtgagtggttattccatggctcagctcgaaccagggactgaaccttacacccagctcatgtccagcatagataaagcggcacagcttgcagcatcggctggctatcagtacgggttaccagttctgacattcttccagggggaggcggatgcgtatctcggtagttcttactcttactaccgtagcaaaatggttttgatgcagtcctcaatcaacgacaaagccaagagtgtttcgcgcgcaacctctgatatgccgatgattatttatcagatggcgtctcagggacgatatcagggattagtcaacccgagctctgatattccgcgagctcagctcgatgaggcaatcagtaacccgctgattcagttgtgtaccccgatgtatattttcccttatacagacggcgtgcatctgacgaaccacggctaccgctggcttggccttttccgcgccaaggcgatccgatactggatggaaaacggaaaaccgtggaagcctctgtatccgatcgacatttataaagttggctcaaataccgtggtggcggcgtttcatgtcccggtcggcaaccttcagttcaggactgacattgtccccgaacacccgtccggagcaaagggttttgagctgtggcaagagacgtccgatcccaatgtgttggaacgtcttgagatcgcctccgttcaattgaatggaggcgacaaggtgaaagtcaccagcgccaccccattcaccggaaaagtctatctcggttatggctggacgccgctcaaccgtggcgcatctgacggggcaggccgctatccgtcatggaacgccggagtcaacagcggtatctgtggaaacctctgtgactcagacaactcaaccactgatctgcatgatgcagctggcaatgcgtaccagctgaagaactattgctgctgcttttataaggaagccatctgatgccgtatctattcactcgccttaattttgaagtcccgttttccgatgcggaatatctgaatgagtctgacgtcagccgggtgatctcagcggtgactccgcagcctggcttcttcaactggttgtttggcggctcatctgccagtctaatctcttacgacggcgctcatgccatgacgcaagccgatccaacgttgaccataatgtacggtgacaattacgtacagttacctgccagtgcgggcgcactgaaaaatggcctccagactgaatggggagataccagcatctatacctggtgtaacgtcattcagtattcaggagctgcttctcaggtgcttggtggggctacagataactcgacaggtgaagcggtgcagatttcctctgccggggaaattgtttttgcctataaagagagcggcacgggcacaaccaaatcgcaggccataccggtaccgcccgggctgagcgcgggagcgaatatttttatcgcagtcacgcgcagcggcagcaacctgatagttttcgttggaggtgcggctacaaaactgacactgacagcggcaaaaaacgccaatgctgccttaaaaattggccctggtaacacatcctatacaggcgcggcaggctactctaaagaactgcgctgttatgagttcctgtactctaccagcgcagtatctgccgcagatctggataatatctatgccgcggcaaaagagcgctgtgcggcgagggggatcagcgttctgtaaattctgtaggatgcggcagtcataacattggcagccgcatttatttacactttcaaagtaacgttgaaagaagagcttcaaaactcgtgaattgctgagccggggaataatcttccggcacaaaatagcgatacaccttagcctcaaatggtgctgagacgtaaagcacatcaccgccgtttcctggtgcagaccccatgcgcagaagtgtgggggcgctgttgccgagtaccgagtagacccatccagaacctgcattttccgccaggacaatgacagcgactgtattcccggaagacgtgtattccaccgaaaaatacaccctccgctttccaccctgaacagttgccgccagtgctgcggatgtgtttccccgctccggcgggacatatgcgatctgctgctcgctccatgcagaccccgcccatgtcgcaacgtagaccccgaacttactgaaccaggtcccggaaggatcatccacggttctgaaacggtaagtgatatgcgacaatccctcgccatcaaacgcaaatttcgcagactgaatccccattttcagcccgtcac

SEQ ID NO: 178 - DNA, 30750 bp, Unknown
  source: /note="Description of Unknown: MKP2_2161_1 Mutant Bacteria sequence"
gttaaaggatgggggggtaaagtgcggcagcccgaaccacgccgcctgggcgaggggggagaagtccagcggtttgccaaggcccaggccgttagccagcagggcgtacagcgcgcaggcgacaatcaggccgaccaggatcagcagtcgctgcagcatcccgcgggtaaataccgccactatgccgatgcagagcacagttaacaccgccatccagctgtcgaaggcgctggcggagacgctgcgcacggcaatcggcgccaggttcaggccgatagccatcaccaccgcgccggtcaccaccggcggcatcaggcgctcgatccagcgggtgccgatcttcatcaccaccagaccaatcagggtgtagaccagcccgcaggcgatgatcccgccaagggcgacgctcagatgagggttcagcccctggccgttaaagccggtaatggcgatcaccaccccgacaaaagcggcgctggagccgagatagctcggcacccgtccgccggtgacgacaaagaacagcagggtgccgacgcccgacatcagaatagacaggttcgggtcgagccccatcaacaacggcatcagcaccgtcgcgccgaacatcgcaacggcgtgctgcacgcccatcaccagcgtttgcccggccgacaagcgttcatcgggggcgacaacgccggattcggcggcgggggaggtcagcttccagcgaggaaaatcgaagagtgccatgatgatatcccgggttaaaggttaacaagcgggtcgcataagcgtgtgatagccgcggtcaaaccacatcagtccccggggctccgggtgacgggtaatggccacgacgtgacaaaacagaatgtcgtgcgtcccgacgctgacgcgctggtcgatgcggcagtcaaagctgaccagagccgcctccagccgcggacagccggtggcgccggtctgccagtcggcggcggcaaaacgctcgtccattgccgttttaccgccaaacagcgtcgacagggcctcctgtccggccgccagggtattgacgcacagcgtgtggtgttcgctgaacaccggccacaccgaagccgagcggttcaggcagaccagcagggtcggcggcgtgtcggtaacgctgcagaccgcgctggcggtgaaccccgcccggcccgccgggccatcggtggtaataatgttaaccgcggcgccgacgtgggccatggcgtcacggaaactcgctttgtccgttaactccatcgtaaactccttatgccagcaggcaggcttcatcaaaggacaggcgcggcaggcggccgtacagcttgccggggtcgccatagccgatattcaccagtagattgcttttccagccgttgtcggcaaaaaatgccgcgtcgactttttcccggtcaaaaccggacattggcccggtgtcgaggcccagcgcccggcaggcaaaaatcagatacgccgcctgcagggagctgttgcgaaacgcggtctcttccgccagctgcgggctggaggtaaaccagctgcgggcgtcaccgtggggaaacagggtcggcagccggtcgtagaaggcgctatcccacgccacgatggcggtcaccggcgcctgcatggttttctgcagattgccgctggagagcgtcgggcgaagtttctctttgccttccgcgctgcgcacgaacacgatgcgcgctggcgaacagttggcggaagtcggccccattttcatcaggtcccagacggcctgcagctgcgcatcgctcaccggcttatccagccagccgttgtgggtccgggcctgggtaaacagcgtctcgcaggccgtgtggtttatcgcgtcgttcatcgggtctccctggcgaccggcagcatagcggacagcccgtcgcgtaaaatggtattaaaggtatcggcgtcggtgacgttacaggcatggccgccccacggcatttccacgagctggctgccggggatcgccgtctgcagcacgcgggagcaggaggcggggaccagcaggtcgtcagcggcgctgataatcagcgtcgggcaggcgatggccgacgcacggcgtgaaaaatcagcctgcttcagggcctgcagccgcttcagcagattctctttgccctgaaaatggctgatggcaagcgcatcttccgcttcgaggcgcggcaggcgcgcggccatccattccgccgggtagagaaatagcggctgcgcttcgacccacgcctgcgcgccgccggcatgcagcagacgctcgcgcacctggaagcagcggcgggtatgcggcgacagcgacagccagccgttgaccagcgccagggcgctcaccgcctcggggcgatcgagcgccagctgcaggccaatcagcgcccccagggcgtggcccaccagcgcgaagcgggcgatccccgccgcccgcagagcgctgaacagctccccggccatcgtcgccaggctgtagccggcgggcagcggaccggcgttctccccggtcccgttatggtcataactcaccagctgatactgttcctccagcgccgcgcgctgcgccagccagtagccgccgcccccgcccagaccggcgctgaggaccaccaccggcgcgccgggccacggagccggagcaatattgagcctcatcatgtcggggtaccgatatgggcgacgctggcgatttccaccagcgcatcgggcttcaccagtccgcactgaatgcagaagcgcgccggtttatcgccggggaagaactcggcgtagacctcgttaatcgcggcgtaatttgtccagtcggtgataaagatgctgttgaaagtcacatccgccatactcccgcccgccgtttcgataacgctcctgatggtctccagcacgtggcgggtttgcgcctttgggtcgccgatgtgcaccacattgttttgcttatcaaacggcagggtgcccgagacgtagaccaccccgtcggcgagcgtccccggaacaaagggggcaatcggcgcggtggtgcctggcggaataatcacctgtttaggcataacgtttctccttggctaaagccagcggggcggcgggggacagcgcgtggcagaagctctcgacgtcgctgacccagccgaaaaaggtttcaatattgaacagcgccgcctgctgggcgaaggccgggccggcctgatgggtggcatcctccagcacgatgccgaagtattcgagaaagaagccatcgcgcagcgtcgattcgacgcagacgttggtggcgatcccggtgaacaccaggtggcgtatgccgcggctgcgcaaaatgcggtcgagcggggtgttaaagaagccgctgtagcgcggtttcggcaacacgatatcgccttcctgcggcgtcagctcgtccaccagctgataatcccagccgcctttcgccagcagcttgccctgcagctccggacgctgacgcatcgttttcagcgcgttggatttgtgatagttcggcgagcccgggccgccggcttcaacatactgatcatcccagccattctggaaccagataatcaacatacccgcggcgcgagcggcggcgacggcggtattaatattgtcgataaccggccgggtagcggagacgtcaaagccggcgagatccagataaccgccctggctggcgtaggcgttctgcatatcgaccacaatcagcgcgctctgctgcggcgcgaaggtcagggattccgggcgagcgggaagggtaatcatcaggccacctcacgggtaacagaagcaatgtggttccggcagcgcatcagcggctgaatgcgttcgccaaaggcgtcaatgccggcaagaaaatcatcaaaagtcagcagcacgccgtcggtgccgggcacgctcgctacttcatcaagcatacgggcgacgctggcatacgatccgaccagggtgcccatgttaatgttgaccgccgaggtggggtcggccatctggcgcacgttggtatcgctgccggagcgggtatctttctgactctgctcggtgagccacgccagcgcttcttcatcggcgcccgctttgtaatgttcccatttggcgcgcgccgcctcgtcggtttcgtcggcgatcaccatgaacagcacataggaccccacgtcgcggccggttttttccgccgcctgcatcatgcgtgcggcggtcggggcaaaggccgttggcgtgttgacccctttgccaaagcaaaagttgtagtccgcatgctgggcggagaaggccatcccggcatcgctctgcccggcgcagatcaccttcatcggctgcgacgggcgcgggctgacccggcagtcgttcatggtgaagtagtcacctttgaaatcgctgcgcccggtgccccacaggtcacggagcacctggacgtattcggtgagatagtcatagcggctggcgaaatagtcatctcccggccacatgcccatctggtcatattccggtttttgccagccggtcaccagattgacgccaaaccggccgccggagatggagtcgatagtggaggccatccgggcgacaatcgccggcggcagcgtcagggtggcggcggtggcgtagatctggatcttcgaggtcaccgcggccaggccggccatcagggtaaaggactccaggttgtgatcccagaattcagttttcccgccgaagccgcgcagtttgatcatggagagcgcgaagtcgaaatggtagtgctcggccttctgcacgatggccttattcagttcaaaggtcggcatatactgcggggcatgggtggagatcagccagccgttgttgccaatgggaacgaaaacaccaattttcatacctacctctctgcagtcatggaagatgggttgcgatggtgcggcatcctgcctctccctggaccacctcgcagaaaaggtaaagcaaaggcgatgccagttttataaatgctaatgttattaatgtgttacttttgagttgctaaaaaggacgataaaaaagtggactggatggtcaaaatcagtgcacgaaaaaacggcagtcatgcgcaatcagggtgcatggggtcgtgtcggcgcagggcttttgctatgctggtggcgtcaactgaaggagaggatgtatggcacagggcgcggtgaagaaaagcggcaaacgttcacaagcggtcagcgccaaaaaggaggccatcctggccgccgcgctggaggcattttcgcaatttggtattcacggtacgcggctggagcaggtggctgagcgcgccggggtatcgaaaaccaatctgctctattactacccttcgaaagaggcgctgtatgtggcagtcctgcagcagatcctcgccatctggctggcgccgctgaaggcctttcgtgaggatatcagcccgctggtggcgatccgtgaatatattcgcctgaagctggaggtgtcccgcgatcatccccaggcctcgaagctcttctgcctcgagatgctgcagggggcgccgctgctgatgggcgaactgaccggggatctgaaagcgctggtcgacgaaaaatcggcgatagtctccggctggatcgaccgcggcaagctggcgccggtcgatccacagcatttaatctttatgatctgggctaccacccagcattacgccgacttcgccacccaggtggaggcggtcaccggcgccacgctgcaggatgcggccttttttgaacaaacggtcgataatgtccagcggatgattatcgaaggcattcgcgtccgttaattggcgggcggcagcgggcagctttgatcgccatcctcgcactgtagcagcgaggcgaggaaagactcccgctccacgctcttatcggtcatgcactggctgaccagcattggctgcatgctgccgccttcggcgccggacgcgagaaaggcgcagtcggcgtcgcggagggcgatccatgcctgctgcgcctgcttcagtaatgtttgttgtttacccaccgcccgctgcagggcctgctgccaggtgtcgttcagttttttatcggccgcctgatactgcgcggccgcgcactgattcatttcggtttgggtgttggcgctgctgcactcgtccgccagcgccgcgccgctggccagcagggccatcacggcaaataacgtgcgtttcattgttctgctcccataaaaaagctcccgtccgggagccttaattaaacacagctgacgtcggctgtcattagctgatcgcagcgcagactgattgcccggatggcggcgcaccgcgccttatccgggctaccctttggcggtggtaggtagccccggtaagcgtagcgccaccggggggcccgttttagccgatggtcatcaggctggcgttaccgcctgccgccgcggtgttaacgctcagcgaacgctcgatatacagccgctccagcagcagattggtttcgccgcgggcgaagccctgcacggagacaatcgccccgtcgcgcgccgccacctgctcgcacagctcgcgcagctggtcggaatcgccgtggtagataaccgcgtcgaaggcctggccaggcaactgctccgctttggcaaagcgaatgcgctcgctgacctcccgcggcagtttcttcgccagatcgcgctgcagggcgctgtccggccacagtacttcacaacccaccgccagcacagccgccagctggatcagcgcatcctgttcgttatccgctacgcacagcacgcgctcgcgcggcatcagcgtcagggtgttgcgctcgccggttggccccggcagcaggcgttgggtgccgctttgcgcctgctcgctgtactgctggcacagcgcctgcagctcaggacggcccgcggcccactgctgcagcgcctgcagcggtttttccagcagcgttttcagctgggcgtccagcggacgctccgcatcctggcgggcgaaggttacgccaaccgcgtcctgtggacggctggagagcagacggtacagatacagcggaccgccggctttcggaccggtaccggacagcccttcgccgccgaacggctgcacgccgaccaccgcgccaaccatattgcggttgacgtacaggttgcccaccttggcgctgccggtgacctgggcgatggtttcgtcgatacgggtatgcacgccgagggtcaggccgtagccagaggcgttaatctgctcgaccagtttgtccagctcgttacggttatagcgcaccacgtgcagtaccgggccgaagacctcttttttcagctcgtcgaagctgtcgagctcgataagcgtcggcggcacgaaggtcccgtgacgccattcgcgggcgtcttcgctattctcgcgcaccgcctggtagacggtgcggcctttggcgcgcatcgcctgaatatggcgttcgatattctctttcgcttccgcatcgataaccggaccgatatcggtggtcaggcgccccggattgcccatccggcactcgctcatggcgccgcgcagcatggttaaggtgtgatcggcgacctcttcctgcaggcaaagcacgcgcagggcggagcagcgctggccagcgctgtcgaacgcggaagccagcacgtcgatcactacctgctcggtgagcgccgacgaatcgacgatcatcgcgttcatcccgccggtttcggcgatcagcggcgtcgggcggccctggggatcgaggcggctggcgatattgcgctgcagcagggtggccacttcggtggagcctgtgaacatcacgccgcgtacgcgctcatcggaggttagcgcggcgcccacggtctccccgcgacccggcagcagttgaataacgcccggcggcacgccggcttccagcagaatcgccacgccctgggcggcgataagcggcgtctgctcggcaggtttcgccagcacgctgttgccggccgccagcgcggcggcaatctggccggtgaagatcgccagcgggaagttccacgggctgatacagaccaccggacccagcgggcggtgagtttcattatcgaaatcgtcgcgcacctggcctgcgtaatagtgcaggaagtcaacggcttcgcgcacttcagcgatggcgttgctgaaggttttacccgcctcgcgcaccaggatccccatcagggtcggcatctggctttccatcagcaccgcggcgcgctcaagaatggcggcgcgctcctgcggcggagtggcgaaccagatcggcgcattgttgatagcgctggtcagcgcctgctgcacttcagcgtcgctggcttcgcggacgtagccgacgatatctttcggctctgccgggttaaccaccggctgcatttcgccttcggccaccggctgctccagcatcggcaatgcctgccatttatgcagcgcgctgttgagcagggaagaggagagggaggccagacggtgctcgttcgccagatcgagaccggcggagttgctccggccgctgccgtagagatcgcgcggcagcgggattttcggatgcggcaggccggcctggccttcctgctgcgccagtttttctaccgcgctgaccgggtcggccaccagctcgtccagcggcagggtattgtccgcgatacggttgacgaaagaggtattggcgccgttctccagcagacgacgcaccagatacgccagcagcgtctcgtgggtgcccaccggggcgtagatccggcacggacggttcagcttgccgtcagcgaccttgcccactacctgctcgtacagcggttcgcccatgccgtgcaggcactggaactcatactggcccgggtagtagttctggcctgccagctggtagatagccgccagagtatgggcgttatgggtggcaaactgcgggtaaatcaggttcggcaccgccagcagcttcttcgcgcaggcgaggtaggagacgtcggtgtaaaccttgcgggtgtataccggatagccttcgagaccttccatctgcgcgcgtttaatttcgctatcccagtaggcgcctttcaccagacggatcatcaggcgacggcggctgcgggtggcgaggtcaatcaggtaatcaatgacaaacggacagcgcttctggtaggcctgaatcacgaagccaatcccgttccagccggccagttccggctcgaagcacagtttttccagcaggtcgagggagatctccagacggtcggcctcttcggcgtcaatattgatgtcgatgtcatactggcgcgccagcagggtcagcgatttcagccgcgggtaaagctcttccatcacccggtcatactgcgcgcggctgtagcgcgggtgcagcgcggagagcttaatggagatacccggaccttcataaatgccgcggccgttggaggctttgccgatggcatggatcgcctgctgataagaaaccatataggcctgggcgtcagcggcggtcagggcggcttcgccgagcatatcgtaggagtagcggaaccctttttcttccagcttgcgggcgttggccagcgcttcggcgatggtttccccggtgacgaactgctcgcccatcaggcgcatcgccatatccacgcctttgcggatcagcggttcgccgctcttgccgatgatgcggttcagggagcgggagaggctggtctcgttatgggtcgacaccagttttccggtgaacagcagcccccaggtggcggcgttgacgaacagcgacgggctgcggccgatgtgcgactgccagttgccgttgctgattttgtcgcggatcagcgcatcgcgggtggctttatccggaatacgcagcagggcttccgccaggcacatcagcgccaccccttcctgtgaagagagggagaactcctgcagcaggctctgcaccataccggcgcggccgctggcggttttctggttgcgcagtttttccgccagctgatacgccagcttgtgcgcctgttcgcccagcggctgcggcagacgggcctgctccagcagcatcggtaccgcgtcggtttccggacgtcgccaggcggcggtgatcgccgcgcggctcaccgactgcggcaggatctgctcggcgaattcgaggaacggctgatagggctcttccgttggttcgctggcgtcatcgctttcgttggcggccccggagagcagggccggcagctcaggcagcgtctcgtcgttctccagtttttccagataattaaagatggcctgcttaatcagccagtgcggcgtgcggtcaatacggctcgcggcggatttaatgcgctcgcgggttgcgtcgtcaagcttaacacccatggtggtggtgcccatgctcaaaactcctgtcatttatcgttaggcttatgcggttgcatggaaatatccactatgttgcaactttgtgcaaccttgttaattgtggcttgtgacggaagccgtgaaatggctaatttgttaaaaataacccctaaaatagcagaaatttaaccccgggctcatagggtatttgtatgcgtgagttaacacttttgtttggtgcaacctttaaaaacgtgagagagtgcaacctctaacaaattgacgttttgcgccgtcggtttttcgtgtaaatgctgtgttaaatcgtttgtgaaaaaccgaagcttccgtcaggatacggtcgcccaattaaacaatgcgccattaccccgttccggtagtggaaaaaaacgacgaagttggacgctgtcgataaaaattctggagactttgcatggctattagcacaccgatgctggtgacatttattgtttatatttttggtatggtattgatagggtttattgcctggcgttcgaccaaaaacttcgatgattatattctcgggggaaggagtctggggccatttgtgaccgcgctttccgcaggggcgtcggatatgagcggctggctgctgatgggtctgccaggggcgatttttctctccgggatttccgaaagctggatcgccattggcttaacgctgggggcgtggattaactggaagctggtggccggtcgcctgcgcgtgcataccgaggtgaataataacgccctgacgctgcccgattattttaccggccgttttgaagataaaagccgggtgctgagaattatttcggcgctggttattctgctgttctttaccatctattgcgcttcaggaattgtcgcgggggcgcgtctgtttgaaagcaccttcggcatgagttatgaaaccgcactgtgggccggggcggcggcgacgattatctataccttcgtcggcggcttcctcgcggttagctggaccgataccgtgcaggccagcctgatgatttttgcgctgatcctcaccccggtgatcgtgattatttccgtcggcggctttggcgattcgctggaagtgattaagcagaagagcatcgaaaatatcgacatgctgaaagggctgaacttcgtggcgattatctcgctgatgggctgggggctgggttatttcggtcagccgcatattctggcgcgctttatggcggcggattcgcaccacagcatcgttcacgcacgtcgcattagtatgacctggatgatcctctgcctcggcggggcggtggccgtcggcttctttggcatcgcctacttcaataacaacccgagcctggcgggcgcggttaaccagaacgccgagcgcgtgtttatcgaactggcgcaaatcctgtttaacccgtggattgccgggatcctgctgtcggcgattctggcggcggtgatgtccaccctgagctgtcagctgctagtctgctcgagcgcaattaccgaagacctgtataaagccttcctgcgtaaaaacgccggtcagaaagagctggtgtgggtgggccgtatgatggtgctggtggttgccctggtggccattgccctggcggccaatccggaaaaccgcgtgctgggtctggtgagctacgcctgggctggcttcggcgccgcctttggcccggtggtcctgttctcggtaatgtggtcgcgcatgacccgtaacggcgcgctggccgggatggtgattggcgccctgaccgtgatcgtctggaagcagtttggctggctgggcctgtatgaaattattccgggcttcgtcttcggcagcatcgggattgtggtctttagcctgctggataaagcgccgtcggccagcatgcagcagcgctttgccgaagcggatgcccactaccatacgccgccgccggtacgcgccacggctgagtaagatcatctgatgctcacgagcccgccgctggcgggctttttattgcctggtgccgtgccggaatattataacccttgctaattatctgaaaatccgctgatatttcctgactaataacaatgaggatagcaaagatgacgttcagacagggtgcaatggcgctggtgctggcagggttactcagcggctgcgtggcgggtggaagttcatcgaccagcgcgccgaagcccggcgtctgcccggcggataagtccatggtgcaaaccacgctttacttcggtctgagccgcccggcggggaaagacatcaccgctgaagagtggcaacagtttgtcgaccgtgacgtcacgccgcgctttcgcgacgggctgacggtgtttgatgcccacggccagtggcttggccagaatggtcaggtggtgcgggagcagagcaaggcgctgatggtgatccatgggcatgacgcgcagagcgaggccggtattgaggctctgcgccagggctataaatcacgcttcgcgcaggagtcggtgatgcgtgtcgaccagccggtctgcgtgcagttctgagtaaacggcgggggcagccccgccgtttgttttacagcaccagcccggcgaagctggcggaaagcaggcttaccagcgtggcgctatacaccagccgcaggccgcagcgggagacgatattgccctgcggttcattcaggcctttgatcgccccggcgataatgccgatcgaggcaaagttggcaaacgacaccaggaataccgagagaatgccgagcccgcgaggggtcatgctggcggcaatcttttgcagctcaatcatcgccacaaattcgttagcgaccagtttggtggccatgatgctgccggcgtttagcgcatcgctcagcgggatgccgataagccacgccagcggataaaagacgtagccgaggatctgctggaagctgagaccaaacagggtggcgaatagcgcgttaatggcgctgatcagggcgataaaaccgatcagcatcgccagaataatcatcgccactttaaagccggccagaatatattccccgagcatttcaaagaaactctgcgattcatgcagcttctcgagttttatttcctgctcgctgcccggccgcgtcgggttaattaccgacagcacgataaaggtgctgaacatattgaggatcagcgctgcgacgacatatttggcctccagcatggtcatataggcgccgacaatcgacagcgatacggtcgacatggccgtcgccgccatagtgaacagtcgccgtgaggagaggtcgcccagtacgcccttgtaggcaatgaagttctccgattgaccgaggatcagcgagctgacggcgttgaaagattccagcttacccatgccgtttactttcgacagcagggtgccaatcacgcgaataaaaatcggcaggatccgccagtgctggagaataccaatcagcgcggaaataaacacaatcggacacaggacgccgaggaaaataaaggctaagcctttttcgctcatgccgccaaagacgaaattggtcccttcggcggcaaagcctaacagcgaagcaaaaaagccggaaatattttttaccagccacaggccgctttcggcgtgcaggaaaaagaaagcgagcgctatttcgataataatcaactggagaatataacgaatacgaattttttgtctgtcgtagctgacaagccaggccagggcgaggatcaccgccagcgccagcaggaaatgaaaaaatgcagtcatgttgttcttttcgcaagtcaataaggccgccatttagccatagccgctacggcgggtaaatatctggcgtaaaaaatcctttgcttattctttcccttcataacaggcgaatattttcataagtcattatttgtcagcgatttatttacaactgatcatcattctctgcacatttcgcttgtgtttctgagcattgtaatgataatcactatcataaatattacctgtttttgcattcgttgacggtgctttacatttaagggtattggcatgtttgtcccatttctcattatgttacgcgaaggcctggaggcggcgctgattgtcagcctgatcgccagctatcttaaacgcacccagcgcggcaactggattggcgtgatgtggattggcgtgatcctcgcggcggcgctatgtcttggcttaggcatttttatcaacgaaaccaccggtgaatttcctcagcgtgaacaggagctgttcgaagggatcgtcgcggtcattgcggtggtgatcctgacgtggatggtcttctggatgcgcaatgtctcacgcaacgtcaagcagcagctggagcaggccgtggacaaggcgctgcagcgcggtaatcaccacggctgggcgctggtgatgatggtctttttcgcggtcgcccgtgaggggctggagtcggtcttctttctgctggcggccttccagcaggatgtcggcatctggccgccgctgggggcgctgctgggtctggccaccgctatcgtgctgggcttcctgatctactggggcggtatccgccttaaccttggcgtgttcttcaaatggaccagcctgtttattctgctggtggccgctggcctggccgcgggggcgatccgcgccttccacgaggcgggcctgtggaacctgttccaggataccgccttcgatctgagcaacgtgctgtcgacgcatacgctgttcggcacgctgctggaagggatcttcggttatcaggagacgccgagcgtcagcgaagtggctgtctatctgctttatctgatcccggcgctggtgctgtttgccctgccgccgcggaataataccactgcctcgcgggctgcctgaccgggcgctgcgagcttataagcgacactctacttaccgaaagggatgatcatgatgattcattttcgccgtaatgcgctgcgggtgaccgtggccgcgctgctcagctctgcatttggtgctcaggctgcggatatcccgcaggttaaagtcaccgtcaacgacaagcagtgcgagccgatgcaggtgaccgttaacgcgggtaaaacccagtttattattcagaaccacagccagaaagcgctggagtgggagattctgaaaggggtgatggtggtggaagagcgcgaaaacatcgcgccgggctttactcagaagctcaccgcgaacctgcagccgggcgaatatgacatgacctgtggcctgctcaccaacccgaaaggcaaactgatcgtcaccggcgccgccaccaaagacgcggcgaaagcggatgcggtgctgagcctcggcgacgcgatcaccgcctataaagcctatgtgacggcggaaaccgcgcagctggttagcggcaccaaagcctttaccgacgcggtgaaagccggcgatatcgaaaaagcgaaagcgctgtacgccccgacgcgtcagcattacgagcgcatcgagcccattgccgagctgttctctgaccttgacggcagcatcgacgcccgcgaagacgacttcgagaaaaaagcggaagatccgaaatttaccggtttccaccgtctggaaaaagcgctgtttggcgataacagcgtcaaggggatggaaaaatatgccgatcagctgaacagcgatgtgctggagctgcaaaagcgtatcagcgagctggcgttcccgccgtcaaaagtcgtgggcggcgcggcaggattaattgaggaagtcgcggccagcaagatcagcggtgaagaagatcgctacagccataccgatctgtgggacttccaggccaacattgacggcgcgcagaaaattgtcgacctgctgcgcccgcagctgcaaaaagagaacagcgcgctgctggcgaaagtggacgccaactttaagaaagtggacagcatcctcagcaaatatcgcaccaaagacggtttcgagacctacgataagctgaccaccgccgaccgtaatgcgctgaaagggccgatcaccaccctggcggaagatctggctcagctgcgcgggatcctggggctggactaagtcgatggcacaacagaaaccccacgacgtgaacgaaccgtcacgtcgtcgcttactgaaagggatcggtgcccttggcggcgcgctggccatcgccggcggctgcccggtggcccatgcggcaaaagcggaaagctccccggggacgctggcacctgacgcgcgtcaggaaaaacagcccttctacggcccgcatcaggcgggcatcctcacaccgcagcaggcttcgatgatgctggtggcgttcgatgtgctggcggccgataaagccgacctcgagcgtctgtttcgactgctgacccagcgtatcgcctttttaacccagggcggcccggcgccggacacgccgaatccgcggctgccgccgatggattccggcatcctggggccgtggattgccccggataacctgaccatcaccgtctcggtcggccattcgctgtttgatgagcgttttggcctggcggataaagcgccgaaaaagctgcagccgatgacccgcttccccaacgattcgctggatgccgccctgtgccatggcgacttgctgctgcagatctgcgccaatacccaggatacggtgatccatgccctgcgtgatgtcatcaaacatacgccggatctgctgagcgtgcgctggaagcgggaagggtttatctccgacagcgcggcgcgcagtaaaggcaaagagactcccatcaacctgctgggattcaaggatggcaccgctaacccgccgagcgacgacagcgcgttgatggataacgtcgtgtgggtgacagccgatcaggacgagccggcctggaccgtgggcggcagctatcaggcggcgcgcatcatccagtttcacgtcgagttctgggaccggacgccgctcaaagagcagcagaccatctttggccgcgacaaacacagcggtgcgccgctggggatgaaaaacgaacacgataccccggattacagtaaagatcctaacggcgaagtcattgcgctggatagccatattcgtctggccaatccccgcacgccggaaacccagtccagcctgatgatgcgccgcggctacagctattcgctgggggttactaacgccggacaactggatatggggctgttattcgtttgctatcagcacgatctggaaaagggttttctgacggtgcagaaacggcttaacggcgaggcgctggaggagtatgtcaaaccgatcggcgggggctacttctttgttttacccggcgtagtggatgaaaaacactatctgggagagtcgctgctgcaggcctgataccaaccctgcccgtaagggcagggcgttttctgctgtttttctcatttttcttatatttcctgccatgtgttatatttctgtaatacaaatgaccgatagtctcctacacttgcttaagaactatttgttgcgtcattgtgaaaaataagttgcattaagaatcttttttgatgtacttattacatacgcggtagttcccggcagtgtgacgtttcactatggagatcgcgaatggtaaggtcccgtaccggacaacgtaaaacctcagaccgtactcttcagcacggaagccccgcttccggcagcgattttcttactctttctctctccgcttcgcattattacaaccttggcagggtacgcggtgcgcgtagccgcgactcgttgtcagttctaccggcaagcaatggcttacaaggaagccaaacctcaatcgttcgtgcgcatagtcgcgtcgatgttgacgcgtgtgatgtaaaccaacaacgcaaggtgctatccatgggaagacaaaaagcagtgatcaaagctcgtcgtgaagcaaaacgtgtgctgagacgggattcacgcagccataagcagcgtgaagaagaatcggtcacatcgcttgtgcaaatgagtggcgtagaagcaattggcatggcgcgggacagccgtgatacttccccaattgaggcgcgcaatgaggctcaggcgcattatttgaatgccatcgacaataagcagctgattttcgctaccggcgaagctggatgcggcaagacctggatcagtgcggcgaaggcagctgaagccctgatccataaggatgtggacagaattattgttacccgtcccgttctgcaggccgacgaagatctcggcttcttaccgggagatatcgccgagaagttcgctccctatttccgaccggtttacgatgtgctggtgaaaaggctgggggcttcctttatgcagtactgcctgcgtccggaaatcggcaaggtggaaatcgcgccgttcgcctatatgcgcggacgtacctttgaaaatgcggtggtgattctggacgaggcccagaacgtgaccgcagcgcaaatgaagatgtttttaacccgcctcggggagaacgtgacggtcatcgtcaatggcgatatcacccagtgcgacttgccctctggcgtgagatctggcctgagcgatgcgctggcgcgttttgaggaagacgagatgatcggcattgtgcgtttcaccaccgatgactgcgtgcgctcggctctctgccagcggacgctgaaagcctattattaatcgtcatactgtgagcaaggcccgggctagcccgggctttgttgtttttgggcatcctcccggcggcgctgcgcttagccgggctacctggcgggtagggtctggtagcccgggagaggcattgctgccgaccccggggatgtctgcggtgccacatgcgaaaaaaaagcccgtacatgcgtacgagctcttcttaaaatatggcggtgaggggggattgactcgcttcccggcggtactgcgcgtggccggactacctggcgggtagggtctggtagcccgggagaggcattgctgccgaccccggggatgtctgcggtgccacatgcgaaaaaaaagcccgtacttgcgtacgagctcttcttaaaatatggcggtgagggggggattcgaacccccgatacgttgccgtatacacactttccaggcgtgctccttcagccactcggacacctcaccatattgtcttgctgctcaccttgggtgggcaacggggcgctactatagggagttgcgttaaaacggtcaagcatattttcttctttctttgccgttcgctcacgcaatgaacaatgccccgctgcggctcagcggggcgggcgttttagcgctgggaatccagctgttcgttattcttcacgacgtcctgcgctttgctgtagctttcgatcagcagctggtaggccgggaagactttggtgtacacctccgcccattctgcggcgtccgggcgattccaggtgcgctgcagctcagaggcgatggcggcggtatccattggcactacgccggcctgtaccacgcgagccagggtgatctcttgcgccattttgctgtaggtgccggaagcgtcaatcacggcaaacactttataaccgtcggcgacagcggcgatagccgggaaggccatgcagacgctggtgatggtcccggcgataatcagcgttttacgaccggtcgctttcaccgcggcgacgaattccgggttatcccaggcgttaatctcacctttacgggcgatgtatttcgcatgcggcgcgttttcatgaatctccgggatcagcggaccgttcggcccctgcggcacggaggcggtcgtgatcaccgggatcccggcaagcgacgccatcttggccagcgcggcggcgcgagcgcgcagctctggcatcggcatatcgccgacggtctggaacagaccgctctgatggtcaatcaacagcattgcggtatcgttaacatcaatcaccggacgagcaccgttaaagttagcgggagtagacatagtattcacctcaatcagttagatttggccaaagcggccgctgttaaaatcgcgtacagcttctgcgatctgcgttttgttattcatgacaaacgggccatagcccacaatcggctcctgtagcggttctccggccatcagcagaacttttgccggggcggtcgcctccagatgcactgcgtcacctgcctggctcaggacggccagctggccttcgcgagcagattcggaaccgttaatgatcacttccccttccagcaccaccagcgcggtactccagccctccggttggcgcagcgtgaggtcgtgcccctgattcagctgcagatcccacacgttaagcggtgaaaaggtatgggccggaccgctgacgtcgtcatactggccggcaataacccgaacctgtccggcgccgttcgccagcgccacggtggggatcgtcccagcggtaatgctctggtagccggggggcgccattttgtctttcgcgggcaggttgacccacagctggatcatcttcagctcgccgccgctgcgggtgaaggcctccgagtggaactcttcgtgcaggatcccggcgcccgccgtcatccactgcacgtcgcctggaccaatcaccccgccgcgtccggtggagtcgcgatgctctacttcaccggcgtagacgatggtgacggtttcaaatccgcgatgcggatgctcaccgacgccgcgtttttcgctgcccgccgggaaggtgtacggcccggcatagtcgagcagtaagaaggggctcagctgctggccgtgcgtctgataggaaaacatcgagcgaaccgggaagccgtcgcctacccaatgctgcgcaggcgcggtgtagactcctgtgatctgtttcatggctttctcctgtgtatcggtatctgatgtgaataagcttatatccgggacgacgtatgcggtagtgagcaaaaatgacctatactgttccaaaaatggaacaatggaggaaggatgcaggatctcaatgacttcgcctggtttgtccaggtggtagaccatggcggtttcgccgcggcggggcgagcgcttgaccagccgaaatccaaactcagccgccgcattgcgcaactcgaggagcggttgggcgtgcgtttgattcagcgaaccacccgtcagttcgcggtcaccgaggtcgggcagaccttttatcagcattgcaaagcgatgctgattgaggccgaggcggcgcagcaggcggtcgagacgctgcgcgccgagccgcgcggtagcgtcaggatcacctgtccggtcaccttgctgcatgtccatatcggaccgatgctggcgcgatttatggcgcgctatcctggggtaacgctgcatcttgaggcgaccaaccgccgggtggatgtggtcggggagggcattgatgtggcgatccgcgtccgtccccggcccatcgaggatagcgacctggtgatgcgcgtgctggcggaccgcgggcaccggctggtggccagcccggatctcatttcccggctcggacgtccgcaggcgccgtccgagctgagcgcctggccgggactcagcctgggagcgaacaagcatcagcataaatggcagcttaccgggcccgggggagcgagagcggaagtgtatttcacgccgcgaatggtgaccaccgatatgctggcgctgcgcgaggcggcgatggccggcgtaggcgtggtgcagcttcctttattaatggtgcgcgatcagctggcgtcaggggaattagaggtggttctggacgagtggcagccgcggcgggaagtgatccatgcggtatttgcctcacggcgcgggctgctgccctccgtcagggcgctggtggactacctcagcgaagagtatcagcggatggaggaggattagcttcgggattggcttttctcgaggggctccccccccccggcagagaatattaaagaaaagagcccgtgcttgcgtacaggctctcatcttgaatatggcggtgagggggtccgccatattagtgtccggtaatgtacaccataattatatttttccattagtatacaatatgttgtcattattctttgtccggtaatgtattgatgttttgtttataatctgtcattttatgcagtacaggatgcactacagaagaatgatgataatgccaaagaaagccagaggactgtctgttcttgctgtttccagacttaaagctgatgggcgttatgctgttggtggggtggatggattatacctgcggattgcagggcgctcccgcgcatgggtcctgagtgtggcaatgggaacccgaattaacaaagcaggtaagacggttccccggcgtctgaacatggggcttggtccctgtcaggaagtttctctggcagaagcgcgtgacaaggcgcgtgaggtgcgtaagcaaattcgtgatggcattgatcccctcgaagaaaaacacgcccgtaaagcgtttcacgaagctcaggcgcgtaaacaaaaaaccttccgtgaatgcgctgaagctgtgctggaaatcaaaggtaatgagttaaagaataaaaagcatgtggctcagtggcgttccacactggaaacctatgcttatcctgttattggtgataaagcggtcagtgaaattaccaaaatggacttgttggcaatcctcgaaccaatatggctaactaaaaacgaaacagccagtcgtgtccggggacgtatcgaaacggtaatggattacgccaaagcaaaagagtatttcgaaggtgataaccctgctgcatggaaaggtgtactaaaacctctgttgccaatgccaagtaaagttcagaccaaaaaacatcatgcggcattgccttacaaagatgcaggctcatttatggcagaactgcgtcaacgggccgggatttcagccagagcactggagttttccatactgaccgttgcccgttcgggtgaaattcgaggcgctgaatggtgtgaaatcgatctggatgcgaaaacgtggattattcctgctgagaggatgaaagcagcgaaagaacatcgcgtacccctgtcagatactgctgttgaacttcttaaagccttaccacgatttacagataacaatcttgtttttccggcacctcgcggtggacaactgtcagatatgtcattaacagcagtattgaaacgcatggggcgtagtgatttaacccagcacggatttcgatccacatttcgtgaatgggcgggggaaaccacatcctaccagcgtgaagtgattgaacacgcccttgctcaccagttagcagacaaggcagaagccgcttaccagcgtggcaccttatggcctaaacgtgttgcgttaatggatgactggacaagctattgttctgtagcgtaaaacagctaaaaacagactgatggatagcagataatgaaaagaagtgaaatcaggaaagcgattgaatcgtggtttgacattgaacgctatgacgcaattgaacagctcactctgcagcagttctatgttgagattgaacggcgtatcttggcttacaggatgttgttgagccgaaataccataccgaccctgaacagattattgctggatgattagcgctataagatcctcagaggtgaaatctttttcagtggtgataccgctactcttggacatgagcttgccagaacctatacagtaaaccctacgactcgaagccatgcgcaattttacgcgaaaacgctggcattaaccgaagccacccccgaaatttcgtcgttaagccagtccgaattcctgtcagagtatctgaaagagacaccactgaaaaaccttgcccgtatcactgttgatattcatctggaagaggcatcaaccgaagacatcattgaacatctgaaggtgctgatcccgcaatggaagagacggcttaagatgaaggctccagcggatcgagagtatcgtttcggtaaaagcacgttcagaaaagttattgaatatcgccttattccgatgatggatctgattttttggggtgctgataataatgataccaagatcccactttccctgatgtcttcactgcttcatgaggacagtgataatgatcgtgatgaaggaatgctcaaggcaacggattacccactggcaatggcgttcctgacagatgaaagctatctgaagtcgcttgaagattacatcatgcaaaacaatcacttaaaagatacacctgttgataagcatgttgaggatgataagaagaagaaaaaagcagccaagtaaaaagggttacgttcgccgtgagcgaacgtgatcgcattcagccataacgaacctctttctgttcatctcccttcatatttttcaaaaaactcttttatgaacgcccctaaaacgtcataagcgaattcgctattattgttctcgtcgaaacaacatagagaaaaacgaaatctcatagagattacgtaaaataagagaggacaaacaatgaaagaaaatactgaaaacaacgtaaagcgatttatccgtgttccagatgttctaaaccgagtggggttcagtcgcactaccttatatgagcgtattaaggaagggaactttcctgacagggtaaaaataggaccaaggtgtgtcgcttttgttgaaagtgagatagatgaatggattgaagctactattcgaaactcacgtcagaacgcagcataaaaaataaataccgtttccgggtgaatagatatctttcgctcagggactcttattatcttaatcaataaaagggcaatgtatgaaaatagaatttaatacgacagagcagtttatcagtgaagcagcggattcgtataaccgttatatgaataaacgactacggaaccagcctgtgcatttctaccacctactgaaaaataagggggatatgaacgaagtgattgaaaatattatcgataaaacaaagagccgcttttatggggctgaaggtgaacaaaaaagtaacggatctccgggagcgttaactatgtgaaagtaaagcaacaccttcgtcagctttggattgtctttaagtgtgtataccgctgattcatccataaaaatatctactttaatattaaacaaaaaaggaaataaaaatgaatatatttaaaaataaatctactgaaatcttttatgttgtgtccttgcatatctacgcggagctttttaactcaaaggataaaacaaccagtaatatgattataacgcatgtaatggatcatgagtttgtcagtaaactaatcgatctggcgatgagaaatgcggagaagcatcttctgaaaaaagcatggaaaaagaacgctgatgaaaaactgtctgaggtggattttaaagaggttaagcaggcattagccaaaatgcattacactgttctggcggaatcaatatgttgatgtgttctgaagtctatctgccccttcatggggctgataacaaatctgatttgaaagctaaaaatggcaatgaaaacatactctatacaaggagccaaaatgattgatgaatttcatgtgatgtatatgtataaaaaaatccaagcagaagctgcaaccaccgacattaaaacacttgaacagcttttgaaaaagttcaggagggtggtcaatgaacgtcgtgaagaatactatcaggaaataggtgagaaaaaagcgcgtaagttgaaaatgaaaagagcacaaagattgcttgagaaaatggtgtgcgaccgagtttcgccagaagatttaagggcgtgactattagagatatttttgacataatcacatgaaaatgataatcattattgtctattgtgtctttttgtcgatagataggtgagcgaagggaatctggagggaactgtatgagctttgaagctaaaaaggaacatgccattgccatcatggaaagcaagaaaatgtggcgtagtaactatgcgcctcctttgctacgcctcgcatggaaagctggcctcaagatcccaccgttgccttttgccacgttctggcaaataaccttgctgatgggaggttggtttggtccggcatgggggatttgtatgtggttttcttcatggaaggacagtggtatgcagccgggcgttgcatttgtctcaagcatagtcgcaggtatttgctttggtgttcttatggctgcgtatcattggtggcgaaaggtagttaacaatctgcctgactgggatagtctggagtaaagatctctgtagtggctatataacctctaaatggactgagtgtgagatgggaaaaataaaatattggttaatagcgggatttattatccttcttgcaattgtttacactgctatcagtgacaggtattctacgctttctaggttgaaatcagcaggtgaaaacggagatgtagaagctcagtatgcgttgggtctcatgtatttatatggagaaatactggatgtcgattatcagcaggcaaagatttggtatgaaaaagccgctacccaaaatgatccgcgtgcacaggttaaactcggtttgatgtatgcaaatggtctcggggtaaatcaggattatcaacaggccaaatcttggtatgaaaaagcatcggttctaaatgatgttgatgcgcaatttttgcttggagagatgtataacgatggtctcggggtaggccaagactaccaacaggcaaagatgtggtacgaaaaagctgctgctcaaaatgatgagcgtgctcaggtcaatctcgctgttctatacgcaaagggtaatggggtagaacaggattatcgtcaggccaaaagctggtatgaaaaggctgcagctcaaaatagccctgatgcgcagttcgccattggaattctgtatgccaatgctaatggtgtagagcaggactatcagcaggcaaaagactggtatgagaaagcagcagaacaaaatttcgccaatgctcagtttaatcttggtatgttctattacaaaggtgagggagttaatcaaaactttcagcaagccagagaatggtttgaaaaagccgcgtctcaaaatcagctgaatgctcaatataatttaggtcagatctattactacggtcagggcgtaactcagagctatcgaaaggctaaggaatggttcgaaaaagcagctggggaaggtcatgtcgatgcccaatataaccttggcgtaatatacgaaaatggtgaaggggttgggcaggactttcatcaggcgagagcttggtatgaaaaggcagcttcgcaaaacgatgcgcaggcacagtttgatcttggtgttatgaatgagcttggtcaggggggaagtataaatctgaaacaagcaagaacttggtttgggctggcatgcaataatgggcataaggaaggttgcgaacgttatgaaaataattgaaatggttttttaggggattttttgtcataactaaatttaattttagctttataatttattttgattcttttttgatatgcaaaaatatagtgtgaggagaggggcgataaataatatacaaaacattaatacgaataagaatagttagtagtaaatgggttaaagcctctggaacttcaggattttttacaatgaacaaaggcgtttgcttggttaataacccggaaacaaacacctgctcatgtcagtcaggcactgtagcgaaagaattgttttatacaacagcaactgaacagttaggtggtggtagccatggtggcggcataacagtggtaaaagagagagtattatatcaatgttgataaggatgattgtcttattatactttattttatgcaagataaatttgatttccatcgggatgtaattatatatttaatgtatcccgattttataacatctttttatgttttacaattcaggagaacttaaacctaaaaatatcaggagtgatttatgaataagaaaatattagtattgtccgttttatttggtttttcaactatgtcccatgctagtgaaccaaagtatgcttttccgcaatcagataaacaggtagtctcaaaaattaaaattcaaaatgcaccgataaatcatgataaatatggtcatggtgaggttcttgccaatggggcgtgggttaaaggaaattctggtagtcaaaacaaaaaatgataggctcacttattttaaataaataatccgatggatatataggtgagtagaaatcgttagataaagttgaaatagtggcttgacttaagaataaagagtgctatatctatttgtagctaacatttttttaatttggctgccagatgttttaattttttgctcacattgatgttaggttgttatataccttgtcctgatattctaaaatataactatccttttgtatggtattacaaggcgtcaggaacttggtttgatcctcctgacagtctgttgtggaggattaaatttatccagagtaagcgattatgatggtttttatttaaatagataaatatatttgattatcgatattaaatgttatgtttaataagtgttttctgtgaatattcacttcatgaaatgtctgattactctacgtattgggatatgtattttctccaacggatagttcccttaatgggaaatgaaagggccgaaaggccctataactaattacatattgttaactttttacttccactaatgttctttttttctcaatttcttagcaagcttggggtaatatattttgtgaccatcctctttgggccagcagactgatactgcatagaatagtaatgctgaagaaattaatagaccaatgagataatgtggtgttgtaggatcactgtgttttgattgttcccataaccagtcaataaacatccgactggaaccatttgatgcagataaataccactctattgagaaaacaaaaattgttccaaaagagattatttcagctgctctcccttctttataatttttctctcttttgctttgctcttcagtatacaattttaatgacatgtcgtcgccattttctaaagcatcatctcgtagttctgacataaaaacttcagtagatgatttttggtagatcctctcatctttactttgtagtagattactatacttaattcgtatcagaagtagattaaagcatagagatgttatttctaatattattgatgagaaaattcctaaagcaataatcattccggccaaatctgcaagtgaaagatcgaattccttccctaattttatgccaaataaaccatttccttttagatagaaaaatagaacatcaaaacatagtgtgaaataaattaattttgctactttcgctaaatcccacaatccatctacaaagcttaataccgaaaatgttgaactactattactggatgacatatattgcctctttcagcttttgataaacttcttatattaatgagttaaagaagggaggcaagccatccttggctttcaattctttacttgtgatgagcaaattcaaacggcctgaccataccgttgctgttagcatcaaggaaatcagcaaccactggagcatcaggtgtcgctgcttaaggtgcttggttttatggttataagcaacccggattctgttgctttccttatggtccacttgatgctttacagcgtcttctgaccacaaacctgactcaattaaggcactacaggccagcgtgtgaaaaccttgtccacagatgtcctgtgtggtgttttcaatcagaacagctaaaacatggcaagacaataccccgaccactcatccatcaacgccacccgcttaggccataaggtcccacgttgatatgctgcttcggctttatctgctaactggtgagccagtgcatgttcaatgacttcacgttgatgatcggttgtgacatcatcccagtcacgaaaagtggaacggaaaccatgttgagttaatcctgaatggttcattctctttaagactgccaacagcgacatatctgatagttgtccaccacgaggggctgggaacacaaggttattgtctctgacatgtggtaaatcctttaacagggcaaacagcagtatccgacaacaggacttgctgttctctacccaccacccgccagagataacttattcaatcttttctggggggcagatggaggggagttgttttcatgtgttctatgaccagttcgctacattaatcaaagctttatttttaaagctttgatcaggaaaatcacagcaaaaacaggaagttcagatacaaaaaaagtccgtttgaacggacttttttatgcagcattttatgcagtacaaaaccaaaaatgcgttgtaactaattgattttgtgttaaatatggcggtgagggggggattgactcgcttcgctcgcccctgcggggcagcccgcttactgcgtgcgcggtctgtccaactggctgcgccagttgtcgaaccccggtcgggggttctcatccccccctgcggagaatataaaagaaaagagcccgtacttgcgtacgagctcttcttaaaatatggcggtgagggggggattcgaacccccgatacgttgccgtatacacactttccaggcgtgctccttcagccactcggacacctcaccatattgtctt

SEQ ID NO: 179 - DNA, 30576 bp, Unknown
  source: /note="Description of Unknown: MKP2_2161_1 Mutant Bacteria sequence"
agccgggggagaaccacggggcatcgctgggctggatgatgctgcccgccgtgctggcgatggcggccgtcggcggcctggcggtcggcgtccccgccgtctcgatgatgctcaccagcgtgatgggcacgctctccggtggcgtgagtgttgagaatgtcacgctgcgtcatttcgcggcgctgtttgaccagcagggagatgccctgtcggccctcggcaccagcctgtcgctggccctgggttcggcgctaatcgtcggcgcgctgggcctgctggccgcctggctggtgatggtgcagaagattaaagggcgcgggatggtggatgcgctgtcgctgatgccggcggcgctgccgggcgtggtggtgggggtcggtttgatcctgctgtggaatcagcccttctggccgcgctcgccctataacacgctgtggatgctgctgctctcctattgctgcctgctgttgccctggccggtgcgctatgtcggcagcgcgctgcgccagctgggcccgaaccttgagcccgccgccagggtgcacggggcgtcgccactgcaggcgctgcggttgattgtcctgccgctggtctttccggcgctgctggcggcgatgctgatggtgttcgcggtggcctcccgggagctggtgacctcgctgctgctctctccggccggtacgcaaaccgtggcggtgtttatctggcgccagttcgaacagggttccgtcggtcagggcatggcgatggccagcctgacgttgttgaccggtctggtcctgatgctgacgtcgctggcgctgatgcagcgccgcacgtgcggttaacgctaagcgcacaaaaaagacggtcggcgcggaaaaataggctataaatgtcggacacctacagctggaggccctgatgagtccctttttacgcgcctatttttcccgtctgagctggacgggtgagcctgatgtttccattgataccctgcgggaactgcatctgcagcataacagcgccatcccctttgaaaacctcgacgtcctgctgccgcgtgaaatccaccttgacgatggggcgctggaagagaagctgatcgccgcccgccgcggggggtattgttttgaacagaatggcctgctggagcgcgcgctgcgcgagataggctttaacgtccgcagcctgctgggccgcgtggtgctggccaacccgccgcagatgccgccgcgtactcaccgtctgttgctggtggaggtggcgggggagcgctggatcgccgacgtcggcttcggcggccagacgctgaccgcgccgatcaaactgctggccgatatcctacagcaaacgccgcacggcagctatcgtctggtgcatgaaggggatgagtggacgctgcagttcaaccatcacgaacactggcagtcgatgtaccatttcgatttaggccgccagtatgcatctgattatgtgatgggcaacttctggtcggcgcactggccgcagtcccacttccgtcaccatctgctgatgtgtcgtcatctgccggacggcggcaaaatgaccctcaccaacttccactttacccactgggagaataaccatgtggtggagaagatcgattttgccgatgtctccgcgctgtatgaagggctgcagacccgcttcggcctgggggtggacgatcctaaacatggcttcagcgaagcggcgctggcggcggtgatggcggcgttcgatacccatccggaagccgggaagtaaatctccttatgcccggcggcgctgcgcttgcgcgggcctgcgaggtatgagcctgtgagaggtccctgtaggctgggcaaggcgtagccgccacccggcgaaattacaggtaccgtgcctgatatcttgcccggcggcgttgcgcttgcgcgggcctacggggtatgagcctgtgagaggaccctgtaggccgggtaaggcgacagccgccatccggcataaagcctggagccaggtacgataaatacccggacttggcgcgaaggcctcgtccgggctaccggtaaggatgaatgggaaacaccgccagcgctcagcgccgggagcgtaccacctggtaacgccgggtgaaatactccaccggcgcgctccagacgtgaaccaggcgggtgaaggggaagatcagaaagatggtcattccgagcaccaggtggacgcggtaaatccatgcgacaccgtccagatgcgccgaggcgccgccgtggaaggtgaccaccgcctgcgcccagtccaccagcttgagcatttcgctgccgtccggatgctgggcggagaaggggatggttgtcagccccagcgcgcactgaatcagcagaatgcacaggatcaaaatatccgcggtcgtggaggtggcgcgaattcgcgggttggtcaggcggcgcatcagcaggccgataccgcctaccagggtcagcacgccgcagatgccgccaaggatcatggccatcagctgcttctgggacatcggcaggaaccacgagtagacccagtgtggggtcagcatgccaaagagatggccaaagaagatgccgagaatgccgatatgaaataagttcgaccatagcaccatcccgcgcttatccagcatctggctggatgaggcgcgccaggtatactgcccgtaatcgtagcgcagccagctgcccaccagaaagacggtgccgcacaggtaagggtagatatcgtaaaagaagacgttcagatactggatcatttcgggcctccggcgcggatgtcaacgtactgcggcgccacatcctgactaaagcgtcgttgataagcttgcatcgacgagctatcgcaagcggtcgcattatcttcgataaacttcacctgctcttcttcccacacggcgtccagcgcctgacgggtatcgtcgcgcttttctcccgccacctgttttgtgacactgtcactggtgagcgggcttttagccagcgccagcagggcgtcaaacagctggtagtacgggcaggctcgctgcttaagacggccgccgatcagcgccagaatcggcgcgatattctgcagcccctcccgagcctccgcgggaggtagaatactgagatactccaggtacagcggcagatggtcgggcagctcgcgacaatcgatctgcagacccgcctgctgatactgattcatcaggtcgaccatcgcctggccgcggtcgcgggattcggcatgcacatgttcaaacagcagcagcgaggtggcgcgcccgcgctcgaacacctcgcaccattcggcctggcgatccaacagcggagccgtcaacagctcaccgacaaacggcgtcagggaagggacatcggccctgatcagcgccagggcgtcgtcgcggttctcccacagtaactcgtcggggtactccagcagcagaccgatcactttcaggatccgcatcactcgccctccccatgcttacgcacgccgctgacgtcgatggcgtcgatccgccggctgttaaacaggttgaatttcgtatctgacccgtggcagccatcgccgaaggtaaagccgcagccgttacgttccggaaaggcatcctccgccagttcgcgatggctggtggggatcacgaagcggtcttcgtagttggcgatcgccagatagcgatacatctcttcgacctgctcaacgctgaggcccacctcttcaatggcgcgggtatcggtgacgccctcgacggtttgcgagcgcttgtagtggcgcatcgccatcatccgtttcagcgcgcgcaagaccggtccggtatcgccggcgctcagcagatttgccaggtattgcaccgggatgcgcagactctcaaccgccggcaggatgttgccgttgctcggtaagccgccggcgtcggcaaccgactggatcggcgacaggggcggcacgtaccagaccatcggcagggtgcgatactccggatgcagcggcagggccagcttccagtccatcgccagcttatagaccggcgccttctgcgccgcctcaatgacgttgtgcgggatcccttgctttagcgcttcctcgatgaccgccggatcgtttggattaaggaacacctcgcactggcgctcatagaggtcggtttcatgttcggtactggccgcctcttcaatacggttggcgtcatacagcagtacgccaagatagcggatgcgcccgacgcaggtttctgagcagaccgttggctgcccggactcaatgcgcggatagcagaagatacatttttccgacttaccgctcttccagttaaagtagatttttttgtacgggcagccgctgatgcacatccgccagccgcggcatttatcctgatcgatcagtacgatgccatcttcctcacgcttgtagatggcgccgctcgggcaggtggccacgcagctcgggttgaggcagtgctcgcacaggcgcgggagatacatcatgaaggtattttcgaactggccgtacatctctttttgcatggcttcgaagttacggtcgcgggcgcgtttctcgaattcgccgccgagcagctcctcccagttcgggccccagttaatcttatccatacgctcgccgctgatcagcgagcgcgggcgggcggtcggcagagatttgccctccggcgcgttgtgcaggtgctggtagtcataggtaaagggttcgtagtaatcgtcgatcgccggcagcaccgggttggcgaaaatcttcgataatacgctgacccgattgccgaggcggggcgtcagcttaccgctaatgccgcggatccagccgccttgccactgatcctggtcctcccagtttttggggtagccaatgcccggtttggtctccacgttattgaaccacgcgtactccatgccttcgcggctgctccagacgtttttacaggtgaccgagcaggtgtgacagccgatgcatttgtccagattcagcaccattccaacctgagaacggattttcattttttcgcctcctgtacctgatcgcgaccttcgtcatccagccaggcaatattcttcattttgcggatcatgatgaactcgtcgcggttcgatccgacggtgccgtaatagttaaagccataggccagctgggcgtagcggccaatcatgtgcgttggcttcggacagacgcgggttaccgagttatgaatgccgccgcgacgaccggtcacttccgaacccgggatattcataatccgttcctgagcgtggtacatcatggtcatccccggcggcacccgctggctcaccaccgcccgcgcggtgagagccccgttggcgttgaacgcttcaatccagtcgttatcttcaatgcccagctctttcgcgtcggtttcgctaagccagacgatcggcccgccgcgcgacagcgtcagcatcagcaggttttcgctataggtggagtggatcccccacttctggtgcggcgtcaggaaattcagcgctttttccggaaagccgtttggcggcacggccttcatctggctgacgctgcgggtatcaatggacgggcgataggctaccaggctttcgccgaaggcgcgcatccacggatggtcctgatacaactgctggcggccggagagagtgcgccatgggatcagctcatgtacgttggtataaccggcattgtaggagacgtgctcgctttccagtccggaccacgtcgggctggagataattttgcgcggctgcgcctgaatatcgcgaaagcggatcttctcatcctctttattgagcgccagatgggtatgatcgcggccggtaaactctcccagcgcctgccaggctttcaccgccacctggccgttggtttccggggcgaggctaagaatcacttcggaggcgtcaatggcgctgtcgatccgcggccggcctttgtccggaccatcgggcttgacgtagttaagcttgccgaggaaatcgacttcgctttgcgtattccacgaaatgccttttccgccgttgccaagcttatcgagcagcgggccgagagaggtgaagcgttcccaggtggcaggatagtcgcgttccaccagggcaatcgacggtgcggttttcccggggatcagatcgcattcgcccttgcgccagtcaagcacctcgaacggctgcgacagttcgccgggggaatcatgctgcagcgggaccagcaccacatcggtctctttgccaagatggccgacgcagacctgcgagaaggatttagcgatatccttgtagatctcccagtcgcttttcgcctcccaggccgggtcgacggcggcggagagcgggtggataaacgggtgcatgtccgaggtgttcatatcgtctttttcataccaggtggcggtcggcaggacaatatcggagaagagacaggtactggacatgcggaaatccagcgtcaccagcaggtcgagtttgccctcaatcgccgcggtctgccactcgacttcctcaggttttacctcatcgctggcgcccagttcatcaccctgaataccgctgtcggtcccgagcaggtatttcaacatgtactcatgccccttaccggacgatcccagcaggtttgagcgccagataaacaggttgcgcggatggtttttgccgctatccggctgctcggcggcaaagcgaatatcgcctgattttaacgactggacggtgaactccgcgggggagagcccggcggcctcggcctgctgcttaatggtcagcgggttgacgttgagctggggcgcagaaggtaaccagcccatccgttccgcacggacgttgaagtcgataaggctgccgctaaatttgctggcgtcggccagcggcgacagcagctcctgcgcggtcagtttttcgtagcgccactggctggcgtggttgtagaaataagaggtactgttcatctgccgcggcggacgactccagtccagggcgaacgccagcggcagccagccggtctgcgggcgcagtttctcctgaccgacatagtgcgaccagccgccgccgctctggccgacgcagccgcagaataccagcagattaatcatcccgcggtagttcatatccatgtggtaccagtggttcaccccggcgccgaggataatcattgagcggccgtgggtcttatgcgccgtatcggcaaactcgcgggcgatttgttcgatatgttgacgcggtacgccggtgatctgctccgcccatgccggggtataggctttgacctcggcgaaatccttcgccgcattgacatcgtcaagcccgcgatccagaccgtagttggccagaatcaggtcatagacgctgaccaccaggccgctttcgccactggccagcgtcagctgtttagccggtagcgggtgaagggtcaccggtgactgcgctacgctgcgaaaatgcgggttttcgttgccgccaaagtaggggaagcccaccgacaccacgctgtcgcgaatatccagcagcgacagcttaagctcgacatctttgccgtctgcccgttgttcgagattccatttgcctttttcgccccagcgaaagccgatggagccgttcggcgccaccagttcgccgtcgctgttataggccacggttttccattccgggttattactttccccgagaccgtcaagcaggtcggaagcacgcagcatacggcccggcgtatagctgccgtcgtcgcgcggctcgagtatcaccagcatcggcatgtcggtgtaggtccggcagtagttgagaaagtaatcgctcgggttatcgaggtggaaggctttgaggatcacatggcccatggccatcgccagcgcgctgtcggtgccttgcttcggcgccagccactggtcgcagagcttagcgacttccgaatagtccggcgtgatggcgatagttttggtgcccttgtagcgcacttcggtaaagaagtgggcgtccggggttcgggtctgcggcacgttggagccccaggcaataatgtagctggagttgtaccagtcggcggattccagcacgtcggtctgttcgccccaggtcatcggcgaggcggggggcagatcgcagtaccagtcataaaagctcaggcaggtgccgccaatcaacgataaatagcgagtgcccgcggcgtaggagaccatcgacatcgccgggatcggcgagaagccggcgacgcggtccgggccatagtgtttgatggtccagacgttggcggcggcgatgagctggttcagctctttccagctggagcggacaaaaccgcctttgccgcgcgccgctttatagctgcgggtttttgccggatcctgcatgatgctatcccatgccagcaccgggtcgggatgcttcgccagggcttcgcgccacagctcaatcagtcgtttacgcgccagcgggtacttcaggcggttggcgctgtagagataccaggagtagctggcgccgcgcgggcagccgcgcggttcgtgatttggcagatccggccgggtgcgcggataatcggtctgctgggtttcccaggtaacgagaccgtttttgacgtaaattttccagctgcaggagccggtgcagttcacaccgtgcggggagcggacaattttgtcgaactgccagcgttgacggtagctatcttcccagtcacggttgttgttgtagacctggccgtggccgttggcaaaggtctcgcccttctgcttaaagtagcgaaagcgatccagaagtttactcatgacatttctcctgctccgatgatgtccggcatcgtgccacccggccggatgagcgaacgaactcgtaaggccggataaggcgtaagccgctatccggcagataaatcgttatggttaagcgggtttacggcggccgtagaccagccaggtcaccagcacgcaaaccacatagaagacaaaaaagactttcatcgcgccaaccggtgagccggtcatcgccagcgaggtgccgaaggctttcggaataaagaagccgccgatggcgccgatcgccgagataaagcccagcgcggcagcggtatcggtgaccgcctcgtgctgcgcttcttcatcgctgccgccgcgctgttttacgctgtcgatggtgagctggcggaagatgacggcgatcatctggaaggtggagccgcttcccagaccggcggttaaaaagagccccataaacaccacgtagaaagcgagaaagctgccggagccgctgcctggcagggtcagaaacagcaggccggtaaacagcgccatcaggacgaagttaaccagcgtcacccgcacgccgccgagacggtcggagatgatcccgccgaacgagcgcgccagcgcgccgatgaacggtccaaagaagccgagcttgaggatatcgaccgcgggaaactgggttttcgccagcatggcaaagccggcggaaaagccgatgaacgagccaaacgtcgccagatagagcaggcttaacagccacatatgcggtcgcttgagcacgggaagctgatcgcgaatcgaggcctttgaaccggcgatatcgttcatgccgaaccatgccgcgacggtggcgagcagcagcagcggtacccagacgagcgccgcattactcagggtgattgtcgaaccatcgggctgggtgacgccatggacgccgagaaaggtgaagagcggcaggaagatgaccgccggggcgaccatctgcatcacgcttacgcccagattgccaaggccgccgttgactcccagcgcgctgccctgtttcgctttggggaaaaagaaactgatatttcccatgctggaagcaaaattcgctccggcaaaaccgaacagcagcgcaataataataaatacccagaacggagtagtaatattctggattgccacccctaaccaaatacaaggcacgatcaggataacggtacttaatacggtccagtagcgcccgccaaaaaggggtaccataaaggagtaggggacccgtaatatcgcgccggaaagtgaaggcagggcggttaataaaaaaagctggtcggtggtgaaatgaaaaccgaccttattgagattcaccgctacggcgctgaataacatccatacgcagaaagcaagcagcaggcaggccactgatatccatagatttcttcgcgcaatggcttggcctttattttcccagaacgccttgttttcaggccgccagttgttcaaaaggtaatgattatctttatcattctgcaccgacatattgccctctacttgcccggaaaggagtaaataaataaggtcaacagctgaatacaaggggatagtgaataacgcttaatttgcgttatctatgaagcgtagataaaaaaaacgtgctgacagagagcacgtggtaagcgtagcggaattaattgttactaaatgtaaatatgcctaaaacaactccagcgtaatcatcttatttacatagcggctaaacgccgcctcatccagggcctgcgcgtccagcgcataaatcccgtcgaggccgcacaccagggcgataaagcgccaggcgatatccgccgcaggctcagccgaccgaaattcgccgctggcgaggccctgctcgatgatggcgacggtctcggcatgccacatattcatggtcagcaggtaggccgctttgatgtccggatcgctgtcggccagcacctggccttcgcgccacaggcggatatagggttccagtcggccatcctcgctgccgatcatcgagaacaagcgctcgcgccagctggcgtcctcagccaccagcggcatgtcgagcatctcgcggatcaggcggatgaaaacctgcgctttcagctcgccgatggaggtgaagtggtggtgcagctgcccggcggccacctgggcttcgcgggcgatctgccgcacggtcatggcggcaaagccgccgcgcagcgccaggcgcatggcggcctgcataatcccttcccgtcgcgcatcacgttgtaaatagtgcatagaaccccgctgtcatctggctttggccgagtgtaacaaaaagttggacatgtgttcaacaatccggcaggatcgccatcctggacgtgtgtccaatattcaatattgattgaggtacaagctatgtcacggcaatggatgacgctgatggcgattttgctggtttatattccggtggcgattgacgctacggtgttgcatgtggccgcgccgaccctcagcgtggcgctgggtagcagcggcaatgagctgttgtggatcattgatatctactcattagtgatggccgggatggtgctgccgatgggcgcccttggcgataagatcggctttaagcgcctgctgctgctcggcagcgccatttttggcatcgcctcgctgtgcgccgcgctgtcgccgacggccatgacgctgattgcctcacgcgctttgctggcggtgggggcggcgatgttcgtcccggcgacgctggccgggatccgcagcacctttgccgaggccagccagcgcaatatggcgctggggctgtgggcagcggtcggctccggcggcgcggccttcggcccgctggtgggcggtatcctgctggagcatttctactgggggtcggtgttcctgatcaatgtgccgatcgtgctggtggttatcgcgattaatgcgaaagtggtgccgcgccagcccgcgcgccgcgaacagccgctcaatctactgcaggcgctcgttttgattgccgcgatcctgatgctggtgtttagcgcgaaatcggcgctgaagggccagctggcgctgtggctcaccgcgctggtggcgctcggcggggcggcgatgttaacctggtttatccgcaagcagctgtcggcggcccgcccgatggtggatatgcgcctgttcacccatcgcataatcttaagcggggtgatgatggcgatgacggccctgattaccctggtcggttttgagctactgatggcccaggagctgcagtttgtgcaccagaaaacgccgttcgaggcggggatatttatgctgccggtaatggtggccagcggcttcagcggcccgattgccggcctgctggtatcgcggcttgggctgcgcgaggtggcgaccggcgggatgctgctcagcgccttcagctttctcggcctggcgttgaccgatttcagtacccagcagtggctggcctgggggctgatgacgctgctgggctttagcgtggccagcgcgctgctggcctccagttccgcgattatggcggcagcgccgaaggagaaagcggcggccgcgggggcgattgaaaccatggcctatgagctgggcgccggtctcggcatagcgctgttcggcctgatcctgacccgcagctacagcgcctctattgcgctgccgtctggcctgagtggcgccatggcgcagcaggcggcgtcatcgattggcgaggcggtgagtctgtcccaggcgctgcccgccggggtggcgcaggcgctgatggcggcggcgaagacggcttttattcaggctcatagcctggtgctggcgacggcgggtgtattgcttctgctgctggccgccgggatctggcgcagcctcgccaccgtggcgaaaccgcagtcggcgctatagctgcagcgacagatccatcgccgcgcgccgtagcggggcgagagccttctcttttaacgccgcggcgctgaccgtcgcggcaggtaccccgacattcagggcggccaccacctgaccgtgacgcgacagcacgggtaccgccagcgagcacaaccctacctcgatctgccggtcggcgagggcatagccctgcatgcgcccccgggcgatctctgcacgtaaaccggacaaatcgcacagggtatgcggagtgtagcgaataagcgtagcccgtgccaacgtcacttccagctgttcctccggcagcgcgctcagcaacacccgccccatcgacgtggcccacgccggcaggcggctgccgcgccccagatcgatgctcagtaaattattgaccgccgcgcgggcaatataaagcacgttatccccgtcgagcgtggccgccgaacaggattcgccgagcgctttgccaagattatccagcgccgtctgcgccaccttggccagcggcgtgcctgccagataggcgtggccgacggccagcacccgggggagcagttcatagctacggccatccggactgtgcaccatgcccagcgcggcgagggtatacaaacagcggcgtaccgccgcgcgcgagatttgcgttttctggctgagctgggaaatggtcagccgctggcgctggggggtgaaggcgttaaggacctccagcccgcgggccagagatagcataaagttagggtcgtgctcggcctgcctggcgctcagcgtattggggatattgtcgctcatcgcatccttctccgttgcagcgtaaagctcacggcagatcactataccttgcgcaaaatggggcgcgctgaattgtgccggttttaccaccatgatcacattaataaccgtcttttaacaaacgcgtcgataatcgcacaacatttcgattatcgccgttgaccatccgccaggctgaaccctattgtcaatggcacagacccccgttatggatgtgggtacaaaaagttatatatctcatcaggaacagaaaatgactgccaccgtagagcaaatcgagagctggattgtggatgtcccgaccatccggccgcataaattgtcgatgaccaccatgggctgccagtcgctggtgattgtgcgccttacccgttccgacggcatctgcggcatcggcgaagccaccaccatcggcggcttgagctatggcgttgagagccccgaggccatctcgtcggcgatcacccattatctgacgccgctgttgaaagggcagtcggccgataacctgaatgcgctgaccgcccgtatgaacggcgccattaaaggcaacacctttgcgaagtccgccatcgaaactgcgctgctcgacgcccggggcaaagccttaggtctgccggtatcagccctgctcggcggcgcgctgcaaacggcgttgccggtgctgtggaccttagccagcggcgataccgcgaaagatatcgctgaaggagaaaaactgttggccgaaggccgccaccgggcgttcaaactgaagatcggcgcgcgtgaactcgccaccgacctgcgtcatacccgcgccatcgttgaagcgttaggcgaccgcgccagcatccgtgtcgacgtcaaccaggcctgggacgctgccaccggcgcgaaaggctgccgcgaactggcggcgatgggcgtcgatcttatcgaacagccggtcagcgcccacgataatgccgccctggtgcggctaagccagcaaattgaaaccgcgatcctcgcggatgaagcggtcgcgaccgcttacgatggttatcagctggcgcagcagggctttaccggcgcttacgcgctgaaaatcgccaaagccggggggccgaacagcgtgctggcgctggcccgcgtcgcgcaggcggcagggattggcctgtacggcggcaccatgctggaaggcaccgtagggaccgtggcttctctgcacgcctggtcgacgctgccgctgcagtggggtaccgagatgttcggcccgctgttgctgaaagacgatattgtcagcgtgccgctcacctttgccgacggtcaggtggcgctgccgcaaacgccgggccttggcgtcgagctggatgaagacaaactgcatttttatacccgccagccgtagcggggaacaggagaaaaaaatgttatttaaagtggagatgaccgtcaatattccgcctggctttcccgccaacgaggcggaggaaataaaacaacgcgaaaaagcctattcgcaacaattacagcgggaaggcaaatggcggcatatctggcgcgttgccggcctttatgccaacgtcagtattttcgatgttcaagatgccgaagaattgcatcaaatattaatgggattgccgctatatccctttatggcgataaaagtggaagccctctgtcgtcatccgtcatcaattcgcgatgacgatcgctaataataatatctgacctcacgccggtattaccggcgtataccctgcaaaatataagagagaaccagtatgagtaatgtattcgtacaacaaccagctattcagaaattattacgcgacagtgccggattagatgttgccggcggcgatgaacgttttaaggcgattattcatcgtctgctggaaaatatctgcacgctcatcgacgactataacgttacggaagaagagttctggcacgcggtaaactatttgcacgagctgggcgggcgtcaggaggcggcgctgctggcggcgggactgggactggagcatttcctcgatctgcgccaggacgccatcgacgcggcagcgcatcgggaaaccggcaccccgcgcaccatcgaagggccgctgtacgtggctaatgcgccgctggccgagggtcacgcccgcatggatgacggcgccgacgccggagaagtgatgtggctgcacggtgaagtcaaagacaccgaaggtcggccagtggccaacgctattgttgatatctggcacgccaacaccctcggaaattattccttcttcgacccaggccagagtgagtacaacctgcgccggcggatccgcaccggcgccgatggccgctacagcgtgcgcagcatcatgccctccggctacggctgcccgccggatggcccaacccagaaactgctggacagactgggtcgccacggcaaccgtccggcgcacattcactttttcgtctccgcgccgggtcataaacatctgaccagccagattaacctcaatggcgataaatacctgtgggacgattttgcctttgccacccgcgacggcctgattgccgatccggtaaaagtgaccgaccgcgagatcatcgcgcagcgcaatcttgagggagagcacaccgaggtttgttttgatttcaccctgtgtaaagcgctgagcgccgacgaagagcagcgcgggatccgcctgcgcgccaaagagtaagcggcattatcggccccgggcacgctactgcccgggccagatattgcactcgaaaacgaagaattcaccctgtttctttcatcctgaatcctgcaggagggaccgactcatgcaaaaaacgctctcgacgctcaaagacaaaatcaataatgccttagttgtcgaccgtgaaaatcatatttaccgctgccatcgctctatatttaccgacccgcagctgtttgaatttgaaatgaagcatattttcgaaggtaactgggtatttctcgctcatgaaagtcaaattccccagccgggtgattattataccctgacgctgggccgccagcctgtcattattacccgtgataaaaagaatgagctgcacgcgctaattaacagctgcgctcaccgcggtgccatgttatgtcgacgcaaaaccgggaataaaaattcgtttacctgtccgttccacggctggaccttcagcaataatggcaaattattaaaggccaaagatgagagcactggcggctatccgccgagctttaaacaagacggctcccacgacctgcaaaaattgccgcgttttcagtcctatcgcggtttcttattcggtagcctcaaggccgacgtgcagccgctggaggcctatctcggggaaacctgcaagattattgacctgatcgtcgaccaggcgccggaggggctcgaggtacttaagggttcgtcgagctatgtatatgagggcaactggaaactgggcgcggaaaacggcgccgatggctatcacgtcagcgtggtccactggaactacgcctcaaccatgtcacgccgcaactatgaagcggaagggacgcacgcggtggatgccaacggttggtcaaaaagcctcggcggcggctatggatttgataacggccatatgctgttgtggacccgggcgctgaacccggaagtgcgcccggtctatgcccaccgcgaacggctgcaggcggaatttggcgaacgccgtgccgaccagatggtcaacgaaacccgcaacctgtgcctgtaccccaatgtctacctgatggatcagttctcgacgcaaatccgcgtgatccgccccattgcggtggataaaaccgaagtcaccatctggtgctttgcgccgaaaggggaatccgaccaggccagagcgctgcgtatccgccagtacgaggatttctttaacgtcagtggaatggggacgccggacgacctcgaagagttcagcgcctgccagcgcggctttctcggcgaaaatctgccatggagcgacctcagccgcggcgcgctgcgctgggtcgatggcgcggatgagcatgcgcaacatgccggcttttcgccgcggttaagcggggtgaaatcggaggacgaagcgctgtacatcgcccatcaccaccactggcagacgctgatgctggcggccattgaacaggaacaacagcgttacgaccagtccattacccagcgcgtggaggtggcctgatgcttaacctcgaacaggttcgccagtttctctactacgaagcccgtctgctggacgatcgtcagtgggacgaatggctcagctgctacagcccgcaggtggtctactggatgccggcgtggggcgacgatgaccagctgacccgcgacccgcaaaaagagatttcgcttatctactaccccaaccgcgaagggctggaggatcgcgtctaccgcattaaaaccgagcgctccggggccagcacgccagagccgcggaccacccatatcatcagcaacgttgagctgatgggcgaaagcgacgagggtctggaggtgcgttacagctgggtcacctggagccatcgctatcagcacacggatgcctattttggctctacctgctgcacgctaatcgaacaggacggcagaccgcagatcgtccgcaaaaccgtgcgcctgaataacgattatatccgtcaggtgattgacgtttaccacatttaagaggcgcttatgaccttcaatattgctcttaattttgaggacggcgtaacccgctttattcaatgccatgccggagagaaggtgctggatgccgcctatcgccagaaggtgaatctgccgatggattgctcggacggcgtttgcggtacctgcaaatgccactgcgccagcggtgagtacgacctgggtgaagattatctcgacgaggcgttaagcgacgacgaagcgcaggcccgccaggtgctgacctgtcagatggtcccgaccagcgactgcgtgatcgatgtgccggtggccgccgcgcagtgcaaaacggccctggcgacgctcggggcgcaggtgcggcaggtgaatttactgtccgataccgccatcgaactggtggtcgccctcgatgagccgctggccttcctgccggggcagtacgtcaacattcaggtgccgggcacgcttcatgtccgcgcctactcatttagctcgcaaccgggttccctcgaagggcgtttccttattcgtaacgtgcctggcggcatgatgagccagtggttaacccagcgggcgcggcccggcgatcgtcttaccctcagcggcccgatgggcagcttctatctgcgccacggcgaacgtccgctgctgatgctggcgggcggtaccggcctggcgccgctgctctccatgctccataccctgcagacacagggcagccagcgtccggtgatgctgctgtacggtgttactcgtgactgcgatctggtgaaaaccgacgcgctggatacctttattcaacagctgacggggtatcgttggctaccggtggtggccgatgaaaacagcacttgcccgcagcgcggctttgtcacccaccatctcgacgacgcgatgctgaacaacggcgacgtggacatctatctctgcggcccgccgccgatggttaacgcggttgccacggcgttgcgcgaccgcgggatcaccccggcggggttctggtatgagaaatttatcgccagccagagcgcggcggcataaggagacaaaatgcgttttaccgataaagtcgtcgtcatcaccggcgcggcgcagggcattggccgccagacggcggagcaggcggctgcagaaggcgcggctctgctgctcatcgatcgctcgtcatacgtccatgagctggcggcgacgctggcgcaatccggctgtctggtgctggcgctggaggcggatctggaagcgtgggaaagtaccgagcaggcgtttgccgccggggtcgctcattttggccgtatcgacgtgctgatcaacaacgttgggggcaccatctgggcgcgcccctttgccgaatatcagccggagcagattgagaaagagatccgccgctcgctgttccccacgctgtggggctgccgcgcggcgctgccatggatgctgaagcagggcaaaggcagcatcgtcaacatttcgtcggtggcgacggcgggagtgaatcgggtgccgtactcggcggcgaaaggcggcgttaacgcgctgacccgctcgattgccatggagtacagcggcagcggtattcggattaacgccgtggccccgggcgggaccgaggcgccgccgcgcctgacgccgcgtaacgaagagcagccgagcgagcaggaaaaggcgtggtatcagcaggtcgtcgatcagacggtggcgagcagtctgctgcaccggtacggcacgctggcggaacaggcgaatgcgatcctgtttctcgccagcgatgaggccagctatatcaccggcgtgacgctgccggtagccggaggcgatctcggctaacggcgggtggcgtaccagcagagcagggagccgagacataccatcccggccccctgccagaaggaccacgacagggtcgcactcagcaggatcgccgccagcgcagaggagagcaccggcgtgaagtaggaggccgccgccagcaggctgacgttgccgtgcaggatgccaacgttccacgccgcgtaggccagccccagcgccacggagaccgtcatcagcttaatgaccaccggccagctaaacagcatcggcggctggtcgctggcgagaaatttcagccatagcgtcagggcggttaacaggacgaacagcgtaatggcgtttttaccgcgggcatatttggccgtcaccgtgcagtaggcggcccagataaacgccccgacaaaggccagcagatagctaagcgggctggaaatgacgttactgataatctcatcgggctgtagcccatgctcaccgcccaacacccaaccaacgcccagcagggcgaaaatcaggccggggatcaccagccagctgcttttctggccgttaaagagaatggcgaataaaatcgtcaggctgggccacaggtaattgaccatccccacctcaatggcctgctggcggctggcggcatagcccagcgacagcgcgaggcagatttcatagctgacaaacagcacgctgccggccagcagatagcgacgcgggatctggcgcaggttgggaaagccgacggtaaagatcagcagcaggccgctaaggctgtaaatcatcgccgccccgccgaccgctcccagtccttcgctgacgccgcgaatcaatccgaccatcgtgctccataagataatggcggcgaagccgatcgtcgtggctctctttttctccatgcttttcctgatggttacgcaaatgcagccggcatatatatcatctttttatcggtgaggggcgaaattttccgccgttgctaacccttagggattagcgaaaatggccagggctggcgattaagggggcgaaggttttcctccttgatttgacgcaaattttcccgggattttgctgttagtttcctccgcgcgatgaatcaacatcctgcatggaggaatgcaatggacgtcagccgcagaaagttctttaagatctgcgcaggcggtatggccggaactaccgccgccgccctgggctttgcccctaaaatggcgctggctcaggcacgcaatttcaaattgctgcgtgcgaaagagatccgcaacacctgcacttactgctccgtgggctgcgggctattaatgtatagcctcggcgacggtgcgaaaaacgccaaagaagcgatctaccatatcgaaggggacccggaccatccggtgagccgcggcgcgctgtgcccgaaaggggcaggcctgctggactatgtccacagcgaaaaccgtctgcgttatccgcaataccgcgccccgggctcggataaatggcagcgcatctcctgggatgaagcctttaaccgcatcgcccgactgatgaaagccgaccgcgacgccaactttattgaaaagaacgaacagggcgtgacggttaaccgctggctttccaccggcatgctgtgcgcctcggcggcaagcaatgagaccggcatgctaacgcaaaaatttgtgcgatcgctgggtatgctggcggtagacaaccaggcgcgcgtctgacacggaccaacggtagcaagtcttgctccaacatttggtcgcggtgcgatgaccaaccactgggtggatatcaaaaacgccaacgtcgtggtggtgatgggcggtaacgccgccgaagcccatccggtgggtttccgctgggcgatggaggcgaaaaacaataacgacgccacgctgatcgtcgtcgacccgcgctttacgcgcaccgcgtcggtggccgatatctatgctccgattcgttccggtactgacattaccttcctgtcgggcgtgctgctgtacctgatcgaaaacaataagatcaatgccgagtacgttaagcattacaccaatgccagcctgctggtgcgggatgattttgccttcgaagaggggctgttcagcggctacgatgcggaaaaacgccagtacgataaatcgtcctggaactaccagttcgatgaaaacggctacgccaaacgcgatgaaacgctcagccacccgcgctgcgtgtggaatctgctgaagcagcacgtttcgcgttacacgcccgaggtggtcgaaaacatctgcggtacgccgaaagcggacttccttaaagtgtgcgacgtgctggcctcaaccagcgccgcggaccgcaccaccaccttcctgtatgccctgggctggacgcagcacaccgtcggcgcgcagaacatccgtaccatggcgatgatccagctgctgctcggcaatatggggatggccggcggcggcgtcaacgccctgcgcggccactctaatattcaggggctgaccgatttgggcctgctgtcgaccagtctgccgggctatttgacgctgccatcggacaaacagaccgatctgcatagctacctcagcgccaacacgccgaaggcgaccttgcccgagcaggtgaactactggagcaactacccgaaattcttcgttagcctgatgaaatccttctacggcgaggcggcgcaaaaagagaacgactggggctttgaatggttaccgaagtgggaccaggcttacgacgttatcaaatacttcaacatgatggataacggcaacgtcaccggctatatctgccagggctttaacccggttgcctccttcccggacaaaaacaaagtggttcgcagcctcagcaagctgaaatatatggtggttatcgacccgctggtgaccgaaacctcgaccttctggcagaaccacggcgagtctaatgatgtcgacccgtcggcgattcagaccgaagtcttccgtctgccgtcgacctgctttgccgaagaggacggttcgatcgccaactccggccgctggctgcagtggcactggaaaggtcaggatgccccaggtgaagcgcgcaatgatggcgaaatccttgccgggatttaccatcgcctgcgcgaactgtaccgcaccgaaggcgggaagggcgcggaacccctgctgaagatgagctggcgctacaagcagccggaccatccggaatcggaagaggtggcaaaagagaacaacggctacgcgctggcggatctctacgatcaaaatggcactttgctggcgaaaaaaggccaactgctcaatagcttcgcgctgctgcgcgatgacggcagcaccgcgtcgtcttgctggatctataccggcagctggaccgagcagggtaaccagatggcgaatcgtgataacgccgatccttcgggcctgggcaatacgctgggatgggcctgggcgtggccgctcaatcgtcgggtgctgtacaaccgcgcttcggccgatatcaacggcaagccctgggatgcgaagcggatgctgatccagtggaacggcagcaagtgggtcgggaatgatattccggacttcaataccgcgccgccagggagcaaaaccgggccgtttatcatgcagcaggaggggctgggtcgcctgtttgcgctcgataaactggcggaagggccgttcccggagcactacgagccgatggaaaccccgcttggcactaacccgctgcacccgaaggtggtctccagcccggtggtgcggttgtatgaagaggacgccattcgcttaggtaagaaggataaattcccgtatgtcgggaccacctatcgtctgaccgagcatttccacacctggaccaagcatgcgttgctcaattccatcgcgcagccggaacagtttgtcgaaatcagcgaagggctggcgaaaagcaaaggtatcgctaacggcgattgggtgaaagtcagcagcaagcgcggcttcattcgcgcggttgccgtggtgactcgccgactgcgcacgctgaacgtcaacggccagcaggtggagaccgtcgggatcccgctgcactggggttttgaaggcgtggcccgcaaaggctacatcgccaacaccctgacgcctaacgttggcgattccaactcgcaaacgccggaatacaaggcgttcctggtcaacatcgagaaagcgtaaggagcgattcaatggcgatggaaacccaagacattattaaacgctccgcgaccaacccgatcacccccgcgccgcgcgcgcgggactataaagcggaagtcgccaagcttatcgatgtctcctcctgcgtgggctgtaaagcctgccaggttgcctgttccgagtggaatgacatccgcgatgacgtggggcactgcgtcggggtgtacgacaacccggcggatctcagcgccaaatcctggacggtaatgcgttttagcgagaccgaacagaacggcaaactggagtggcttatccgcaaggatggctgtatgcactgcgcagagccgggctgcctgaaggcctgcccgtccgctggggcgattattcagtacgccaacggcatcgtcgatttccagcaggaaaactgcatcggctgcggctactgcattgcggggtgtccgtttaacgtcccgcgcctcaataaagaggataaccgggtctataaatgcaccctgtgcgtggatcgggtcagcgtcggccaggagccggcctgcgtgaaaacctgtcctaccggcgcgatccacttcggtacgaagaaagagatgctggaggtggccgaggagcgggtggctaagcttaaaaaacgcggttatgccaacgccgggatttacaacccgccgggcgtcggcggcacccacgtgatgtacgtcctgcatcatgccgaccagccggagctgtatcacaagctgccgaaggaaccgcagatcgataccagtatcagtctgtggaagggggcgctgaaaccgctggcggcagcgggctttatcgccaccttcgccgggctgatttaccactacatcggtatcgggccgaacaaggaagttgacgacgacgaggagaagcatgatgagtaaatcgaagatgattgtgcgcacgacgtttatcgatcgcgcctgtcactggacggtggttatctgtttcttcctggtggcgctgtcgggaatatcgttcttctttccgacgctacagtggctaacggaaaccttcggcacgccgcagatggggcgtattctgcacccgttctttggggtgctgatttttgtcgcgctgatgtttatgttcgtgcgctttgtccaccataacatccctgataaacaggatattccgtggctgaaaggcatcgtcgaggtgctgaaaggcaacgagcataaggtggcgcgcgtcggtaagtataacgccgggcagaagatgatgttctggaccatcatgagcatgatatttgtgctgctggtgaccggggtgattatctggcgcccatattttgcggaatatttcccgatgcaggtgattcgctatagcctgctgattcacgcaacatcggccatcattctgatccacgccatccttatccatatgtatatggcgttctgggtgaaggggtcgattaagggaatgattgaaggcaaggtgagccgccgctgggcgaagaaacaccacccgcgctggtatcgcgatgtcgaacgcctggaagcgatgaaagagagtcgtgaagggatgaagtaagccttcacggcgcgaaacccgctccggagatgtcggagcgggttcccggcagtcagcagttcgtgataagtgtatcgattgaatcgataacgccctggcgcgcatgactcagattgcagacgaaatcctgtggcgggatccgtttattatttaagttactgctcattggcgtacaaagtaaaaagctgtcaaattctatatttatccttggtacggcatgctgatgccagcgtggtaactgttgtggtcgcattaaaggaataatgactctcgtggccaggtctgcataataatcattctgcacgatcatataatatggcagggttttatttgtctgagcagaacaatttcgataaacattgaattattcaagcatcatagcaccctgaaaaattcatcatcagtaagagtgcctccttttgcaataaattcattcattgcggcaatgaattccttgtgttgtcgctgtttatctgcttctcgtaaatccttacctggctgttctgacgccttctggacgggtacgtcagtgggtcttttacgtagcgtattacttttcatcataggctccttgcggttggttctgtgattatttactttacccactaaaaaataaataccagcagtaagtttaatatttattttgcgagacagcttccagagggaagtaacagcctgaaatattcatggttatagtaataaacctggcgctggcattaaccagcgcgacgagaaataatcaaaacttctctggaatgaagcggaaaggaaaattagtctgtttcattttgccaattttgcgcttcggcagcgtcacaggctccaccggtaaagcttcataggggatctgcgacagcagatgggtgatgatatttagacgcacgcgctttttatcctccgagcgggcgacgaaccacggcgcccaggcggtatcggtggcggcgaacatggcgtcgcgggcagcagtatattcatcccagcggttgaaagacttaatgtccatcggcgagagcttccagattttacgcccgtcgtcgatgcgatcccgcagacggcgctcctgctcctgcggagagacctccagccagtacttgagcagaataatgcccgattcgaccatgccgcgctccaccatcggcgcgccgtcgaggaacttctgcacctcctccggcgtacaaaagcccatcacccgttcgacgccggcgcggttataccagctgcgatcgaaaatcacgatttcgccggccgccgggagatgcttgatatagcgctgaaagtagagctggcttttttcgcgctcggtgggcgagggtaaggcgacgacccgaaagatacgcgggctgacgcgctcggtgatggccttaatggtgccgcctttcccggcgccgtcccggccttcaaagacaatgcacactttcagtcctttgtgcactacccaccgctgcagtttcaccagctcaacgtggagtttgcgcagcgctttctcgtacgctttgttgtcgagcggcgcgatttttgccgccgtgtcgaccggattaccgcttttcttgttgcccatcgccatgctccgtgttgccgaggtatccctttgaagtgtaatcctcccccggcgaggcggtggaaaattattcgccgggttttcccgccaggatgacttccagtcccacccgctgcccccacgacagctccagggtgttaccgtccgggtcggcaaagaaagcgaaatagcccaccggatcgcccagctgctccggctcccggcgtaaaacaccttcccgccgtgcgagggccactttctcatcgatctcggcctgggtggcgcaggcgacgccgagatggccgaacggtcccagcggcgtatcggccggatcgtcactttgcaccagcaccagggcgaaaggccgggtgcggtcgctgagccatgccactttccgcgccgaggggagggcgggctcgcgctggtgaatgacggtcatcgcggtatagcgggtataaaaatcgatgctgctggccagacagcggacggtaaaggcgacatgagtaaaaccgacatcaacactttgcatggataattctcccaaggtgaacgatgttttgactttacaacctcaagttaacttgagatcaatgaggtgtttatctctttgagcccactgattttgataggggattgttactgcgaaaccacgccgccggtatgccacgcggctggggaacatgaacgaatcaggctgttgtatggaggaaactgccgtcgggcgtttttagctggtgtgtcggggcgggatagtaaataatgccggccggctctcaatacccctataagatgtatgaaaaaaacgattttttcactggcgctgggcacctttggacttggcatggcggagtttggcattatgggcgtgctgccggatatggcgcacgatgtcggaatatccattcccgccgccggcaatatgattgcctggtatgccttcggcgtggtgatcggcgcgccgatcatggcgctgctctccagccggttttccctgaaatcggtgatgctgttcctggctggcctgtgtattctcggcaataccctgtttaccttctccagtagctacgccatgctggcgcttggccggctggtttccgggtttccccacggggcgttctttggcgtcggcgcgattatcctgtcgaaaatcgcgccgccggggaaggtgaccgccgcggtggcggggatgattggcggcatgacgatcgctaacctggtgggcgtcccgggcggcacctggcttgggcatcacttcagctggcgctatacctttgcgcttatcgcggtatttaacgtggcggtatttctggcgatcttctgctgggtgcccacgctttatgaccgggccagcacgcggctgcgcgagcagttccgttttcttgcctccccggcgccgtggctgattttcgccgccaccatgttcggtaacgccggcgtgtttgcctggttcagctatatcaagccctttatgctcaatgtatccggctttgctgaaagcaagatgatgctgattatgatgctggcggggctgggaatggtggtcggcaatctgttcagcggcaaaatttccgggcgctacagcccgctgcgcattgcggccatgaccgacggggtcatagccgtgacgctgctgctgatctttgccttcggtgaacacaaagtcgcttcgctggcgctggcatttctctgctgcgcgggactattcgccctgtcagcgccgctgcagatcctgctgctgcagaacgccaaaggcggcgagatgctgggggcggccgggggacagatcgcctttaacctcggcagcgccatcggcgccttctgcggcggaatgatgatcgcccagggctttggctggaacagcgtggcgctccccgccgccgcgctgtcgtttctggcgatgagcgccttgctcatctatggctgccatcagcggcgacaagcttactaacgacgcctactcacgccagggttcgcccagggtaagcatcaggcggttggcccaggcgaaaaaggccgcggactgcagcagatccagctgggccagagtatctaagccctgctcatcaagcgccgccagatgatcggcgtttaacgcgggtggcgtcaccgatagcgcggcggcggcgtcgatttccgcctgccagcgcggcgattgcccatcgcgtagatcctctcccggcgtcaccgccagcagcgtgtcgacggcggtctcgtccttcgccagctgcgccgctttgcgggcatgcaccgaggcgcagtagatacagccgttgattttactggcgaccgtggcggccagctcgcgttcggcgcgcggcaatcctcccgcggtatagaaaatgcccctatcggtcagggtccgctgctccagcaccggctggttgcgcgccagcaggcgaaagtagggggagtcgctatggccatatttggccagaatcgcctgttcttcagcgttgaattcctccagcggtttatcggccagccagggttcccagtgcagctcgtcgcgggtgaagcgaaccggggccgctttgccgctctgcgcgtacggggtggtatgccagtatccggcgaccagcggcgtatctgcgctgacgatgggcttatggttgagcgcccgcaggcccagcagcagtcggctctggaagctgacaaaggctaccagctgcgccagggtgacgatgccccgcaggctccagcccgcgccggttaaggtgtgcagcgcgccgggagtggcttcaacgggggtgaaggtgagcaggcgggcaaaggccagcgccgggaccagacgatcggtggtcggatcggcgaggccgaaaccggcatagtgcgccgcaagcgcgtccgcctggtgcagttttgccaccttcgcggccaccgcgaagcgttcatcaagaggaaagtcagcgtcctgctggcggaacagcacttcataacttccctgggcgtgacgggtggcggcatcgcggacggcgcgcgcctgatcgagcggggaaccgggggcgatctccgccagttcggccagaatatcctgactcagcgtcatggggactccttatctgatgtggggggcaatatgctgagcgatcagctcaatggaacgcagcgtatcccggtgcgaaggctcgaccgagtgcacctgaaacgaaatatcggtggcgcgggccagcacgctgtcctgcgccagggaggcaataacatgctcaggatcgccaacgtgggcatccagctgttgcagatagtcggtgacactgtcaccttctatcgtatgacccgccgcccggtgctgagttgcctgcttgcgcagaccgggctcggcgacctgcagggcgcggtctcttatacacatccgacgctgccgacgagcgacctagtgtatagctcggtggtggccgtatcatccaaaaaaaaacaccgcagctgcaacaactctagcgtcatcagcaccacagaacaacccacccgaacagcagacctgacgaacaccaacgcccccccacccccacc

SEQ ID NO: 180 - DNA, 30128 bp, Unknown
  source: /note="Description of Unknown: MKP2_2161_1 Mutant Bacteria sequence"
ctggtaatactcttcataaatggcgctggcgctgccgacgtcattctgccattcgcctttctcaatggttgcggcgtccggatagagcgatttatcgttggccactgccgggctgagcatcttgcgcgccgcaaggttcggcgtcggataaccgatggtttcagcgacctgtttggcgacatccgggcgcagcaggaagttaatcagcttcagcgcgccgtcgacgtttttggcgttcgccgggatcgacaggctgtccatccagaagatgccgccctctttcggccagatcacttccagcggggtaccggcctggcgggcgacgtaagccgagccgttccataccatcccgaggttcacttcgccttccatatacgggttcgccgggttatcagagttaaacgctgcgacgttgggcatcagctttttcagctcgttataggcggcttcaatctctttcgggtcggtggtgttgccggaatagcccagcttacgcagcgccatctggaacacttcgcgcgcgtcgtcggtcagcagcaggctgcttttgtattccggcttccacaggtcggcccagctggtgatagttttcgggtcaatcgcctcgctgttgacgccgatggccgtcgccccccagatataggggatggagtagtcgttattcggatcgaacggtttattcagcatctgcggatcgaggttgctgaagttagtcagcttgctcttatcgatcttctgcagcatgccttctttgcgcatcttgtcgacaaagtaggtcgacgggacgaccaggtcgtacgcgccgtctttataggttttgagcttggcgtacatggtttcgttcgactcgtaggtcgaatagataaccttgatgccggtctctttggtgaactgctccagcaggcccggcggcacatactcggtccagttatagaaatagagcgttttgctatcgtccgcgtgcgcagcgcccatgccgattgccagagcgctcgccgcgagcaggtggcgtgaccattttttcattttaacgtcccctgagttttatcacgtgcaattaactgactggcgatgaccatcaccagcgacagaaccaacaaaatcgtggccagagcgttcacctctggcgaaacgccaaccttgaccatcgaatagatcttcagtggcaggatttcataccccggaccggtcacgaacgaggagactaccacgtcatccatcgacagggtgaagctcagcaaccacccagcggctaccgccggcagggccagcggcaggataattttgcgcaggatggtcatctcgctggcgcccagatctttcgccgcctccagcatccgcacgtcaaagcctttcaggcgggagtaaacggtgaccaccacaaacggcaggcagaaggtgatatgcgaaaacagcagcgaccagaaaccaagctggacgccgatcagcataaacagcaccagcagagagatggccatcacaatatctggcgacatcatcaccacaaacagcatgccgctgacaaacggtttgccgcgaaagcggtaacggtacagcgccacggcggtcagcgagccgataagggtggcgaaggtcgccgacagcaccgccatggtcagcgagtgctgggcggcctgcagcaggctatcgttgttcatcagcaggctataccagtcggtggtgaacccctgccagttgatgccgaagcgcgaccggttaaacgagttaacgatcagaataataatagggatgtagagatacgtgtagatggcggtcataaagccgccgcgcagcagtcgaccgatcattccagctccacctttttattcagcaggcgcgccgcgcgccagtaaatcaacagcatcaggcccatcaccagggttaaggtaatgctggttgccgcgccgaacggccagtcacggatattgaggaactggcttttgatcacgttgccgatcagcaggttcttggcgccgcccatcaggtcggaaacgtagaacaaccccatcgccggcagcatcaccagcagacagccggcgatgatccccggcatggtcagcgggatgataatgcggataaaggtctgcagcttgctggcgccgagatctttcgccgcttccagcagcgggcgatccagtttctcaatgctggagtagagcggcatcaccataaacggcagcaggatgtacaccaggccgatgatcaccgccgagggggtgaacataatgcgtatcggggtgtcgatcacccccagccacagcagaaactcgttcaggtaacctttagtgctgaggaaaatcttcagcccgtagatgcggatcaacgagttggtccaaaaagggacgatcagcaggaacagcagcaggggccgtaccttctgcggcagccgggcgaggaaccacgcaaacggatagccaagcgccaggcaggcgagggtcgccagcagcgccatgtttagcgaatgcagcagaacgtcataatagagcggatccagtagccgcgaatagttatccagcgtgaagaccagtttgacgaagttggcatcgtcgcgggtcaaaaagctggtggcgatgatcatcaggttgggcaggaagacaaacagcaccagccaaccgacgatagtggcgatcaccacattctggaatttactggtgttcttcatcggccagcaccacctcccagctttccacccaattgatagacattttctggtcaagagagtggtcgaaatccgggtcgtcttcgttaaagaactcgctgaccatcaccattttgccgttctccagttccaccaccgactccagagtcatgcctttatagttgcgctcgcggacatagccgatcaggccatcggcgtcgctgttatggtggatctcgtcgacgcgcagatcttccgggcgcagcaggacatgcagacgctggccggcctccacggcaaaattgacggtgatgttgcattctcgtccttcaacgctggcgcgcacgcgctgttcgtcgagacgttcaattaccgtggcgtcaaagatattgatctcgccgataaagctggcgacaaacaggttcttcggctcttcgtagatctctcgcggggtgccgtcctgttcgattttgccatcacgcatcaccacgatgcgatcggacatggtcagagcctcttcctgatcgtgggtgacgaagacgaaggtgatcccgagcttacgctgcagcgctttcagttcgttctgcatctgcttgcgcagcttgtaatccagtgccgaaagagactcatcgagcagcagcagacgcggtttgttgaccaccgcgcgggcgatggccacgcgctgctgctggccgccggagagctggtgcggtttgcgctgggcaaacgcctccagctgcaccatttttaaggcatccatcacccgtggggtgatttccgccgccggggttttctgcatccgcaggccaaaggcgacgttctcgaacaccgtcatatgcggaaacagggcgtagctttggaatacggtattgacgtggcggttttccgccggaacatgagtgatatcgtgatcttcgagatggatccgtccgctgtcgacgttttccaggccggcaataaggcgcagaacggtggttttaccgcagccagaggggccaagcagagtgagaaactcaccattgttgatggtcaggttaaggttgtcgatgaccgttttaccatcaaagctcttgcgaattcccgccagatgcaccagcggcgaacgcgaacgcggttgtatattcaatttttgactctgtcccatgtagacgcaacggcaaatttccggccgctgcggggtttgtgattaaccacctttggggttgcacgtttttaataagggccagcattctacggcaaacgagggtaatcgccaatccttgatacgcccgcatagtctacctttacaccataacgtcggttccgttattaaatttcgctttacgggctaaaaatgacctgacgcaatatttgtcttttctggcttatgaataatgttgtcacaaaagaagagggtggctacatggataaattgcttgagcgttttttgcagtacgtttctttggacacgcagtcaaagcctggcgttcgtcaggtccccagcacggaagggcagtggaagctgttacgcctgttgcaggcgcagctggaagaaatgggactggtcaaggtaacgctgagtgaaaaagggacggtaatgggaactttgcccgctaacgttgagggcgatatcccggccatcggttttatctcccacgtcgacacctccccggatttcagtggtaaaaacgttaatccgcagattgttgaaaactatcgcggcggcgatatcgcgctgggtatcggcgatgaggtgctctccccggtgatgttcccggttctgcatcagcttttgggacagacgctgatcaccaccgacgggaaaacgctgctcggggcggacgacaaagccggcattgccgaaattatgaccgcgctggcgaccctgcaggcgaaaaatattcctcatggcgatatccgcgtggccttcacccctgatgaagaggtgggtaaaggggcgaagcatttcgacgtcgaggcctttgacgcccgctgggcctataccgtcgacggcggcggggtcggcgaactggagtttgaaaacttcaacgccgcctcggtgacgataaaaattgtcggtaataacgtgcaccccggcaccgcgaaaggggtgatggtcaacgcgctgtcgctggccgcgcgcattcatgccgaagtaccggccgatgaagcgccggagaccactgaaggctatgaaggtttttatcacctcaccagcatgaaaggcagcgtcgatcgggccgagatgcattacatcatccgcgattttgaccgtaagcacttcgaggcgcgcaagcgcaagatgatggagatcgccaaaaaggtcggcaagggactgcacccggactgttatattgagctggtgatcgaggacagttattacaacatgcatgagcaggtgatcgcccatccgcacgtggtcgatattgcccgccaggcgatggtggactgcgatattgaaccgcagatgaagccgatccgcggcggcaccgacggcgcgcagctctcatttatgggactgccgtgcccaaacctgtttaccggtggctacaactatcacggcaaacatgagtttgtcaccctggaaggaatggagaaagcggtgcaggtgatcgtgcgtatcgccgagctgacggcggcacgcaaagggcattaatcttctcaggcggcccggtagggccgcgtgtcggacaagatgccggatggcggcttcgccttatccggcctacggtccagccggtgagcgcggaacccgtaggcccggcaagcgcagcgccgccgggcaggatgatggctcagtcgccaaagaaccagtaaccgctgttgaccagcgctgccagcatggcgaggaaagaaggatcttccagcgcatcgccaaaatggtcggcgcgcagcgtcagatgggtggctaaggcgtccagcgccggacggtgcggggagttgatcttctcgccgttaacgaatacctcgccgtcaatgcgcagcacccgcaggccgcccaggcgttccagggtatcgccctgctgcagggcatcgtaaatctcatctggctgatacggcggctccggcggcgcgacgtcgagctcatgacgcgactgggtgataaactcgccgaaccactgcttaaagtgctccggttggttaatcagacccagcatcatctcgcgcaggcggtcgagttcggtcggtaaaatatccgccggatggtcgcgggacggcacgtccggatcggcgtagcgctggctgcccagttcgcgctggaggacatagtcggcaaagccgctaaacagctcgcgggcattcggcgcgcgatagccgaccgaatagttaagcgagttttccagcgaataaccctcatgcgggaatcccggcggaatatagagaatatcgcccggctccatctcttcatcgatgatcgcctcgaaggggtcaacctgcagcaggtccggatgcgggcagtgctgtttcatcggcaccttttccccaacgcgccagcgccgacggccggtgccctgaatgataaacacatcatactgatccagatgcgggccgacgccgcctcccggcaccgagaaggagatcatcaggtcgtcgatacgccagtccggcagagcacggaacggatgcatcagcgctgcggacggttcatgccagtggttaaccgcctgcaccagcagggaccagttgttttcgctcaggtgatcgtagctttcgaaaggaccgtgactgacctgccattttccatcctgatggctgacaaggcggctatcgacctcgctctccatggccagtcctgccagttcgtccgggcttagggggtcgataaaattggcgaagccgcgcttcaataccaccggccgtttttgccagtagcgttcgataaagtcgggccagttaagcgttaattgataatccatattgatattccactgcaggtgtctgacagggattataacggatgcggcgccctggcgatgcaggcgccgtgaaaaatctcaacgattaactctgtttatcttccatctgctggcggccaaacaccacctccatgcaggcgccgccgagcaggctttccccggcgatgatctctccatcatattgttcgacaatttcacgcgcaacggagagccctaccccctggccgggacgcagggtatcagcccgctggccgcggtcgaaaacggcccggcgctggctctgcgggatccccggcccatcgtcttccaccaggatgtgcagatggctgtcggtggtctggcgcacggaaacttccacgaactccagacaatacttacaggcgttatcaagaacgttacccatcacttccataaaatcgttctgctcgccgacaaaagtgatctccggcgagatgtcgagcgagatattgacccctttgcgctgatagaccttgttgagagcggaagtcaggctgtcaagcaggggggcgatcgggtgtaattcccggctcaagagggtgccgccgctgcgcatgctggcgcgatgcaggtaataaccaatctgctgcgagatgcggcttatctgctccagcatcaccggctccgcctcgtcgacgctgatcttctcgccgcgcagcgagcgcagtgtactctgcatcaccgccagcggcgttttcagactgtgagtgagatcggtgagggtagtgcggtatttgtcatagcgttcgcgctcgctgcgaaccaggcggttgaggttgctgaccagccgggtcagctcgcgagtggtgttgggattgagcttttcgcggtgatgttcctccagttcgcgcacctctttggccagcgactcaatgggccgcaggctccaccaggcggcgacccacagcagggggatcaccagcagcaggttggcggccagcacatagacaaaccagctccacaccatatagctgcgcttgagctccaccggaatggtgtcgaccaccacaatgctgagctgaggcattttgctggtggccgggtagaggttgatcgccaccgagtgggtcatctcagagtcgtcgccctgttcgcggatagcgtccagctgttcctgaatctcatggttattgcgcaacagcatactgctgctgtcgacatcggcttcaatctcatggaagccattgcgtttcagccattccggttgaatgcgtttcgccagccatggaacatcacgctgcgcccacagcagtttgccctgctcatcgtagataagggtcaccgtcgggctttccatattcaggttttccgggatatcgacgtcaatagcgccgttttcccatctcgccagcatataaaagagattgctctcgccgcgcagcaggcgaaaggtggttttatcgaagctaacgctatagcccaccagggccaccatgccgtaggccagggagagcaccagcaccaccccggcggtcgccagcaggaagcgaacccgtaatgacagcgggaagatatgtcgcaacagtcccttcatcagcgcaattcgaacagatagccctggccgcgcaccgtggtgatgacgtcctgtgggtattcagcctgaattttcttgcgcagccgacccatcagcacgtcgatggtgtggctttctcgcagttcggcatccgggtaaagctggagcatcagcgaatctttgctgaccactttgccgcggttacggatcagggtttccataatggtgtattcaaaggcggtcagcttgatcggctggtcattcaccgacagctcgcgccgggagaggtcgacctggaacggcggcagggagatcacctgcgaggccagaccgctgttacggcgcagcagcgcctgcatgcgggcggcaacctcttcaatatggaaaggcttggtgacgtaatcatccgccccggcgctcagcacttccactttatcctgccatccttcgcgggcggtcagcaccagcaccggcagcgacacgtcgtggctgcgccagcggcggatcagtgataaaccgtcttcatccggcaggccgagatcgacgatggcgatatccgggagatgttcgcccagatagtagtccgcttccctggcatcttccgccgcatcgacctgatggcccagctcctgcagctgaactttgaggtggtgacgcagcagggcattatcctcaaccacgagtacgcgcatggctgttctccctagcattttcgatagtagtctgacgctcattatatacgcaaaatataaacggctgttaaataaagctttttataaaaagggcccctggtgcccccgggctggccagcattctgcggcgccctttgcgcatactgcatggaactccttcattctatgcgtaatttcagtaaacgcccagcggcaggatgcgaacggcgagcgggttggtgatgttaattttttgtgtaatagtgctggaatcacccctcaagaacgtcgcaggttatccattatgtctcagcagcagagcgcggactgggtcaggctggcgcaatcgcccagccggacggaacgcatcgaagccttcttcggcggccacggctacgaaccgcaccggcatgatacctacgccatcggccagacgatcgccggcgtgcagagctttcactatcgcggcggactccagcacagcctgcccggcggaacgatggtgcttcatccggacgaaatacacgatggcgaggcgggcaccgaggcggggtttcactaccgtatggtttatatcgaaccggcgctgatccagaagatactcggcggcaggccgctaccgtttatccccgacggcttgtcggcggatccacggctacgtcacgccgcgcagccgctgttgaaagcggtcacggataccttcgagccgctggaggaagaggatgctctgtacgacctggcgcagaccctggccgttgtcggcggccaacgttcccgtcgccaggcgtttgattatcaggcggcggagagggcccgggagtatattcatgcctgttttatgcaggatatgaccctcgacaccctgtcgcaggtcagcggccgggaccgctggagcctgagccgggatttcagaacgctgtacggcaccagcccgtggcgttacgtcatgatgcgtcggctcgatttttgccgccagcggatgcgcgccggggaacgtctggtggatattgccgccgacgcgggctttgccgaccagagccacatgacgcgccagtttatcagccgctttggcctctctccggggcgctggctgcgggctatccgcggataaggcggcgcaggttgcacaatcgttcaagcgtcaacgcggcgaggcgaactatgctgactgcctttatcataaggagacagcccatgtttcaactcgttaatcttgctcataaattttccctgttcagcgaacaatggcagcccaaagtggtggctgaaatgaacgactatcagttcaaggtcgtgcgcatcgccggcgactttatctggcacagccacccggaaaccgatgagacattgatggtggtggagggggtattgcgcgtggacttccgcgacgggcatgtgctggtgaaggccggggagatgatcgtcgtgccgcgcggggtggaacataagacctcggcggagacggaagcgaagctgatgctgattgagccgcgcggggtgttgaataccggccacgagggcggcgagcggacggcggtgaacgacgtttggatctgatcgctttccggcgataaaacgcccctctttccggcggaaagaggggcagggcgattacttcagctcgtcaaccatggtggttgcccgaccgatatagttggccggggtcatcgctttgagacgcactttttcctcttccggcagggcgaggctgtcaataaactgcttcatcccttccgcgtccacgcgtttgccgcgggtcagctctttcagcttctcgtacggtttttcgataccgtaacgacgcatcacggtctggatcggctcagccagtacttcccagttgtgatccagttcgtccagcaggcgatcctggttcagctccagcttgctgatccctttgagggtggactgataggcgatcagcgcatagccgatgcccacgccgaggttacgcagaacggtggagtcggtcaggtcgcgctgccagcgggaaaccggcagtttgctggccaggtgctgcatgaccgcattggccaggccgagattgccttcggagttttcgaagtcaatcgggttcaccttgtgcggcatggtggaggagccgatttccccggcgatggtcttctgtttgaagtggttgagcgcgatgtagccccacacgtcgcgatcgaagtcgatcagaatggtgttgaagcgcgcgatgcagtcaaacagctcagcgatatagtcatgcggctcgatctgcgtggtgtacgggttccactgaatacccagcgaggtaacgaactcttcgctgaactgatgccagtcgacttccgggtaggcggcgatgtgggcgttgtagttacccaccgcgccgttgattttaccgaggatttccacctggttcagttgacgatactggcgctccatacggtaggcgacgttcgccatctctttacccatggtggacggcgttgccggctggccgtgggtacgggagagcagcggcacatcgcggtactgggtcgccagatcttttaccgcgtcaatcagtttgcgccagtaaggcagaaccacttcgtcgcgggcggttttcagcatcagcgcgtgggagaggttattgatgtcttcagacgtacaggcgaagtgaataaactctgataccgcgtgcagctcggcgacgtcagcgactttctctttcaggaaatactctaccgctttcacgtcgtggttagtggtgcgctcgatggttttgatgcgctccgcgtcttcaacgctgaaatcggcgacgattttatcaaggaaaccgtttgcgtcggcagcaaaagcaggaacttccttgatcgctgcgtgggcggccagtttttgcagccaacgtacttccacctgaacgcggaatttcagcaaaccgaattcgctgaagataccgcgcagcgcgctgactttatcgccgtagcggccgtctacaggggaaacggcggtcagtgaggataattccatagatcacaactccggggttaaatgagcaagaatttgctttgcctggttaaccagacgattacgggaaaacataagctgcagacgtccgccgcccacctgatgccagagcaccgcggcgcgaatacccgccagcagcgctgagcgaactttcgcctgcacctgcgggctttgcagcacggcaggggagccggtcacctgaatacgcggccccagcgggcttatcacatcgacatagatgcccgccatggcgctgagcagcgtttcggactgcaggtcaaagtgttccagctgacggtgcaggccggcgatgcggttgccgagcgtgtccatcgcccctttactggcggcgagcttgcgctccagcaccatcaggctcagggtatagcgcgtcagttcagcattgaggccctgacggctgctggtattgagcaccccgagcagcgtttcaagaccgaggcgaagattggcttcactgccaccgaacaccgccagcgtcgactcaggatcgaggtcgatgatgctgttcagcgacacatgcagggcatcgctgtcgcaatgtccctgatgcgccagttgctgaaccagtcgcgccgcctggcaaacgccagccagcgccagggtgatgtcatagtaattcttcgccacacatactccttgtcagccgccagggcggttcgtcccggcggaaataacgcgcgttcaggactgcagaggcagtcgttgttcaataattccgccgccgaggcacacttcccctaaatagaacactgcggactggcccggggtcaccgccgcgaccggctcatcgaagcggacttcgatacggtcttcatccagcgcggtaacggtgcaggggatatcggtctggcgatagcgggttttcaccgtgcagcgcagggtgccctgcagcggttcacggtttacccagtgcagctgttgggcaatcagaccgacggacatcaggcgcgggtggtcatggccctgggcgacgataagaatattattctcaacgtctttatcgaccacgtaccatggatcttcgctaccctctttggtgccgccgatacccagccctttacgctggcccagggtgtggtacatcagcccctgatgagtaccgatctcctcgccgtcgacggtgaggattttgcccggctgcgccggcagatagcggccaaggaaatcgcggaatttacgctcgccgataaagcagatgccggtggaatcttttttcttcgcggtgatcagatccagctcttcggcgatcttacgcacctgcggtttttccagctcacccaccgggaacaggctctgggcaatctgctcgtggctaagggtgtagaggaagtagctctgatctttgttgccgtcgaggccgcgcagcagctggcttttaccgtcgacatcggcgcggcgcacatagtgcccggtggcgatgtagtcggcgccgaggtcttcggcagcaaactcgaggaaggctttaaatttgatctctttattgcacagaatatccgggttcggcgtgcggccggctttgtactcttccaggaagagctcaaagacgttatcccaatattcggcggcaaagttaacggtgtgcagttcaatgcccagcttatcgcagaccgcttgcgcatcggcaaggtcggcggcggcggtgcagtattcctcgccgtcgtcttcctcccagttcttcatgaacaggccttccaccttatacccttgctgcagcagcaggtacgcggagaccgaggagtcgacgccgccggacatgccgacgattacttttttctggctttctgacatggaaatactcgctacattgaacttcgaggcggcgtattctagcacgcgctcaccgttcattcaccccctgtgaacggccagttaaatgcgccaatcagcgacagcggctgccccgggtcctgcaggtagcagcgaatgctttcggcaaccagcggcgagcgcaggttcggcgcgttaagaatttcctcagcactgagccacaggcagcgatcgatatcgctgtcgtgtggttcagtggcgcacagatcgctaagttcgatggcgaacaggaagcgcagaaacggcgtgttatcgggagccagccactgatgcatgcggatgaagtgctgcggcgtggcgcgaatgccggtctcttcccacagttcacgttcggcggcctgcagcagcgtttcattggcctcgagatggcccgccggctggttccacagcgctttgccgttaatggtttcttcgacgatgagaaatttatcctgggcgtgaaccacgcaggcaacggtgacatgaggtttaaacatcgcttttccttttcagttattcggctttgcgccagtcgccgttgggcagtccgtcgagggtatagccgcccatggcgtagcggatcagccgcagggtggggaagccgacgtgggcggtcatccggcgaacctggcggttgcgtccctcgtagagcgtgattttcaaccagcgggtgggaatcgatttgcgctcacgaatcggcgggttgcgcggccacagccagacgggttcctcgacaagttctacgccggcaggcagggtggggccgtcgttaagggtgacgccgtcgcgcaaggcggtcagcgcctcgggcgtgggttcgccttccacctgaacatagtagatcttgccggtgcgcttacccggctgggtcagcttcgcctgcagcgcgccgtcgttggtcagcaccagcaggccttcgctgtcgcgatcgagccgacctgcggcgtagacgcccgccaccggaataaaatctttcagcgtgctgcgcccggcttcatcggtaaattgcggcaacacatcatagggtttattgaacaagatcacagtttttggctggcgttctttacgttgtctggtgacttgttgtgtgctgaatcgctcaacgcgatgttttctaaatgaagttttctgcatggtattttcaggctttatcaattgccgcattatagcctaattacgaatgcctttcatggacgcaaacattcaggtagtattgacatgctcattacaaattattaacaaaaaattgctcaaaccgattcgcactacaggcaggaaggcgacacggacgcgatagctccggttagcgggaagacccggtacgccgaagctggccgactcagccaacaccaggctcgcgtgaagagggaagagcagaaccagaagcgctcgaaggagaggttaatggaaagcaaagtagtagttccggcggaaggtcaaaaaatcaccctgcaaaacggcaaactgaacgtccctcacaatccgattatcccgttcattgaaggtgacggtatcggcgttgacgttaccccagcgatgctgaaagtggttgatgccgccgttgagaaagcctataagggcgagcgtaaaatttcctggatggaagtttacaccggtgagaaatcaacccacgtctatggccaggacgtctggctgccagctgaaaccctcgatctgattcgtgactaccgcgttgctatcaaaggtcctctgaccaccccagtcggcggcggcattcgttctctgaacgtggcgctgcgccaggagctggatctttacgtctgcctgcgtccggtacgttactaccagggcaccccgagcccggttaaacacccggaactgaccgacatggttatcttccgtgaaaactcagaagatatctatgcgggtatcgagtggaaagccgactctgcggaagcagacaaagtgatcaaattcctgcgcgatgagatgggtgtgaagaaaattcgcttcccggaacattgcggcatcggcatcaagccgtgctctgaagaaggcaccaaacgcctggtgcgcgccgcgattgaatacgcgatcaccaacgatcgtgattccgtcactctggtgcacaaaggcaacatcatgaagttcaccgaaggcgcgttcaaagactggggctaccagctggctcgcgaagagttcggcggcgagctgatcgacggcggtccgtgggtgaaaatcaagaacccgaacaccggcaaagagatcgtggtgaaagacgtgatcgccgatgcgttcctgcagcagatcctgctgcgtccggcggaatacgacgttatcgcctgtatgaacctgaacggcgactatatctctgacgccctggcggcacaggttggcggtatcggtatcgccccgggcgccaacatcggcgacgagtgcgcgctgttcgaagcgactcacggtactgcgccgaagtatgccggccaggacaaagtgaacccgggctccatcatcctgtccgcagagatgatgctgcgccacatgcagtggttcgaagccgcagacctgatcgtcaaaggcatggaaggcgctatcgccgccaagaccgtgacctatgacttcgaacgtctgatggaaggcgctaaactgctgaaatgtagcgagtttggcgacgcgattatcgcgaatatgtaatcccattgatggattaagtaaaagcgggagccgatgggctcccgttttttttcgccttcaggcaattattctgccggacgcttgaagcattaggcgatggcgaatgtcccgcagcgcaacgttcaacaaagctatatacctcatgacagggagagatccatttgccgtaagagctcgcatgaaaacggattgcacgccaggcgtcatactgatggcccgaccggcttaaaccggggccgttcggcgaaaatgtgctgtagcctaaactcaggctatccgcgcactttcagattaaacagccgggacagcgccgctttgccgctatccgtcacttgtacttcccgatatcccggtgcgcgcgttatccatcctttttgcaggaacagcgtcattagcgccgagccggcgtcgcctcccagatgaaaacgtctttcgctccagtcgagacaggggcagcagggcttacgccgtgggcgggcgttcagtactgcgccaaggcgttcaagctgggttttaccggctgacgtcagggccaggccatctgccgccagccatttttccctcagcataaattcataaatattgaccgccagctcgcccgcccgatggtcgtagcaggtgcgtgcgtaacgaagattaaccggcgtgctggggagaagcgtcttatgcgcctgcatagagacgcccatcaggttttccagcagcccggcaatatgcgagcccgccaggcggtaatagcggtggcgcccctgcgcgagacacaccaccagtccgttgctgagcagccgggcaagatggccgctcgtggtggaggcggacacctcggcgaccgtactgagttcggttgccgtccatgcgcgcccgtccatcagcgcgcagagaatactgacccttgacgagtcagagagggcggaggccaccatcgccatagcggtttccagcgcctcctctggctcactgtcttgctgcggtttcaggagattcattcagaaagtatggcccattttttggtcacttccgctgcccgggcgtcatcatcggtaaggagaatgagccggttacggtggtcgctgtactgtaccagaatattaataccattatgggccagggtgtccgcgatgtctcccagttccccaggacgttcctgaggtaactttcgtatcagaggacggcatacattgctgaccgtaaagccggcctcggtcagcaccctgcgggctgtctcaccgtcttccaccagaaaatgcgcatgtcctgcatcaggcgtggtgaatacgccgccgccttcgagccccacgccgttgttacccagcgccatacccattgcgccaagcgagcccggcgagttgctgagaatcacgtgaatgtcatacatctgactgtgctccccgatccgatgcgtaatcccggaacacgcgggctacgcgtattctgtaatatgaaaaaatcgatgctttgccttcgcgctgggcagccagatgccgctcattttgctgccagttggccaccgaggcttcatcttcccaccaggatagcgagaggattttgccgggcgtactcaggctctgaaagcgctcaatggcaataaaccccggcgtgtctgaaagcaaaggcgtcagcccggccgccagctgaagatatctttcctgtgcttgtggtaaggcgtcggcctcaaaaagtaccgcaatcataagtctgctccgtggtgaatttcccggcagtctactgacggccagagcaggaagcttcggtgtgcagcgaaatatgcctggcaggagatcaacgattgcaacggaaatgctcccaggcgttattgcgatggtgaataaaaaagaacgccagccatgcgatacggcagcctgagcgcacagggctggctgagttttagtgaaatcgcgatgtggggagataaaccctgacggctgcggctatcgatgaaagcgatcgccgacgggcagtacgggcgggaaagccgttttactgacatgcagaatatgaacccggaaacgctcgcccggactagcgaagcgccgccgggcgataatcgaaagagcacgttgtctgccaccggtcacgccttcaggctccgcgctctcctcgggcgtggatttttaccttagccgggagacctgcgtctcgcctactgtgcatggcggcgcagggtggaggcggggtggcgccgcagcgcctcttcgggacgcacagggcgccgcaccagttcgccgccgcagttcgggcaatgtccgttcagtcgcgtcgtcatgcagtcccggcaaaaggtgcactcgaacgaacagataaacgcctcgggtgagtctggcggcagatctttatcacagcattcgcaattcggacgtaactcgagcatcaacttctcctctggtgaacggctatatcagcgacggcgggccaaagcacgctatgtttatatcatgccgcgatcggtccgccgagaatttccttgcgcggtaatcgccttctcagagggtcgctttcccgggctgcattcccggtacgaggatcactttgcggcacgcctcttcacgtttctcaaagatctgatagccgcgcgcggcctcctccagcggcatatggtgagtgaccatctcctccggggtaagcagcccttgctcaataagcgccagcagatccggcagccaggcgtggacgtgggtttgtcccatcctgaaggtcagtcctttatcaaaggcatcgccaaacataaagccgtggatgaaaccggcgtaaaccccgggtacgctgacgatgccgccgcggcgcacggcggcgatgcactggcgcagggcttttccgctgctcccctcgattttcagggtgctgaggacggtttccgtaaggctacctttcgcctcgaagcccacggcgtcgatcaccgcgtcgacaccgcgatggcccggcgtgttatcgataatccactgcgcaggatcgtcatggtggtcaaagtttatcgggatcgcgccatagcgttgttgcgcgaaatcgagtcggtaatcgttatgatcgatgataaatatctgttctgcgccattgagcctggcgcaggaggcgcagagcaggcctaccgggccggcgccaaaaatagccacgctactgccgggtttgacctcggcgtttttaaccgcctgccaggcggtgggcagaatatctgacagaaacagcaccttttcatcgggtaaggtgtctggcactttaaacggtccggtattggctttggggacccgtacatattccgcctggccgcccgggatcccgccgtacaaatcgctatagccaaacagcgccgccggtggcgaaatgccttttcgattgagcgtcgctccctggccgctattggtgctttcgcaggcggcatactgctgcaagcgacaaaagaagcagtctccgcaggcgatgacaaacgggataaccacccggtcgcctttgcggaccgcggtgacctcggaaccggcttccaccacttcccccataaattcatggccgaaaatatcaccatggtgcgtgccggggatctttccgcggtacagatgcagatcggaaccgcaaatcgctgtcgcggtgacgcgcagaataatatcgtccgctgcctcaagagccgggtcaggcatgttgtcgacgctgacatgatgcgggccgtgataagtgagtgctttcatagaatattctcctcgagagaaaggttgacagcatgcggttcttcggcctggtgaacggctgctatcgtcaccgataaatcatcgtaaaaaataaagcgtagagtactaataatggaactgcgtgatattccaggggctgaatatattccacgcttcgcttatttcccggctggtctgttcgagttatttgcctattgcccttatgtgtgccagtattaatcgggcatgatattcgctccattttgtttgctagccgcttccccagcggcttttttttattcgtaaaatcagggaaaattcttaatttccgtctggcaaaggacaatgctgccgcttcgttatataacccaacggtagtaatcctccggtatagataattctttgccgcagaggtgatctgcatacattatttccctgaacacagtgagttagcggcaaggtgccgtctggttatttttgaggtgtcttgtagaattattccgaattactgctaaaaggtgtcgaaaaaacggaataataatttgactaaccagcattacccgctagatttaaatatcgaacgacgagtgatacggaatattttcgtatcgtactgacataaccgatatacatgaggtgaaatatggcagagcatcgtggtggttccggtaattttgctgaagaccgtgaaaaagcttctgaagcaggtcgtaaaggtggtcagcacagcggcgggaactttaaaaatgatccgcagcgtgcgtccgaagcgggtaaaaaaggcggacagaatagccacggcggtggccgcaagtccgataattcctgattatccttttccttgcaccctgaagtgaaagtatctcctgcgagtctgtcacagactcgcagttattttctgactccagaaggtatttctatgaatatgaaaagcattgaagatgtatttattcacctgctctcagatacctacagcgcagagaaacaattaacccgcgggctggctaaactagccagagcggcgtccagtgaaaaactcagcgcggcgttcaatgctcatcttgaagaaacccagggccagatcgaacgtatcgaccagattattgaacaggaatccaacctgaaaatcaaacgcatgaaatgcgtggccatggaaggattaatcgaagaagctaatgaagtcgttgagagcacggaaaaaaatgaggtacgtgatgctgcattaattgccgctgcgcaaaaggtcgagcattacgaaattgccagttacggtactctggtcaccctggcagagcagttgggctataaaaaagcagccaaactgcttgccgaaaccctggaagaagaaaaacaaaccgatgtgaaattaaccgatctggcggtaggtaatattaataagaaagcggaaaaataaactctccctgacacgaggaaatcacgatgaatcacgttgaacattaccatgactggctacgagatgcgcatgccatggaaaaacaggcagagtccatgctggaatcaatggctggccgtatcgataattatccggatctccgtgccagaatcgaacagcatgttaacgagaccaaacggcaaattaccgtgctggaagagatccttgaccgcaatgagatttcgcgctcggtgattaaagattcgatgagtaaaatggcggctctcggccagtccatcggcgggatgtttccttccgatgaaatcgtcaaaggctcgatcagcgggtacgttttcgagcagtttgaaatcgcctgctatacctctctgctggcggccgctgaaaaagcgggcgataccgcctccatcccagccattgaagccatcctggcggaagagcgggaaatggccgactggctgattaaacatattcctcagaccacggagcagtttctcctgcgttcagatgctgacggcgtagaagcgaaaaaataacccaggaggcaggcctatgtttcgtcatgtgaaacaactgcagtataccgtacgcgttgctgaaccgaatccggggctcgcgaatttactgctcgaacagtttggcggccctcagggcgagctggccgccgcgtgtcgttatttcacccagggattaagcgatgacgatcccggccgcaaagatatgctgatggatatcgcgacagaggagttgagccatctggagatcattggcactttggtcggcatgctgaataaaggcgccaaaggagccctggcggagggcaccgagagcgaggcggaactctatcgttcgctcaccgccaacggcaatgacagccatattacatccctgctgtacggcggcggtaccccgctgaccaactcggcgggcgtgccgtggacggcggcctacattgatactatcggcgaacccaccgccgacctgcggtcgaatgtcgcggcggaggcgagggcgaagatcgtctatgaacgcctgatcaacgtgaccgacgatcctggcgtgaaagacgcgctggccttcctgatgacccgcgaagcggcgcatcagctctcttttgagaaggccctgcagtcgattcgtaacaactatccaccgggcaaactgccgcccattagcgagtacgctaacacctactacaatatgtctgaaggtggagaagtacgcggcagctggaacagtgacaaacacttcgattatgtcaaggatccacagccggccgtagatggcggagatggcagtgcttctgtcggcctgacgccagagcaggaagcgctgtgcaaagcgatgctgaagcgaacgcagtctgacccgcagggcgatcctttgaccggcgccgaactcggcgccgggaagcaaaacacttcatcatcagctaagtgatgttcgcatgagccccggctgcggccggggcgattcacaatgatgggtgtggaatatgtttgaattcgacgcgtttcatctggcccgattgcaattcgcctttaccgtatccttccatatcctctttccggccatcaccatcggccttgccagctaccttgtggtgcttgaggggatgtggctgcgaacccgggataatgtctggcgttcactctacaatttctggctgaaaatctttgccgtcaattttggcatgggcgtagtctccggattagtcatgtcctatcagttcggcaccaactggagcggattttcccagttcgctggcagtattaccggcccgctgctgctgtacgaagtgctgaccgccttcttccttgaagcgggattcctcggggtgatgctgtttggctggaataaagtgccgccagcgctgcatttttttaccacctgcatggtggcgcttggcacgttggtttctaccttctggatccttgcctccaatagctggatgcagacgccgcagggttttatcatcgaaaatggccatctcatcccgcaggactggctggcgattatctttaacccctcttttccgtatcgcttgttccatatggcgatagccgcgtttctcagtagcgccatgttcgtcggggcgtctgccgcgtggcatcttctgcgcggcaacgactcgccggccatccgcaaaatgctgtcgatggcgatgtggatggcgctgctggtggcgccgatccaggcggtggtgggggatatgcatggtcttaacacccttgagcatcagccggcgaagatcgcggccatcgaagggcactgggaaaatcgccccggcgaggccacgccgctgctgctgtttggcctgccggacatggagcaggagcggacccgctatggtcttgagatccccgctctcggtagcctgatccttacccacagcctgcataagcaggtgccggccctgaaagacttcccgaaagaggaccgaccctattcgcccgccgtcttctggtcgtttcgcatcatggtcgggatgggcgtgttgatgatcgccttagggatctgcagcgcctggctgcgctatcggcggcggctgtaccactcgcgtcccttccagtggtttgcgctctgtatggggcccgccggtcttattgccctggtcgccgggtgggtgaccaccgagatgggccgccagccgtgggtgatatacgggttgctgcgcacgcgggatgcggtgtcgttgcacagcaccctgcagatggccatcagcctgctggtatttatcgtggtttactgcgccgtgtttggcgtggggtattactatattttccggcttatcaaaaaagggccgcagccggtgactgagctgacctcgcaaaccgcaggcaccccggcgcgtccgctctcagcggctgagccggtgcgtgatgaggagaacgcatcatgagcatcgatatctcggtgatttggtttgtcatcattgtcttcgccacgctgatgtatatcgtgatggatggtttcgatttaggtattgggatgctgttcagcgtggtgcatgatggcgaagagcgcgatgtgatggtcaacagcgtcgcccccgtctgggatggtaacgaaacctggctggtgctcggcggggcagggctattcggcgcctttccgctggcctatgcggtgatcaccgatgcgctggttatcccgctgacggcgatgctcatcggcctgatttttcgcggcgtggcctttgaatttcgttttaaagcggttccctcgcatcgcatcttctgggactatgcctttgccggcggctcgctgttggcgaccttcagccaggggattgtcgtcggcgcgtttatcaacggctttgcggtggctgaccgccgcttcgccggttcgacgctggactggcttacccctttcaatctgttctgcggtctggggctggtggtggcctatctgctgctgggcaccacgtggttgattatgaaaagcgaaggcgcgctgcagcagcggatgcgcgagctgacccgcaaggtactgctggcgctgatggtggtgattgcggtggtcagcgtctggacgccgttgggctggcgctacgtggcggaacgctggtttacgctgcccaatttcttctggttcgtgccggtgccaattctggtgttggctctgagcctgtggatctggcgcctgagcgcgcgccccgccagccacgcccgtccctttatcctgacgctgggcctgatattcctcggcttcagcgggctggggatcagcgtctggccgaacattattccaccgcatatctccctgtgggatgccgctgcgccgccctccagccaggtatttatgctgccgggggcgctgctcattatcccggtgatcctgatgtataccgcctggagctactacgtctttcgcggcaaagtctccggcagcgagggctatcactagcctgattcgcgccggcaggtgaggatttgctggcgcgtcgcgccgtccggtcagggatgaccgagagggatgcgcacaaaccggtgatctgctgcaacgactctggccgggtgtttatgccttcggcggcttgatcttaataataaatcgttcgttaacccgggtgatcctcgcgccaatatcgccaaactcggtggcgattttaaaaaaatcgtccgcggcgacatcaaaatcgagttcaatcttcgggtgttgtcctgtcgccagtaattcatagaaatggtcaaggctgcgggctttttcgctaggcatcttatttctccatggtaaaccaatctgcaggggttttattgcttacggcgcttttacggattattcagcaggatgacaaacgtgcctgatataaaattatgcaatgacagtaagaatgaggcagggcgaggttattccgtgttgttaaaccgcgtggcgacgcgttgtccgccataccatgacggcagagacgaccctgcggcgccggttgatgatagacattttttgatgacaaattaatgacaataaaatgaatctgtccgggctcgggatggcatcgtgctaaataattttattctgtggctggtaaggtggttgttaactactttatggttatggagcgtcttttttagggccaacggcgagggaacaacgatgcaattacttgatttattcgcaggcttattatggttaagcagcgttatcttcctgctgtttgttcttgatgtgatcatcacccgttatctttatcgtaaataatcgacaacgacagcggcgttgggcataggggacggcgtcggaggatgataatataacccgcggaatgattcagaaaggaatgcgcggtggccgggagaattgattacgatattgaaaaataccagtttaccgaagccggtgagacgccacggctccgggagcagtggcgcgaagtatacctggagtgtcgtcagctgcgggccggggcagaggagcgcctgcgcattgcgttactgaacgtcgactatgtcaccagcttcgagctgccttttcgcctgctgctggtgcgtgcgccgcagctaatcgccgatgttcgcgagacgttgcagcttagccgtaaagctgccgttttcaacggcaaacgttacggctgcgtctatagtttgaaacaggatttacaggctgtcccggaagcctttcattaccgcctggcaaaccgcattcgtcgcgtcgatgcaaccgggctgacggcggccccgtaccagcagattgcccgggagataaagccggcccgggagcggctccgccaggcgctgaacgccggcctgccggtcaccgctctcgacgccctgttctggttcggcagtcagcgagtggcggcggacatcgcgcagttgcgccggtccggcatggcgattgtcacgacggaggtggaggtcagcgacaatttgttcaataccacccgacgagtgcccgtttaccgcctggccagcgagtgaatcggcgacctttcgcccagccgttgcctctgcagacagttgaccattgtcccgtcgaaccagacgcacagccctctggcgacaggccgcggggtcagttccagccatgcgctggcgatgagcatgaggagcattagcgccagtggaaccatgtattttcttttcactgccctttatccgctgcgcctgttctgccagcaaggtagcggtaaagtatgacgtttcgttgaccggggcagcgtttttattatcggcaagcggttgcgttgggccagagattattcatcttttggcatacgagaggacgaaaactggcggcttgtatttttgatttttattacaccacgcttttttttgccgccggggaaaagcgtaatgtggctacgaatggatgcggctcgtcatgtaactggctggtttgaaacaatattttaattgttgtctaaacgcatgcgacagcggtggctaatttatattaattcactttaccgatcaataaattatatgttgatagtttttagctatcgaatgtttcttatcgatcattttaaactatttttgttggcgggaaatatatgacatgctttaaccctttcttatttttggtattttttaaatggttgaagaaaacgcgaaaaatacctcctatcgcttcgtactggagcccgctattagcgatgatggcagctgccactcgtgggaattgctcactaaagatattatagcacccgcacgaaataacgcctcagcgcccgcgttttctttctccacgcttaccgaaagcgataagcttgcactatttacccgacaaatcgagttgctttccgtatttgatttttccctggtcgataataagccgatctcgctcaatatcgatgatttattaagccattttattctgacggaccgctatctctgctattttctgcgctcgtgtaagcatattgctttggagataaatgagaattttcatgagtttatcgccggccgcgagctgacggcgctaagcacgctggcggcgctttgtccggtctggctggatgattttggtcgcgggcgaacctccttcccgctgctggagagattccgcttcgattgcgtcaaagtggataaggactacttctgggataaagaaaacgaccccgctttgcccggtctgttgcagtctattcataccctgaccggccatgtgatcgttgagggtatcgaaaccgaaaagcaaaaacggttaatcacttctgccggggacatcataggtcagggccgctactggaaggaagaatatatttttctttgcggttgagggtcgaccgggggctggtttcggttacctgctattcttttattatccagttttaaattccccctttgctactgatagtctttattagcgcagtgataagcgcctctcttttttatgaaggatcattccctgtaaatacccccatgcgtaacgccccgatcgccatttcgacgtaagccaggtgctgacctctgagctgcgcgagctggtgaaaaaagatctcgccgctgcgatcaattaatcctgcctgcgccatccgctcaggatcgcgcggcatggaaaaatgccgccgtttaccggcggctattgcttattttgcgctaccctggtttttttccagccgggcgaaatactccggtgcaaacgggcgcggatcgacgtcggcaaacggcgcgcgctcaaagtgcgatttcagcgcccaggggaccgtgcagtcaaaaatggtcttgcagctgatgccatttccacggatcgacgggctgtattccggcgtctgggacggatccagctggtgaccgcgaatgccggggattgtcgtaatgctgacgtccccctgcatgcgggtggtcatcgcccacaggatatcgtcgctgtcaaagatgtcgacatcttcatcaaccagaataatattttttagctcggaataggtcgccagcgccagcagcgcggcctgcccctgccggccttcatcggcgggttgacgttttttcacctgcaggatcccgaggaacttaccgccacccgcggtgtgggcgtagacattttgtaaaaagcccggaatggcggcctcgacggcattccagatactggcttccgttggcaggccggcgagggtggtatgctcttcccccggtcccaccagggtctgcagaatcgcattgtttcgcatggtcactgctttgactttgattaccggcagcgacggattagcgccgccgcagtagccaggaaattccggcatcgcgtggccgctattggtgtgctgatcctctctgacgcgcacgccaggcaacagctcaccttcgataacgatctcggcgcgggcgatggctttctccgggacgctgacgccctgaaccagctccaccggacgttgacgcagcgcgccggcgacgcccagctcgttatagccgaacggcgtggtaggggcttcgaagcaggcgccaatatagatggccggatcgagacccatattgatggttatcggcagcggtttgccggcggcctcggccttctggcgaaacacttcgatatggcggccggcggcaagaaacatcgacagctcatcccggccctgaacgcacaagcggtggatggtgacgtcggtcagcgaggcgtcgtcgggatcgctggccagcgccaggcccaggcagaagaaggggccggcgtcgataggggtgttggtgggcgccggaagcagggtgcgcaaatcaaaatccggatcgtcggccagaaagatctgttcctggcagggggcgctgctggccgggacgaccaccggcgcgaccggttttttcaccgccttacccacttcaagggccagctgcgaggcttcgcagcccagcagcagcgcggcccgctggcggctggcgtgcatacccaccagaatgcgcgagtgtggataacccttaatattgttaaacatcatcgccggcccgatgcgagtggggcgcttcacggtgccgcccgcgccgatatggcgataaacaccggccagctcggcgttagggtcaaccggatgatcggtttcgagatactgattgtcatgctgttgcagcagcgcgatggcgtcgcgcagatcctgaatcggtgcggtcatgatgttctccttagcgtatcgatgctcacagtatgcttcgcaggctaatggttatcaattgcatcatttatgctttattgataagctttttcttatctatttgtagggaggagtccgaccatgtccttgcgagcgttacgccattttgtggtcgttgccgaagagttgcatatgcaccgggcggcggagcggttacatatcgcccagcccgcccctggctcttctacacatctgacgctgccgccgagcgaacaagtgtaggtctcggcggtcggcggatatgtagaagaaacagaccggtgaaaaatgaagtaacacgatggta

SEQ ID NO: 181 - DNA, 27830 bp, Unknown
  source: /note="Description of Unknown: MKP2_2161_1 Mutant Bacteria sequence"
gtgacgggctgaaaatggggattcagtctgcgaaatttgcgtttgatggcgaggggttgtcgcatatcacttaccgtttcagaaccgtggatgatccttccgggacctggttcagtaagttcggggtatacgttgcgacatgggctgggtctgcgtggagcgaacagcagatcgcgtatgtcccgccggagaggggaaacacttccgcagcactggcggcaaccgttcaggggggcaagcagagggtgtatttttcggtggaatacacgtcttccgggaatactgtcgctgtcattgtcctggcggaaaatgcaggttctggatgggtctactcggtactcggcaacagcgctcccacacttctgcgcctgggtgctgcaccaggaaacggcggtgacgtgctttacgtctcggcaccgtttgaggctaaggtgtatcgctattttgtgccggaagattattccccggctcagcaattcacgagttttgatgtactgctgtcgactctggtgtaattaaaatcatcccccggcagtctccgggggtatggttaactaaaccttcccgacacagccgccatctcctccgcaatgacctgcagcgctgttttgctgaccagagtcagatcgtcaattcgcgcacggtaaaagcgacctgcaaagggtgtggtatccgccaggtttgaaccaatgccattcaggttgatagtcgccgtcggataggcaattttccccgtccagacgccctcataagcaaggaccccatccagataaaccagccccttttgctgcgtgccatcagccgactcctgatagcggacgctcaggcagtgcagattgccgtcggccagactgccgatgtaatccttaatgctgtagttaatgccacgcacgcacaccgtcagcgccgtgatcaccccagccgtgatggtaggatagacctgaatcagccggttagcggtagtggcgtaactggttgccccaatccccacccagacattactgaaaccatcagcgccagcattcgccggatcgattttcagccagaacgtatgcatgtagtctttcatggccgctgtcggaataaaccccgcaggcaggcgcaggtactggcgcgacgttttatcgaaaaccagcccaccggaagtgctgtcaaagttcagagctaccgaacccacgctggccgggtcatccagaaagcacagatttttgagctgggcaccgggagccaggttcttcgcccctcctgcccagttatgtttcacatcgatcattcccagcgtaccggcattgatggacgggaaataatataattttgacccggtgtcgttcacccagtcggtgctctgttcgaccttacccattatttaacccatcctttatgtttgagaaactggcaaacgaaatttgcgttgacttctgccccgacgtacagcgcgccactcatcagcgtctgtgacggatgcagcgtgtcgtatttcagggaagcaggtgtggtgtcgtcggcgatattctgcacatcggttgcattcgccgggttgtagtggtttttgaagttctgcagcagatcaacgccatcaatttcacagtagtactccggaaaggccgcttttagccctgcgtttatggcatggatacgctgatagccagcagaaccgcgagtttcatcaccgcgggtaaactgagggcagatacacggcagcgcaccaagcggcttcaggtaactgacgatacttttgacgttattcaccacttcgctgacgctggttgtgttgttacgcccgcaggtcaggatcagaatggcctcatcgtgctcaggatacagtacgccagcagggcgattcttcttccacgtcatgagcgccctggcggaaatggagcgagatctgatagtggagaggacacgcgctggactggcggtagcaagagagcaggggcgtatcggcggatgtagccgggtaatgacccctgatgttgtcgattgggcaagccgaatgctggagagcagtgttaaccgataataggtctccaaggtgatcgacggatgtgtgaggactatttataaatatttcccggtcaccagtaaaaatcattgtgttgtgtcggtgtagttgatcgatagacgataactgtattgatctgtattcgagatgaaactactgtgtgtgcaaccagtattgactagggggctaccatgctcctttattcaaattgatgagattattacgaaaagaaataccatcctgagccaaaacatcgtgcacgtgcaagggagtgatttttaatttggtgttgaagtagcatatgacataaatttttatcttataatcgtttattttggtgagttatgcgtaagttttgcttacgcataattattatcagcgtatttattttctgattatctaactagcaatgaaatataatttagattaatatgttattttgcttcttaatagataaaataattctgcgtagttcacaccagattcaagccccctaaaggatgctaatctccttactgcatccaatgatatcagtgagttctctacatttgacatttgagactcatgcttaccaagtattgatatctttctctcaagatgtttacttatatctacataaatagatccagatgattgactccatgatcctgaatccccccagccagcaggtggatactcatatgctattacagacttgggtgaatcagcattttttgtggtcctggtggctgcgattgagcattcataaacccatttatgctcctgatggaatgaaggtacagggatgaaaataatatctggttttatattttcaataagtaagtcaatcgcatttacacatctacttttactggatgaacacaaatcaaaatcctcattatcattaattttatttatgatatgaagagtcgccccggcttcgagcatggcgtttgtaagttctttttttctcgtttcactgctaacatagataccatttctcacatgccactcacctttaattgttactacagcaatgtgaacttctatatcattttctaccgctcttgacattgctcctccgcagcctagctcagcatcatctgcgtgcgggcttataattaaccatttttttgatgtgaagaaatcaatcatttaattaaccccgctcattttaaataccactgccggtgtttttaataaaataaatagatcgaaatataaacatccttttttataataaagaatatccattgcaactcttcgcttgtattttacctcatccctgccagaaacttgccatatcccagttatacccggcgtggactttttataatactcaattttttttccgtacttatctgcttcatattgagatataggccttgggccaacaagtgacatgtttccaaataaaacattaaatagttgaggtaattcatctatgctcgtttttcttatccattttccaaatttagttacacgtgggtcattcttcatgtggcccttagtatgtaattctttcaatatattattttgtatctctattggcaaggttgatatgtctttcattgatgtaaatttataacaattaaacatgcatccatttagcccgattcttttactcctataaataggagggtgtccacttaatgaaataattattgcaacaccaattaagacaggtgaaaccattagtatcagaagtagtgatgcacacaaatcgaaaatccttttgcttttcatgaatcccccgtgcaattatataatgattcaatatgttacaaataaacacatttatacaatagttctataaggcaaatagatcaatggtcgagtaaatggattcatgatttaatcatttaatgcgttgataattatggggaaaattaggttttggtaatcccggctgatgtgggaagggggtattgagcgaagttgcagaatgctggagaacggcgctacccggcagcaggtggctgatgtgacaggcgtggacgtgaaaacaatctacaagtacctcccggcgacttgaagacaaagatttcactacttttcctgatatgttacgtttggcttgatcaattcattcagctttgaaaacagtttggtttgtttgtgatgagtaagaaaataataagttttagagattttctaactattaaccataaccttatgcacatgtccgatacatgggctgatttgtgggcgttgattttttacacacgtttaagtgcgggaaggctgctgtcactccgttacgatgacattgatggttgttcgataatgatacgggaaccgggacatctgaaggcgctacgtgttgaatcaacccctccagtggaggggatcattgctcgtagaagagaacgctatccagaagatgtttttttatttcagagccattctaaccgtgtgaagtaccaacgccggccggtcactataattgctttcaacgccgctttacgtcgcgccgctagatcattaccagacgttaacgtaagcagtagtagcgcgagaaacataccggactaaccgcctgtccagtcgcgtgtggccgatgtgacaggcgtgggggtgaagactatttacaaatatttgccagtacaatacggcgataaaaaatccccttgagcaggcacactcaaggggaaaatactacataacatcattgctgtgtgcgtcttcgcacacccctatcttctaagaaggcgcccaaagcttccagatatttctggtctgagcagttaaaacattggatcggcggcctatgtgataagagggggtgaagacgatttataaatattttccagccggttaagtttgctcacctgcgaaccgtatgcaagagatcgcaggtgaacaatttgctatgaaggcattgccatagctgaaaaattttaacctcgcattgttcgcaaaaccatcaaacagctaaggcctgaaaacactttcagactaaccttactcgttacatcaatgtgttacgtcaatggcgtaaattgatagccagagcctatattgatatgtcgccctgttaaaactactgtatataaaaacagtgttaatctgagcgagtcaattatgcagttttacacgcccgttgagttacgtgagatcatgctgatcccgttgtacagtgaccttgtgcaatgtggttttccaagccctgcacaggattacgttgagcaacgcatcgatctgaacgagttgctcgttaaccaccccagtgcgacgtattttgtcaaagccgccggcgacagcatgaaggatgccggcataggagaaggtgatcttcttgttgtggatagctcaaggacagcagttcatggcgatatcgttatcgctgcagtggatggggaattcaccgttaagaagctgcagctgcatccgcgggttcagcttaacccaatgaaccctgcatattcgccgatagtcgtgggtagcgaggatactctcgatgtgttcggggtcgtaacttacatcatcaaatcggctggctgagatgtttgcactttgcgatgtgaactcattttacgcatcgtgtgagacggtgtttcgtcctgacctgaaagggcggccagtagtcgtcctttccaataacgacggttgtgtgattgctcgttccgctgaggcgaagcccttcgtcataatgggggagccgtacttcaaacaaaaggacatgtttcgccggcacggcattatcgcgtttagtagcaactatgagctctatgccgatatgtccaaccgagtgatgacaacgctggaggaactctctccacgctgcgaaatttacagtattgatgaggcattttgcgacctgacaggagttcggaattgtcgcgaccttaccgactttggcagggaaattcgcgagacggttctgcgcaggacgcacctcacggtcggtgtcggcatagcccagactaaaaccctagcaaagctggccaatcacgcggcgaaacagtggcagcgacagaccggaggagtggtggatctgtctaatcttgaaaggcagaggaagttgatggctttgctgccggtggatgaggtctggggcgtcgggcgccgtattagtaaaaagctggaggccatggggattaaaacggtactgcaactggcggataccgatatccgttttatccggaagcattttaatgtggttctggagcgaactgtgcgggagctgcgcggagagccatgtctcggtcttgaggagttcgcgccggtaaagcaggagattgtctgtagtcgcagctttgggcagcggatttccacctacgaagagatgcgcctggcgatatgcagctacgcctcacgtgcagcggagaaactccgtggtgagcatcagtactgccgctttatctcagcattcgttaaaaccagcccctttgcgctgaatgaaccgtattacgggaacagtgcatcggtaaagctgctaacgccgacccaggacagccgggacatcatcaccgcggcgacaaaatgtctcgatgtaatctggcgagacgggcatcgttaccagaaagcaggagtaatgctgggagatttctacagccagggcgtagcgcagctcaacctgtttgatgccaacgcgccacggaagaacagtgaaaagcttatggaagttctcgaccatctcaacgcgaaggacggaaggggaacgctgtattttgcagggcaggggatccagactgcctggcagatgaagcgtgaaatgctttctccgagatatacaacgcgtattcaagatgtgctagttgtaaaatgataggagttagtatgtaataacaccttgataatatcttatggctaacttaagtgaggtgtcatgtatatggcaaagatagggcgaaatgattcatgctggtgtgggtcaggaaagaaatataaaaaatgtcacttgggaagagaaaaggaaaaaaatatagatcgaggcgatgctaattcagttcttaaactatttacaaatgtaagtaagtgtagtgttcctgatgatttaaaacacgaatgtgagcgcaagatcgttaaggctcatacattatcaaaatcaaatagtctaaaggaaatcgcaaagaatggtcatgtattaggaacaagtaaaggttttgatgcatttgaaaggcataatggtgtgcttagttttgataaaataggaattaacaaagcatcaactttcacaggattctgttcttatcatgataaaatgcttttttcctgcattgaggatgaagagtttatagcaaataacaagcaatgcactatgcttgcttacaggcctttgatgagagaattctatgttaaagaggcaaatctaaaagttttagaggcaagcaggatattcgatagaggatgggacttccaggctcagttggcatgggcaagacaagtgaatgagaatattgaaggtacaatattaagtttaaaggatttgagttatattaaggatgaaattgagtcgtcaatcaaagataatacatttagtgcattaaagaatttaattataaaacttgaggaacccccaaaagtaatggcatgtggcatttatgccccaattgttgatattctaggtaacgaaattcaagaaataacaaaagaagacgcgagacctgaatatataatcacaaatgttttagctttagatggtaatggttacgtgattttttcatggttaccagaagataataacgtaattcaaaagtttattgcatctattaagaaatgctccagacatctcttaggtgacaaacttacaaatcatatcctttcatttatggagaatgtttttgcatcagaggagtggtgggactctcagggggataaacagggatatataaatgagttattgatgcagggagtaagaatgcatgtttatgatttaggacttatttctcatgattataataactacaatgctataacagtaaatgaaataattgaaatttaattaaagaatgtttaatttatattttttaatagttcagcgtattgatttttcacattaccaactgcgcttgaaacagggtgccaagtaaaatggtcggttggcacggcgccgtcgacggctatctcctcagcctctttccctcctatatcctgtctcatccattccctggctgcttctggtgacaacaccagcggccggcggtcgtgaatatctacgagcccttgatctgctgcggcggtcactatcaaaaacccttcggcttcgtcgccgcgctcaaaaggcacgctaccgatcgccgccatgaagattggctggccgtcggcgcgatgaataaagtaaggctgcttcttgtctccttcgcgcttccattcaaaccagccatcggcaaaacatatcgcacgaccgtgctgccacagaggtttaaactcactgctgttggctgcggtctcaaccctggcattaatcaacggtggtttatcccaccacccgggtgcgtaaccccagtgaaccggatcgaggtgcagctgttcgtctcgttcgctcaggagcaaaactttagtccccggcgccacgttataacgcccaatcggctcagggtcgtatgcgatgtcgcgctcggcttcatccgctaggtatgccagatattcttcatgggtttgggattgagcaaatcgtccgcacatggttacctccagtcttcagactgaaagtatagaaggtgtggaggaaacgtaggaggggaactccgacagccatctaactgatgactgtcggagatgacgtcaaaaacaatgtgtacaaaattgtgtattaaaatcaggaaaattgcacaatttaaaagtttaactcattgtttttaattgacaaaaataattattttgtaggtgctatcgtagggcataccattccttatgtttcagtgggttagccatggcaccgagaatatcggaaatcacgttgacaataatcaccagcgcgccaatcaccatcactccggcggagatcgccgcgtagtcctgctggcgaatagcgttgatcagccagcggcctagtccaggccagctgaacaccatctcagtgatcatcgccagggtgagcatggtggaaaactgcaggccgagacgcgggatcaccggcggcagggcgttgtgcagcacatggcgcagtagaattttgcgtcgcgacacgccgcgggtggcggccgcttttacatagttagtgtcatacacctcgctggtgctaatgcgcatcaggcggatcacttcagtggtgggggcgaccgccagggtcaataccggcagcaccatatgccgggcggcgctgacgatcatctcatggcgccacggcgagtccgaaagccaggcgtcgatcagcgcgaaaccggtgacatttttcacctcatacagcagatcgaagcgaccggagaccggaagccagccgagggtcagggaaaagaagagggtcaggagcagcgccagccagaagaccgggatcgagaaaccgaccagcgcaacggcgctgatcagggtatcgggccatttattgcgcattacgccggcgatcatccccaccggaatgcctatcagcagggcaaagccgaaggcgaggatgcacagctccatggtcgccgggaaaacctcgcgcaactgctcagaaatcagctggccgttaatgctggagacgccgaaatcccagtgcagcaccccttcaaaccagaacagccacgcattccacagagaagcgccctgcagtggggcatgaggggtgaaatagctcaggctgaaaccgacaaaggtcagaaaaaagagggtgatcagcagcagcagcaggcggcgcagggtaaaaataatcatggctttttcacctcttcggtattttcccgcgatacgccagcgaacgaagcgttaccgaaagggctgagcaccaggcctttcatatcatagcggtaggcctgcagccgcagcgacgaggccagcggcaggaccggcagttcgcgggcgaggatccgctgcgcctctttgtaagcgtccatccgcgaggagagctgctgcgagagcagcgctttttgcagcacgtcgtcaaactcccggttacaccagtgggcaaagttggtttgcgaggcgatggccgcgcagctcagcagcggtcggaagaaactgtccggatcgttactgtccgtcgcccagccggagagcgtcaggtcgtggctcatatccatcaggcgcgcctcctggaaacgtccctctaccggcacaataatcaccttaacgccaatctgcgccatatccgcctggataagctccgccgttttcagcgggctgggattccacgcctgcgagctggtgggcacccacagcttgagggtcaggttttccagccccagggctttcaggcgggcgcgggcctcctgcggattatattcggtaattttagcgtcattatcgtaggcccacgaggcccgcggcagcatggacgccgccgtctccgcggtgccatagtagatagactgcatcaggcgctggttgttaatcgccagcgccagggcatggcgcacctcagggttatccagcggcggcttggcggtgttgaaggccagccaggcgatgttcattcccgggcgcagcgtcaggcgcaggcgcgggtcgtcacgcaggatcgtcaactggctggcggctggccaggccagcacgtcgcattctccggtcagcagtttcgacaggcggccggtgccgccggagccaaggtcgaccaccacctggggcatcaacggtttgccgcgccagtagccggggtggcgctgcaggcgaacatattgtccggagcggtaatcggatagctggaacgggccggtgccaaccggctggcgatccagttgctcctggcggtcgtcctgcgttaagcgggcggcatattcggcagaggtaattgacgcatagtgggtggccagatgccagaggaacgaggcgtccggccgcttgaggcgaaactccacggtctgattatccagcttgcggacgctctccacgctgtcagcaaactgcagactgtcgaagtaggggaagctgctgccgttgacgttgtgccacggatggtcgcggttaaaaatacggccaaaggtaaaaatgacgtcatcggcattaaagtcccgcgtcggggtaaaccacgccgtgcgttgaaacgggacgtggcggcgcaggtgaaagcggtaggtggcgccgttatcgagaacttcccagctctccgccagctcggggaccagccggtaggtatagggatcgacgtcaagcagacgatcgtagagctgagcggccagcgtatcgacaatcaggccgctgctgactttctgcgggttaaaggtattaacctggccgctgacgcaatagacgaaaccgctatcgcggatatcggcgcggtcggggagcgcaggggcggcaaaagctggcccacacagcagggaaacggctgccaggagagatgacaatttcaggcgcatattttctgtttgattatagagctgaactctatcttattaagattaatagacattcaccaccgccttcaacaagcctgagggataatgcggttaccgggtgcgtatagtattcagtcaattgattaaaatagtcgcggaaccgagtctgtatagtgaaacatggtaactttttatcgccgatatcgccagtcagctctgtttggccgcggttgaccaaacggcgacgacgtgcggacgctagagaatagattcagtatagcggggagaaagccgatgacccgacgggcgactagccatacccgtcgggtgtgatacagggggagcgtgtttcgattattgtgacagtgtcactttatgatagtccatattctgcaggtcctccagcagcccggggccaaccggctgccactgcaagcgctcgcgggtccatgccgagctggcgcgcaggtcaagggcggtaaacggcgcaaaccagccgaaccaggcgtcgacctgcgagtcatccaggtgggtcagcggcaggtttaatccgtgggcaattaccgcggcaatatcgcgtaacgcgatcccctcttcggccaccgcatgatagcgctcgcctgccgcgccctgaagcagcgcgctgacatacagacgtgcgacgtcatcgacatgggcggctgaccagcggttgcttccctcgccgcgcagggctaccgccccgttggcgaccgcgcgttcgatgtagcaggtcagcagtccctgacgcacggtgtcatgcacctgcggtaagcggaccaccctgacatccactcccgcctccagcaactgctggccggcgagctctgaggcggtgcgcgggctggggtgccctgagttgaagaacgactcccgggccggggcgccgctcccgtcgtcgcccatcagcgtgccggaggtgatcaccagcggccgcgtgctgcctcgcagcgcctggcccagggccaggatcgcctggcggtctttctcgcagttagcggcaaagcggctgaagtcgtggtcgaaggcggtatggatcaccgcgtcggcgttcccgacgccagccagcagcgactccggggcatccagcgtgccgcgatgcacctcggcgccggccgccttcagggcctgtgcggtgctttcgctgcgcgcgaggccgataacctgatggcccgacgcctgcagcgccggaagaatacgtgagccgataaatccgctcgcgccggtaagaaatatacgcatcatggatctcctgaatgggtttcaggcgtatcctacctgcgatgtcatactataaaagtagagacattatcggggtataaattctaacaggcagaacccacaggcagatgatgaacacttctgacaaccatgctttaggcgattttctccgcgcccgccgccagcgtctcgatccggcaacgtttggcttcccggcgggacgccggcgcaccccggggctgcgccgcgaagaggtcgcgcagctcgccagcatcagcccgacctggtatacctggcttgaacaggggcgcggcggggcgccttcccgcgaggtgctggagcggatcgcccgcggtctgcggctgaccaccccggagcgcgagcatctgtttattctcgcctttggccatccgccgcagacgcgtctgacggtgacggatgatatgacgccgcggctgcagcgggtgcttgacgctttcaccattccggcgattatccgcaccgccagctgggacgtcatcgcctggaacgcgccggcggccagggtgctgaccgactacagccaactgccgctggcggagcgcaacgtgctgcgccgcctgtttacccggccggaggcccgctgcactctggaggactggcagagggtggggcagcttatcgtcaacgccttccgcgccgacgtcacgcggatgggcgccacgaaagaaactgaccagttgatcgccgagctcagccagcagagcgtcgagttcgcccgtttctggcaaagccatgacgtcgccggtcatggagaaggctataagcgcattaaccacccgcagatgggtccgctcgacctggaatttacctcctttgccgtggagggccgtcccgatctttccctgctggtctttaatccggcaacgactgagagccagcggaaaattcacggtttacttcagggggcgggatccgcgccggaggagagctgaggggtaaattcatacagcaccagcgcattgctctgcagcgagtcgatccgcagccaatagccatcgagcctggcttcatccacgctgagcgccggacgggcctgatgcatcagccactgataatcctcggcgtcagggccgctgcggctgcgaaaggcgtccaccagcgggaacaacgcgccgtggtgctgatcgaacaggtgctgtttgatgcgccagctgccatccaggccctgcagccgcacgctgtagggctggctgaagcgctggataaaggccgcttcgctggagagccagggattgtagaccaccgtattgcgcagcagcagctggtagtgaccctggtggtggagcagcagcaggtttttatcgtgaaccaggatctcgccgcgcagccgccgccagagccagagtacccagtaaaccgggcgcggaaggccgtgcagatagtgcagcgccaggctggaggtatcgagcttgccgttggcgcgagcttcgccctggaggcctgaatttaaccagaagcccgccagccagacctggtccgccacccccagcagattatccatcagcagcgcgccgcgaaaaaagcggccgttggtatcccgcgtatcgccggtcagcgtattccaggagagcagccacagcggcaggttgagctgacgctggcgcagggcgctgtggatctgccgcaacttgtgcagcggataatgttcactggaggccaggcggctgctgtcaacctgggccagatccagctgttcgttggcatctgcctggcaggcgagaaaatccgcctctgccagcagcggcgagtggaacagcggatcgttcccgggatcgctgggagcaaagcggtgccagatccccagctgcggctgcggcagcaggcgatgaaggaccccgcgctgctgccgccaggcggcctggcgcgcagcttcgctggcctgcggcgaccagtgccagacaaagcgccagctgttgagcgtggctggcggaaaatggttggcggcgagctgcaggaagcgctgcagcaggtcactgcgggtggtgacgccggtgtgcaggatcacctgccagcccatcgccgccagccagctaaaaatctgctgcaggttgtaccagcaggcgtagccggccatctgcggatcgtcccagccggtaccgaacagccgactgctgagaaagggatcgttgatatcgatggcatacaccggcagggcgtggtgcagctgttcgagttcccggcgcacatcttcgcgcagcagatcgtccagttcgcgcacggtcaccaccatccgggtatggcgcagcgctgcggggcgcgctggacgatcgcgcagattgatctcccgggtctgcggtgggttgatcggcagggggggactttcccggtcgcgtggttccggctcattgagtcgcgcatacagccggtcgaccgccaccggctgccagcgatcggcctgcggcgggcgcggtcgggcaagctccagaggatgctgttcacgatactggcgcggcgtcacgccgtgctggcgcttaaacaaatcgctcatcattcgcgtactggcgaatccctgttcgcgggcgatttgctggacggttttgcgggtggttaatagctggtcggcggcgtggcgcaggcgcagcgcggtgaggtactggacaaaactaaccccgacctctttgcgaaataagcgtgacagccaggcctcggagacaaattccgcggccgccacctcctgcaacgagaggcgacgctgatagttagcgtcgatccgcgccaccacgctggctattctccggctccatttttcggtatcgcgccggggcgtggaggcgatgggctggctaaagcgcgtggccagcagcagcgctatctcactcagccagcggttggcctccagtcggtaatggcctggatgattgaccaggccgctcaccagcagctggcgcatcaggcggcgcaggccgtcatcggcatcccgggtgcgcggcgttatctggtaatcgacggcaaaaaaggcattatcgaggcgggccagccagctggcggagagggtgaggatcatcacggcgttggccccggcgctgcgcaggctccagcgacggttgcggttaacgatcgccagcccgtcggcggcgagcggctgcgacgcaccttccgccaccgccagatttacgcttccctccagcacccacagcagcgtcagcagatcgctttccggctgggtcagctgacgcacatcgcgtacggtgacgctaaagtcgcctgaatggtgctccacatggctctcctctgtagacaaaaaacaaccggttgttttttgtcataaccgatatgtatgaaaaacactcattgatttttcgtcaatataaaacaaaaaagcgcgcctgcaagctgaggcacccgcataaactcgaaggtgtcgtgcaaacacaacacaggaataacaaaaatgacacatccgttgctagaagcattgcaggttaacgaggcgcaatttatcgctctgcgtcgtcggttccaccagcagccggagatcggctttgaagagcaccagaccagcagcgaggtcgcccgactgcttggcgagtggggatacgaggttcaccgcggcctggcgggcaccggagtggtgggcacgctgcgcgtcggcgaggggaaaaaacgccttggcctgcgggcggatatggatgccctgccgatgcaggagcggagcggtaagccgtgggcaagccaggttgaagggcgctttcacggctgcggccatgacgggcacaccaccacgctgctctacgcagctgaatatctggcgcgcacccgccagtttaccggcacgctgcagctgattttccagcccgcggaagagttgctgtacggcgggcgggtaatggtcgaggacggtctgtttgatcagttcccctgcgacgccatcttcggcctgcacaatatgccgggtcagccgttgggcaagatcggcctgcgcgacggggcgatgatggcctcctccgatacgctgcatattgaagtgaagggcgttggcggccacggcgcggtgccggagcatacggtggatgccacgctggtggcctgccatattaccctcgcgctacagtccattgtctcgcgcaatatcaccccgtttgaaccggcggtggtgacagtcggcagcatccaggccggtcatgcgcccaatatcattaacgatcacgtgctgatgaagctcacggtgcgcaccctcaatgagcaggtgcgcgagaccgtgctgcagcggatccatgatatcgccgtggcccaggcggagagcttcaatgccaccgccacgctgacccacgtcaacggcagtccggtgttgcgtaacgatccggcgacgaacgccatggtgcgggaggtggcgacagcgctgtttggcgcagagcaggtgggcgaggtgaagccgtttatgggcagtgaagattttgccttcatgctggagcagcacccgcatggcagctatttcaccatcggcgccggcgatgagccggatcgctgcatggtgcataacccggggtatgacttcaacgacgcgctgttgctgaccggcgcggcgctgtggtgtggcctgacggaacgctatctgcgctaatcacgagaaacgggagggccatgcgatgagcactgtcacaataagcgacaccccgtttgtcggcaacgatcgcctgctggtggggattgtgttaagcgttttaaccttctggctgttcgcccagtcggtgattaacgtggtgccggcgatgaaaagcagccttgatatctctcttgaaaccttaactctggccgtcagtctcagcgcgctgttcagcggctgcttcgtggtcgccagcggcggcctggcggacaagtttggccggatgcggatgaccaccctcgggctggggctgagtatcgtcggcagcgccatgctggtggtcgctcagggaccggggctgttcctggccggccgggtgctgcaggggctgtcggcagcctgcattatgccggcgacgctggcgctgattaagacctggtatgaggggcgtgcgcggcagcgggcggtcagcttctgggtcatcggctcgtggggcggcagcggtctctgttccttcgtcggcggggctatcgccaccggtctgggctggcgctggatcttcgtcttctcgatcgccgttgccctgctggcgctgtttttgctgcgcggcacgccggagagccgcagcgccagcgccagccagcataagctggacgtcggcggtctgctgagcctgattgttgcgctggtgctggtgaatctgtttatcagcaagggccacggctggggctggagcagcccgctgtcgttgaccatgctggccggggcgctggcggcggggacggtatttatccgcaacggcatgcgcaaaggcgaggcggcgctgattgattttgcgctgttccgcaatcgggcctacggtgcggcagtgctgtcgaactttctgctcaatggggcgattggcaccatgatgatcgccagcatctggctgcagcaagggcaccacctgacgccgctggagagcgggatgatgaccctcggctatctggtgaccgtcctggcgatgatccgggtcggcgagaagctgctgcagcgctatggcgcccggctgccgatgatggccggtccggtgttgaccgctatcgccatcgcgctgatatcctgcacctttctcgaaaaggcgctgtatatcggggtggtgttcgccagcaacgtgctgtttggcctcggactgggctgctacgccacgccatcgacggataccgcggtggccaatgccccggagaacaaaatcggcgtcgcctcggggatctataagatgggcagctcgctgggcggggcgatgggtatcgccgtgacagcgtcacttttcgcgctgtttttaccgctgggcatggcccatgccgcccagtatgccctgtggtttaacgccgtcttatgtctgggggcgatggcggtgagcgcgctgctgctgccgcgcgcctctcacagctgatgctttttcagcagcgcgcggagctggtgataggttaatcccagcagctccgccgcctgcttctgatgatacttcgcctgctccagactccgctgcagcaggcgtttttcctgctggaactggaaatcgcgcagatccagcggtagcgcgggcagctcatcgccgggcgcggcttccggcggagagccgggggactgacgaaaagggttaataataatcgcgtccagctcatgttcgctgtcgccgtggcgatacaccgagcgctcaaccacgttcttcagttcgcgaatattccccggccagcggtagccgagcagcgtcgcggtcgctcgttcgctaaagccgggaaacagcggcagaccgagttcgcggcacatctggatggcaaactggttggcgagcaacatgatgtcgctctgccggtcgcgcagcggggggagctgtaccacgtcgaaggccaggcggtcgagcaggtcggcgcgaaaatgaccttcctcgaccatctgcggcaggtcagcgttggtggcgcacaccagccggacgttaacctgcagcggctggctgccgcccacgcgctccagctcgccatattcaatcactcttaacagcttctcctgcaccagcattggggctgtcgccagctcatcgagaaacagcgtcccgcagtcggcgcgctcgaagcgcccgggatggcgcttgctggccccggtgaaagccccggcttcgtggccgaacagctccgagtcgagcagattatcgttcagcgccgcgcagttcagcgagataaacggcccctgccagcggctggagaggtagtggagacggttagcaataagctctttcccggtgccgcgctcgccgatgaccagcaccggtttatccagcggggccagccgggaaacctgttccagcacctcgagaaagctgttggcctcgcccagcagattatccttgtactgcgccatgatgaatttcgccattaagtagtgtaattaaccaggtgactgtagcaatgcccagcacgtttcgcaaccaccctgtttaaaatcaataagataaaaagttggcacgccatttgtattagctaagccacaggtgaatgcctgaaaccagaactatgaggattgaaattatgggtattttttctcgttttgccgacatcgtgaacgccaacatcaactccctgctggagaaagcggaggacccgcaaaagctggtgcgtctgatgatccaggagatggaagacacgctggttgaggtgcgttcgacatcggcccgcgcgctggcggaaaagaaacagctgtcccgtcgtattgagcaggcggtcgcccagcaggcggaatggcaggaaaaagccgagctggccctgcgcaaagagaaagaggatctggcccgggcggcgctgatcgaaaaacaaaagctgaccgaccttatcgctcagttggatcatgaagtgcagctggtggatgaaaccctggcgcggatgaaaaaagagattggcgagctggagaacaaactcagcgaaacccgcgcccgtcagcaggcgctggcgctgcgccatcaggcggcgagttcgtcccgcgatgtgcgtcgccagctggacagcggtaaactggatgaggcgatggcgcgctttgaatcctttgagcgtcgcatcgatcagatggaagcggaagcggagagccaccgctttggcaagcagcagacgctggatcagcagtttgccgaactgaaagcggacgatgaaatcagcgaggagctggcggcgttgaaagccaaaatgaatcagtccaaccagtaagtatgattgcgcggcgcggcgttgcgccgcggctcaccccctgtaaggagtacacatgagcatgctttttctcgccattccgctgacgctgtttgtgctgtttgttctgccggtctggctgtggctgcactacaacaatcgcggcgccaacggcagtctgacgcaaaatgagcagcaacggctgctgcagttgaccgatgacgcgaagcggatgcgcgaacgcattcaggcgctggaagcgatcctggacgccgaacatccgaactggagggacaaataatggccgggctggatctgaataaaaaactgtggcgtatcccgcagcgcgggatggtaaagggcgtctgcgcgggcattgctcagcatcttgatgtcccggtgaagctggtgcgcctgattaccgtgctggcgatgattttcggcctctttttctttgtcctggtggcctacatcattttgacttttgctctggatccgataccggacagcgagctgtacggtcataaagcgccgagcaatggcgatctgctggccgccgtggatgccgaactggcctccggtgaacagcgtctgcgtgaaatggagcggtatgtgacctccgacacctttacgctgcgcagccgctttcgccagctgtaaaccctgtttctaacgaatgaggcaacgcatgaatagcaaatggcaacgcgccgggcagcaggtgaaacccggtctgaaaatcgtcggtaagctggcgctgctgaccgcgctgcgttatggcccggcgggcgttgccggctgggcggttaaatcggtcgcgcgtcggccgctgaaaatgctgctggcggtggcgctggagccgctgctcagcaggctggccaaccgcgtcacgcgcgggatgaaataatgccgccgtggggaaggcgcaaaaggattaacgttgtcctgcttatccccggcagatagcttatgatgacgagacataccttcagggcataacggactggcgatgaagcgactgaaaactgaattgaatgcgctggtcaaccgcggggttgaccggcatttacgtctggcggtgaccggcctgagccggagcggtaaaacggcgtttatcaccgcgctggtcaaccagctgttgaatatccacaccggcgcccgcctgccgctgctgagcgccgcacgcgaagagcggctgctcggcgtcaagcgcgtgccgcagcgggactttggcattccccgattcacctacgacgaagggctggcccagctgtacggccagccccccatgtggccaaccccgacgcgcggggtaagcgagatccgtctcgcgctgcgctaccgttcgaatgactccctgctgcgccattttaaagatacctccacgctgtatctggagattgtcgactatccgggcgagtggctgctcgacctgccgatgctggcgcaggattatctgagctggtcgcgacagatgaccgggctcctgcagggacagcgtgcggagtggtcggcccgctggcggcagctgtgcgccgggctggatccgctggcccctgccgacgaggctcggctggcggatatcgctgccgcctggacggactatctccacgcctgtaagcgcgaagggctgcactttatccaacccgggcgctttgtcctgcccggagaaatggcgggcgcgccggcgctgcagtttttcccgtggcccgacgtcgacgccgtcggcgaagccaagctggcgcaggccgataaacacagcaacgccggcatgctgcgcgaacgttacaaatactattgcgaaagggtggtgaaggggttctacaaagagcacttcctgcgcttcgaccggcagattgtgctggtggactgtctgcagccgctcaacagcgggccgcaggcgtttaacgatatgcgtctggcattgacccagctgatgcaaagtttccattacgggcagcgcaccttgtttcgccggttgttctcgcccgtcatcgacaagctgctgtttgccgccaccaaagccgatcacgtcacgatcgatcagcacagcaatatggtgtcgctcctgcagcaactgattcaggacgcgtggcagaacgccgcctttgaagggatcagtatggattgtctggggctggcgtccattcaggcgacccagagcgggctgattgaggtgaatggcgagaaaattcccgccctgcgcggcaatcgcctgagcgacggccagccgttgaccatctatcccggtgaggtgccggcgcgcctgccgggtcaggccttctggcagcagcagggatttcagtttgaaaactttcgtccgcaggtcatggatgtcgatcggcctttgccgcacattcgtctcgacgcggcgctggaatttttgattggagataaactgcgatgagcgaaccgttaaaaccgcggattgattttgatgggccgctgcaagcggagaaaattccgccgctgaaaggcgctcgcgccttcgacaccctggaggcggacaacttcgcgccagcgcggctggtgaccggcgaagaggaagagggggcggcggaagcggtggtggagtcggtcctgcgacccaaacgcagcctgtggcggcggatggtcagcgccggactggcgatcttcggcgtcagcgtcgtggcgcaaggcgtgcaatggacggctaacgcctggcagacccaggactggattgcgctgggcggctgcgtcgccggggcgctgatcgtcggagccggcgtcggatctgtagccaccgagtggcgccgtctgtggcgactgcgccagcgcgcccacgaacgcgatgaagcgcgcgatatgctgcacagtcacgcggtcggtaaagcgaaagccttttgtgagaagctggcgcagcaggccgggctggatcagtcgcatccggcgctgcagcgctggtatgccgcgatccacgaaacgcaaagcgatcgcgaagtggtgagcctttatgcgcagctggtgcagccggtgctcgatgcccaggcgcggcgggaaatcagccgttcggcggcggagtcgacgctgatgattgccgtcagcccgctggcgctggtggatatggcgtttatcgcctggcggaacctgcggctgatcaaccgaattgccacgttgtacggcattgagctcgggtattacagccgtctgcgactgtttcgcctggtgttgctcaatatcgctttcgctggcgccagcgaactggtgcgcgaggtggggatggactggatgtcgcaggatctggcggcccggctgtcggcgcgcgccgcgcagggcattggcgccggtctgctgaccgcccgtctcgggatcaaggcgatggagctgtgccgcccgctgccgtggatcgccgatgataaaccgcgactcggcgattttcgtcgcgagctgattgggcagttgaaagagaccctgcagaaaagcaaaacccgcccggagaagtaacctccgctcagagacatcgccgggcggcggcttcgccttgcccggccttcgacgtcaagctctggcacgcgcaccctggcaatattcgattaggcgcattccgccgccagccactcgctgaaggcgcgaaagcgcgggcgggaacggttctcctgcggacaaatcaggtcatagccaaagggcgagggcgcttcattttcagacaaggccaccagcctgccggcgtcgagcagcggctggatcagcgttttacgccccatcaccacgccgagtccattaagcgccatctcgatggccagcgagtggttattcaccgcgtaataccggccgtcaaaaggtaacgcctgtccgctgtgctggcaccacaggcgccattccgcaaattgatcctgtacgtcggtggattcgcacgcatggatccagacgagcgccgccgggtcgccgccgctcagcggacgatactgctggcgataacgcggggagcagaccgggagcaaactttccgccatcagccgctgttgataaagatcgggatagcgcgtggcgccgtagtaaattgccagatccacccgctcctcgttaaaatccatcaccccggcgcgcacgcgaaactgcagattcagtcccggccattgcgtctgaaagcgcggcagacgcggcattagccacagatgggccagcgtcggcgcaataccaatatgcagcgtgccgcgcagatcctgatcgcgaatatcctcaatttcatcgttaatcgcccgcagcgaatggcttaacgtcgccagcagccgcttaccttcctctgtcagcgccagtttacgcgtcatgcggataaacaggcgaaacccgatgtgcatctccagcctgcggatccgatggctgaccgctccctgggttaggttcatttcatgcgcggcaagggtaaagctcaggtgatgggcggtcacctcaaaggtctgcagcagcgcaaggatgctttgttgctcaagcacagattgtctcccttatgcattaattgagttcatgcataggccgatttaattcgtttgttaggccagttttgccggttttaaatagttatatcgtaactaaaccgaggtataccatgtcaggactcaaaattgtggtgattggcggtggctccagctacaccccggaactgattgaaggtttgctcaaccgctatcacgaaatgccggtcgcttcgctatggctggtggacattgaagagggcaaagagaaagtcgagattatcgccggactggcgcggcgaatgatcgccaaagccgggctgactattgaagtggtggccacccttgaccgggaaagcgcgctgcgcgatgccgatttcgtctgctcgcagtttcgcgccggctgccttgacgcccggatcagcgatgaacgtatctccctcaagtatggcttgatcggccaggagaccaatggccttggcggcttcgccaacgcctgtcgcaccattcccatcgccctggagatcgctgccgatatggagcgactgtgtcccgacgcctggctgctgaactttaccaacccgtcggggatggtgaccgaagcgatcctgcgccacagccgcatcaaagccgtcggcctgtgtaacgtgccggtgattatgcaaaaagggataaccactctgctgcaatgcgctgacgaaaaagaggtggtgatgcaggtcgccggcctgaaccactttatcttcgtgcgccagatcctgcacaaaggtaaagaatggctgccggaggtgatagccgagatcaacgccggtcgggatccgctggtgccgcgcaacatttcgccgttccgttggccgtcgcatctgctgcagggcttaggcatgatcccctgcgcctatctgcgttattactacatgaaagacgatctgctgcgccaggagctggcggaggcgggcggcgaaggaacccgcggggaagtggttaagcagctggaaaaaatcttgtttgaccagtaccgcgacccgcacctggcggtcaaaccgaaggcgctggaagggcgcggcggccagtactattccgaggcggcctgcgagctgatgaatgccatctacaacgacaagcggattatcatgcacgtcaacacgcgtaataacggcgccatcaatggcctgccggatgactgcgcggtagaggtcagctcgctgattaccgcttctggtccgctacctctcaatgtggcgccgttcccggaagataccctgcgtttgctgcagctgatgaaatcatttgaacggctgactatcgaggccgcgctcaccggcaaccgccataccgcatggcgtgctctgatgctgaatccgctgatcgtcagcggcgagaagctcgaactggcgttggatgaggtgatcgctgagaaccgtcagtggctgcctgctttccacgcctgacccaagactcaccggccgcctggccggtgatttaaccactgaccgtctgactttacgccacagcgcccatttttccgccacactgtcaataattgttgacagttagcttcccgaaaacccattcctggcctattattctcccgtcattggcacttttagggtgaacactcccatgcgtcttgaagtcttttgtgaagaccgtctcggtctgactcgtgaattgctcgatttgctggtgctgcgtggtattgacctgcgcggtatcgatattgaccctattggccgaatttacctcaatttcgccgaactggaattcgccacgttcagcagcctgatggctgagatccgccgtatcgccggcgtgacggacgtgcgcaccgtgccgtggatgccgtctgaacgtgaacacctggcgctcagcgcgctgctggtagcgatgccggagccggtgctgtcgctggataccaaaggtcgggtggaactggcgaaccccgccagctgcctgctgtttggccaaagccaggcgaagctgcgtaaccacccggtggcccagctgatcgccgattttaacgttcagcgctggctggagagcagcccgcaggagacgcatgcggagcatgtggtggtgaatgggcagaactacctgctggaagtgactccggtctatctggaaggcgagcataacgagcgagtgctgaccggcgccgtggcaatgttgcgctcaaccgtgcgcatgggacgccagctgcagaccatgaccagccaggataccagcgccttcagtcagatcctcgcggtggggccgaaaatgcgccacgtggtggagcaagcgcgcaagctggcgatgctcagcgcgccgctgctgattgtcggcgacaccggcaccggtaaagatctgctggcccatgcctgccatctggccagtccgcgggcgggcaaaccctatctggcgctcaactgtggctccattcccgaggacgcggtcgagagcgagctgtttggcgacgcgctgcagggcaagaagggcttctttgagcaggccaacggcggctcggtgctgctggatgaaattggcgagatgtcgccgcgcatgcagaccaagctgctgcgctttctcaacgacggcaccttccgccgcgttggcgaggatcatgaagtgcacgtcgatgtgcgggtgatctgcgcgacgcagaaaaacctgatcgagctggtgcagaaagggcttttccgcgaagatctctactatcgcctcaacgtcctgacgctgtatctgccgccgctgcgcgattgcccgcaggacatcatgccgctgacggagctgttcgtggcccgctttgccgacgagcaggggatcccgcggccgaagctctctgccgatctcagtacggtgcttacccgctacagctggcccggcaacgtccgccagctgaagaatgccgtctatcgcgcactgacccagctggaaggatttgagctgcgtccacaggacattctgctgccggaccatgac

SEQ ID NO: 182 - DNA, 27444 bp, Unknown
  source: /note="Description of Unknown: MKP2_2161_1 Mutant Bacteria sequence"
aacggacctataatgtcgatgcccgactgaccgttgatactgaagtggttgatcgcccattttgtgtggttgatggcgtcaatggtgccgccaccgccgcctccggcccgggcagcaggctgcgcgcagccagttaacagcagcaaccccgccagcagcgggctgattaatgcagatttcattggactctccctatcggtttgagggtaatgaagagaggggtgtactcagccagaccaggcttttcattctgaaggtctctcactggtttttacgtcggcaagccacttcttcattacccagtcttcacgagcgtcatccagaagaagaccctggcgtgtcgcctccaccatgccctggtaacaggccgaaaacagtgactgtcttgagtcaaacatgcccgcaggcggagcacagtgcgacaacatgacgatgacatcgctgatacacatcagatgctcaagctggcgatcgctgagttctatttttggcgccttttcatcgcgttccggcgggagaccactgcccttgatgcctttcgcctggccgtcaagatcctgccacgcccaaaacagggccggacgcatcaatggctcttgctgctcgtcactgagaatgtgcgtaaacaacagcggaaatacccgggtatcgtaaaagcgtaaaattccgctgcgcccttcctgcagaatatccatacactgcgtgagccagttcgctagcgccgaaaagggccaatatgtgcagaacaggagcagcggcgcctggatggcaagttgctggctgatatcctgtaaccagcgcatttgctcaagatcatcaagcgtaaagcgcgccaccagcggagcatcatcgacaataaatgcttccggaagtccatgaaaaagcgactgccactcaactgacagcgaattcagcgccggaataacggaaaaatccacccccgcctgatcgataatgacatgcagataatccgttccgaaagcccgacaggttccggcgacctcctcaatccattgtctggtcatctatgcctcccgcggcacgaagccctgcgccagcgcctgggcttttttaaggcactctttacacaccgatgccggtagctcaggcaagggaaactcctcgctgaccggcccctgcaaatcatgctgccccttaaggctaatcacccccggtccgtggatctgtacctctccctgcggggtaagacggatatatgcgccgccgcaacccagggtgatgccatttttagccgtcaactgcagatgcccctgggttgactggacggtgatatcttttagcgcggtcagcgatagaatatcgccgtgcgactctacttgcagcggacctttggcggagaccagcctcatcccctcctgttgcgccagcagtgaaatagcctggctggcattcagagaacagcgctgtgccgtggtgatgttgacctctcccaggctctgcagatacagcccgttaccgctgtgcaggagggttgtttccggcgtgactgcggcaatcccctgcggggccgacatcagcaatgtcggctgtttaagatcgctggcgcctgtggtcagtgcgcttaatgggccggtgtctgggataacattatgatgggtttgcgtaatgcttccccattccgtgacctgattcaccgcacctttcagcaaactgaccgccggctccatcgccagcacctgcccctgagcctgcacttgtccgtccgcgctgataaatatccctttctgtgcccggatagcgccccagctgtcggttctcagctcaaagccttcgccgcgcggctgcttttcagcatccacgagatggccgaggttcagctggctcttaccgccgtactccgtgctgaccttgatatgttctttcccgcgctcatcgtcgaggcggattttgttgttggccggggtgcgcaggacgttacgtttgtcattgcgaatggtgacgtggtcgccgtgcgccgagtcgtgcagcacgcccgcgatatacggccggtcggggttaccatcctcaaagccaatcgccacctccgtccccgccagcagcggcaggtgcaggccgtaggtgtctccggcatacggccgcgactgacggacccacaggctctcgaacccggtttcccagcgcgcccgatcaaacaacatattcacccggtagcgtccgtgtttgtcgatatgcccgtaggtgtcgttttcccgggtgctggtcacgcgggccggcagcgtcccggccatcaccggacgcgcgccgggctcaggccggtagccgacgtccgggctgtccggtatgccggcaaactccaccgcaaagtcggcatcgcgccgggcgtggctgtgcatcgccgtgatgagcacgccatcagcaaactccccggccacctcctctccgccggtgaccttcagcacctgtcccgggcagagcgtcgggcagctggtggtggcctgcatccgggtctggccgttaagataacgctcatgccgaagccgggcgtaaaacgccccggactccggcgccggatggcggtcatggacattccccgcggtcaggtagttatctccccagtggtaagcctcaccaaaggtggtggtctccccgcgggtgacatccacctgcgcgttcatgtccgccgtcgcctcgcggtagttgtagtcgcgggtactgacctgctgctccacaacgcggtggcgacatgccatctcccacaccgcgtccaccccggccgactgctgccctgacggcgggaccgaaggcaacgtcagccccttctcatagccctgctgactgtcgcagaactcagcgacgtcgatgtgcagccgcgtgtcggcggtaaagcgaaaccagatccccacctcacccagcagacgggtgataaagcgcaggtcatcctcgccgtactgcatcacctgctcgcggcgcggatacgtttttgtcagcgagaacagaaaatcctgaccgcgcaggccgtggcgctcgcggaggattttttccacaatctgcggaacggactggtcctggtaaatggcgttctggtgcgagcggttaagcagcgccaggcgcggctgaagcgtcagcgcgtagtgcgtttcatccctggaggtactgagccgttcaaaccccgtcaccacgccctggatcacccgcacgggttgctgaacattgatgccgaagccctgagccaccgacgcctgcagcgtcagggaggctgccttcatcagcatcatctctttgctgatggcatggtctgcgctggtgaattcaatacggtagcggaacggctggctcagggcttcatcgccctcgaaggccagcacatcaagcccggcttcacatcccttcaccgaaagcaggtggtggttatggctgaacaacaacgatttcacgctactcatcggatattgtcccctcgtcaaacgccatcacgacgccttcctcttcgtgataccccagcgtcacctggcgcggtttctgccccgccgccatatggctcaatagctgctgactcagcgccggcaggatctgctgattcagcagactgtcgacgttacgggcgccggtatccggcagcaggcaggcctcggtcagcgcgtcgaacaggctctcgctgagggtggtggtgattccgtaatggcaagccagacgctgacttacctgcccgagcttcatgccgacaatggcgcgcagcgctgccgccggcagcggacggtatatcaccgtctggaagcgggccagcagcgccggctggaagtggccgcgcagcaccgggcgcagcagctcgtgcaggtctgattcgctggcctccggctgttcatccagcaactgcatcaggaggtcgcttccgaggttggcggtcatcaggatcacggtgttgcgaaagtcgatttcacgcccctcgccgtcgcgcattaccccccggtcgaagacctggtagaacaggttcatcacatcgcgatgggccttttccacctcatcgagcagcaccacgctgtaggggcgtttgcgcaccgcctcggtcaggatcccgccctggccgtagccgacgtagccgggcggagaacccttcagctggctgacggtgtgcggctcctggtactcggagagattgatggtgatcagcgctttctcgccgccgaacagcgcatcggcgagggcgagcgccgtttccgttttgccggtgccgctcggcccgaccagcaggaacacaccctgcggaccgttctccggcgtcaggccggttttcgcggcgcgcaggcgccgggcaatagcgctcagggccgcctcctggccaaccacccgtttgccgagactctcttccaggctcagcagttccgtctgctcatctttcattagcgaggagagcggcacgccggtccagtcggcaatcaccgtcgccacggtgcggacgtcgacgtccagcccgagcagcggattgccctgctgcacggcgataagcgcgttttgcaggtcgttaatttccgcctggcgggagatatcgcggcgacaggcgagcagcgcttccgtcagctgcagctcctgaccatactgagtttcaagggtatccagcgccagaataaggcggatctcctcctgctcaatggccgccagccgatcgccgcgggcgctgttgcccagcgcaatatcttccagcagcgcctgcttctccattgccagcgcggtgagctgcgccttcatgcgggtcagcggctcaggcacggtatccaaactcatacgcaggcgggcggaagcggtgtcgagtaaatccactgccttgtccggcagctggcgaccggtgagatagcgtcgtgacagcgtcacgacggcgcgcaccgcatcatccgtgatatgcacgccgtggtggtcggcatagcgggacttcaggccgcgcagcatcaggcaggcggtgtcgtcgtccggctcatccaccttgaccatctgaaagcggcgctccagcgcggcgtcgcgctcgaagtactgcttgtattcactccaggtggtggcggcgatagtccgcagttcgccccgggccagcgccggcttcaacaggttggcggcatccgcgccgcccgcctgattacccgcgccgatgatcgtgtgcgcctcgtcgataaacagcagcaccggcgaaggcgactgctgtaccgcctcaatgatatttttcagccgctgctcgaactcgcctttgaccccggcgccggcctgcagcagaccgaggtcaagggtgcgcaccgacactggcttcagcgcgtcggggacgttgccttcggcaatgcgcagcgccaggccttccaccagagcggtcttgcccacgcccggctcaccgacgaggattgggttgttttttcgccgacgggagagaatatccaccatctggcggatttccgtgtcgcgtccgaacaccgggtcaatctggccgtctctggctttggcggtgacgtcgagagtgaatttgtccagcgcgttctgcagcgccggattgagcccatccgcattcagttcgttgcccgcaggacgccccacaaattccacgtccccgccatggggctgcgccagcgccgcttcctgctgcgctggtggacgttcgtcggactgggcatcaagcaaggggcgcaggcgttccagctgacgctggcccagcgttaacagcggccacaggccatcgcactggatcagattctgtttttcaaccagcgccatcagcaggtgaacactgcggatctgcgcttcgccgctgagcgaggcaatcagccaggcctcctgcatcagcctcagggtatggtcagagagctggggacgatgacgtaccgagcgcggctgtttatccagccagttcagcagatcctgccacagcgcatccatatcccattcatagcgccgcgccagcaccgtcagatcgccttccccctgttccagcagcttaagcagccagtgctcgggcaggatctcggcatgcgcccgggtctggcacagggaggccgccccctccattgcgcgggcacagcagggattaagacggcgtaacaggctggctggattttccatgagatcctctcttattggttccggacacgctaccgcccgtcgctgttcccgaacaggaaccccaagcgcacaaggtcaggcagacagattgtgtttttctttgctgagaacccgtatctcaggcgctcagcaaaaaacggcgggcagagaaacgctgcccgcatcaggcgatcgcccgcaataatccccggccgcaaagataacgatgcggccgggatgagcgaacgtcgcctgcgcgccagcggcgcgaactatgacgggcaattacgcggtggcgcgttcgttccagctatcggagtgaatgatgttgccgtctttataggtccaggtgatcttctcgtagcgcagctcaatctgttccagatggttgtgcttctcgtaggcggggtttttgatgtcgtgcatcaggggattcactttcaccaccttgacgttctcaagtttggtattgaaatactccacttcctggccggcatcgttgattcggtaccacttgaactcagcggatttcagggtctggccagtggtcactgccttgtacaggtaggggctggaggagtcgatctccttggtgaacaggaacggcgtatgaatacgcgtgccggtcagtttgccagtgttgttatcggtcgggatgtacaggttatgctcctgagccaccacttcgatactgccttcacgatcctgaacgtcgacagaccctttaatgtccgcgccgccgtcgtctttcagccaaagataaacaggaattgccatggaattactctccattgtgtagtgaagcgccatcatcctgggatgacgcagagggttggtccggtaaccggcaggcgtctacctgcggcaccagactgatttcgacacgacggttcagcgcacggccttccggcgtatcgtttgttgcaattggtcggctttcgccatagccctgtacggcaaagcagctgtccggcacgtcgccggtatcgcgcatccagtcgcggaccgattccgcacgtttcagcgacaatagctggttggctttttcctcacccacgctgtcggtgtggcccgccaccacgatcagccacccgggcctggccttaatgtccatcagcgagctgaccagccgctttgtcgaaccaggcttcagtacccatttcccggtatcgaatagcgacatgctgtcaaggcggatgacatccggcgcgacgtgctgcaccggcctgggcggaggcggaggcggcacgtaaccgcgaatcgcctccagcaacggcaggcgaatctgctccccgtgatacaagcccagactcaggcgcagcgggacgccgttacgcgcccagctatcgagcagcgcggcatcttcacgcagcaccctgacagcgctggcttttggtcgataatcatccatcgcaatccgctcataacgggcaatatcgacgcccacgcgctgcagcagttgtcgattgttccagccactgctgagcagcgcggcgacagccgcgagggtgaaaatcgcgagcgccgcgcgccaggcccagcctcgtggcgtgagtccccgtcccgccggtaactgcggcaggatgaattccggcaaagctgaagcgtccccggtgtcgctctcgccaggctgccagccagctacccgcgacaggccgctatgtcgggataaccacgtcgtccaggccgacgatgccagccttccaggcagcgagggcccgagcccccacagcacggccgcagggggcagaggtggcaggtcggtattctcttccgtcaacacggcatggacgtgctgttcaaaccagcccatcaggctgttcatcagcacctgctgctccagcgcggccgccccaccggcgcttacccaggccggtacggaacagggggcgcaggagggctgccagactttcaccgcttcacccggtatcgccgcctgccacaacaggtcgcgactcatcgcgctgcccacctgcccctgcagcgccagcggtacggcataccccgtctgctgacgcagctggctgagttgccagcgcagggccagcagagcgctggtcagcgcatcgctttgcgcatgccgctgcgggcagacgcagagcagcaccgacagctgaggcccccattccggccgctggctcaatacctggcgcgcgacctgctgcagctcctccgtcttttccacgcggatccagcagccctgtttgacgactcgcaccggtgacgctggcggccagacacacggcaggtcgccgcaaacgaggaccaccggctggcgataagcgccctccgggagaggggccagggttgatgcgacgttacgtccggtacgacgactggcgatgcgccagatcccgatgatcagggccagcgtgaccagcagaatgagccacgccccccagcggggaaccggcaaaaatagcaggcacaccagcgcactcagcagactggcccacagcgccagcccacgctgctgcgcggggctcatttcacctcccccggtaacaaggtcagcagcaggtgatcgagccagtggttgagtccccaccacagggcgagtaccaccaccacgctcaggccaatacgtaccggccatggggccagccagccgcttatccccagaccggcgcgactctctaccagtacgggagcggtagccgggcactgaaaaggaggaacacgctcaccgagcgcgttgaccagcttcaggcgctcggggtcgtggagggagcgaaagctgccaataaaacccagcagcatcacccgctgaaaacaggtgaccacggccaggttgggcgccggttcacgcaacacatcacgcatccgctcgcacagggtgtcgccggcgtccatggtgccgaggaagtgcccctgcagcggaatgtcataccactgcaggcaggcctcatcctccacgccgcgacctttcactgcttcatcgagcagcgcgcactgggcggtgagaatatgctgacagctggcgtcatcaagcccgctcaccttcagctcatgttgcacgcgctcgacatcagcaatacagcgctgccatagcgtgtacccttcctcatcgcggaactgcgggccgtggcgcaggctgataacctgcagccaggtgttctgcagcagcgcatcaatatcaatggacgcggcgttgccgcgtttaggctcattcacgttcgtagtaccgcaaaaagttcaagttcaggctcaccgagcatccccgggacgtaaaacatacaggtgccgctctgcagcatttccgttgccagagggtgggacacatcgaggctgaaatactgattttccagacgcagcgggatcgccgccggcacatgacgcaatggcgtgaggggcacccctgtccgcgaggagttgacgatggctttgacatgatccggactgcccactttgcactggcgcggaaactgctcctgcagttgggcgaccggtaccgacgaacgaaccgacaggtagtaatcagccccttcccgcagccgggcatcgtgcagacgcgcctgccagaagtgcagccggacatcatgctccagcgcaatcgccaccacccgcgatggcaggctcgcctccagcaggtcgctcagtaaatcaaacagcggcggaaaaaccgcgttcagctggtcatgctgatagatcgggacggcattcgcctgatgggtgagcgaaaaggtcagcaggctaccagccaggcgcgccagctccgggtagaggcgttccggcgggctttgccggtaacgcagaaagtaccccagcaccggctcggcgctgttcagcgcattcagcaaccagaacagagagacatcagccacggcaaaatcagccatccgttcattgctttcgcgacgcatggccatcaggcgcgtcagacgagcccggagctggacgagcagctgttcaagctgcgtcgccagccagcggctgccctggatctgcagcagcggcgggagaaacgtctcgtcgataagccaggccccctgcgagtcccgctgcaggcgaacaagcggacaggtcaggtaatcgctgttgtcctggtgggcgaagcggaggatcagctccggctgtatgacggcaatctgccgggtatcatccccaaactggttgcggacatcgcgccagcgctggcggaagcgcaccggcctttcggccacctcctccggcttcagacagttgccgccattcgcctgcatcaggggcagcgccagcacgatcaccgcctcgccggacgcgccgtccagcgacagcgcggacggcagcgcatcggcattgtccgtatcaatcatcgtgccatcctggaaccggacctgcagcctgtgagcctgcaggcggcccagtttgagcatctctggttcgaaggtcgcctcaaccactccccaggggtggttaagacccatccgggcaatcacttccgcagtccaggctgcatacgcagcctgctgttgaaaatgctgaggcgacaccataatgccccggccccacaacggacgttccgttttcatcatcgtccgaacctacgccttcgcctttggcatctggctaaccagcgacagattgacgtccatcccctcgacctggaagtgcggcaccgcgtacagcttcacgcggaagaagcccgggttatcctcgatatcttccaccaccacgctggcatcgcgcagcggatgggaggcctgcagctcgtcgccggggtcggtcatttcggtcaccaggctccgcacccaggtgttcagctccagctccagcagacgccggtccttggtggtgccgatattttcgcgctggatcatcttcaggtagtgcgcgatgcgcgacagcaggaagatgtaaggcagacgcgcgttgatacggctgttggcggtggcgtcggcggtatcgtacagcaccggtttctgcgcggagttggccgagaagaagcaggcgtaatcgcgatttttgtagtacgacagcgggataaagcccaggctggcgaactcaaactcccgcgtttccgggatcatcacctcggaagggatcttcacctggttgccggtgcccagatcgtacagatggataggcaaatctttcaccgcgccgcccgcctgcggaccgcgaatttgcacgcaccagccgttattgacaaagctcttcaccatattggatgcgaaggagaacgccgcgctggtccagagatacttttcgtggtccggacctttcacctgctcgacatagttgaagctgcgcaccggcacggtgtccggaccgtacggcagacgacccagcacgcgcggcatcaccaggccgatgtagcgggcatcgtcagtttcgcgaaacgccttccagcggatatattccgcacgatcgaagtagttgccgatatccttaatggcagccacctcttccatggtctctttcaggaagaaggccgggccgacggcgccgataaacggcatatgggcggccgcagagacgcgggagatattgcgcagcagcgccacatcctgcgggctggcgtcgaactcataggccgagatcaccgagccgatcggctcgccgccgggagtgtcatactccgcggtataggtgtgccagtagaggccgctctggataagctccggcgcgtcctcaaagtcctggcgcagatcgtctttggcgacgtcgaggatctccgttttgacgttctgccgatagtcggtgttgtccaccagctgtttgaggccgcgccacagggattcgacctgctgaaactcctgatggtgcatcaccgcgtccagctgacggcttatctggaaatccagctcggcgatatggtggtcgatcagcgttttgtcgagcttttccacccgctggccggactgacggatgcgttccataaacacctgcatcgccgcggtgagacgttccgccgccggcgcctcggagagcgcggcatcgtccagaaagtcgttgatatccccgaggcgagacgccggggtgagattaattttttcaaacagcgaggcgtaaacgccctcgcccgcgctgttttcctgcagcgtggtttgcccctgaacaggggcgttttctgtggtaacagacattagcattttcccggttaatccattaacagacttgccccgcacttatttcggggcaagcgcactcatttcgtcgcgtaattcctgggacagcgccggatctttcaggattgcctcaagctcttttctgaaagtggcgttatcgagcagattggatttgagatcgcgtaataaattacgcatcgccagcatggcgcggagttgcggaatttgccgggcaacctgctccggttcaaaatctttgatgtcggtaaaacgcagtctgacgttctcctcttcgccattgccggtcagcgtattcggcaccgagaggttaacttccgggctaaattccgaaagtacgctgttaaagttatttttattgacgttgattttttctctttccgataaaggccggttttccttaccatgactaaaatcgccaatggtaagcagtttgagcggcagttcgaccttcttttgcgcgccgccggtatgaagagataatttgagattaatgcgcgccctggggacttcattctggaacgtatcagccatagcagttcctttccttaaggaataattattgaagatatattgatgtgaaacgtgacgatgataaagcaaaaatggattagcgatcaacttaaccacctaataattatatttattcataaacatcccctttcaccacgaaaataaaagcaccatgaatatcaatatttaaaatatgaaacagccgtcaatgataaattcaataaataatgcaccaaaggaatgtttgcaaaggatactataagacgggctaaaacattaagcggatgaataaaggaaaccatagagacgcccggggcaatataattcgctcattatgcaaatttagcgtaacaacgcaataaattactcagagggataatatctggcttccatccgattgcccgttcgcggcggacgcttaatagtgcaggcgcgaaatctaaacggtaacaatattcttctgctccccttactccccacaaaccgattttttgcggataacgagccacagcgcgatgtcggacaaagttgtcgttagcaaaaaaacatgaacccggttacaagacgcacacgacaccgtcgtcggcatcctgaacggttcgcattctgcaagtcgccaggctatatctaagacacctttcgcccacaacgagacacaaagatgagcaagaaaatcctaatgctggtcggcgattatgccgaagattacgaaacaatggttccttttcaggcgctgcagatgattggccaccaggtcgatgccgtctgcccggataaaaccgctggcgactatgtcatgaccgcaatccatgactttgacggcgcccagacttatagcgaaaagccgggccatcgcttcacgctgaacgctgacttcgccgcagtaaaggccgagaactacgatgcgctagtgatccccggcggccgggcgccggagtatctgcgcctgtacgaggaggttattaaactggtacaggcattcgacgccgcgcgtaaacctatcgccgccgtctgccacggcccgcagctgctggccgccgccggtattctgcagggccgcacctgcagcgcctatcccgcctgcgccccggaagtgcgtttgagcggcgggcactatgcggatattggtatcgaccaggcgcatgtggacggtaacctggttaccgcccccgcctggccggctcatccacagtggctggcgaaattcgccgccctgctggcggaataaccatactgagccggcgtttttgttgagccacccgctcccctgcgggaatctatgcctcagcgcggtgtttagtctcgggtaaaggcgctgttgtaagttataccgatggcggggatgcgccacgatttaccgcttatcttcaggggccggttaaaaaaccagcccctgaaagatttatcgctgccctgacgggcatcatcaattcagcaacgcgatctgcttgaccactatttcattgattttatagattatttcaggagttacgcgttctttgatatcgcggtcaacaaatacccgaatgcaatatttgatgatttgatactgatttaacttatcaccacattcaattaacggttttatttcgtagcggttcttaagatctttcaccaaaagcttaacttcggttttatccaggtctttaaaggcgcagtcggagacaatatcaacggcaaattcatgtggtttgaaatgaggctgtaatacagaagtcaataacccggtgagttgactcttccacgccttattttccttgtcagcgatgttagctttatacacagagtgtttggcctcatagaccttcgaccatgggtgtcggttaataatgtcatcaagtatttttttattaaccgcctcggtatcgctgatatctatccattcaccaaccttgtcattcaaaaaataatcatcactgcacgccaaataaaaatccttcagcgcatcgatgaagctttcatcgctatggtcaacgatacggtcggtaacgtcagcgataatgacattttgtggatccttgctttgcataatctcacataatgtgctcaacatcgtcgcaaaggcgcggtttgttttatggtaatacacctgcgagaaaaggctggagcgcgccccaataaactcagcgatcgaatcaatcccactctctttgtaagcaaggtacaattttccctgttcctcgaccgggacaattgacataaacaagcgattgtaatcgtagatgccacacttgacgccggagaaatagccatctctgagcaagtaatccatccggtcggcatcgatcggacaggaagagatgatcgaggtcattaacggcaggatatctgttgcctttccattaatttcctcaatgatctgttggtcaccgtatcttttttcgatgatttttaacacattttcgatatttatttcgtcatcgaccttaccttgttttctcagatcatggtaaatcatcaggctgaacaacagcgaaagctgttcatgttcaactttctgttctggcttgcttaatacatcaatgattgaatggtaggctgtggggagaacatcggagaattcgtgcttaccaggcataaaactctcaaactggtgggataccggcccgtgcccgatgtcatgcatcagggcagcgagtctcaactcctgaatgttgtgttttggtatctgatcgatatgaccaaacacatggccatcatcatatttcttttgataccgtatcgcattcaggcgtaaattattgagtatttcacttgataaatgcagcaccccgagagagtgttcgaagcggctgtgcaccgcagagggaaacaccttatataaaaaagagttctgtttaatgttgcgtaagcgctggaacagggggtgattgataaaggcaatctcgagtgtcgtcaaacgaatagtgccgtgaatgggatcaaggatcttactggtcagttcattttcaaaatccatatcttaaatcctttcatacgtgcattaaatatatttagcatattgactgtttattcaacaataatcttgcgcattcaggcaataaggtcaatcactaatatttaacgagcaacgcggcagatcataatttccttatctctccacagcgtcgcgctatatcggcatccactgacatatcgattgactacggatgaaaacagccccggttttcttcgctcagatgcgcattcccccggaaacctcaatgcgctgggcattcacccagcgatgatcatcggataacagcgaggcgatcatcggcccgatatcctctggcaggccaggtcggcccagcgccgtcatgttcgctaccgcctgagcgacctgcgggttatcccgcaccaccccgccgctgaaatccgtggcgatggcgcccggcgctacgcagttcaccgtgatcccgcggccgcccagctcaaacgccatataacgggtcagggtttccaccgcggatttcatgatcgcatagggcgcccggttcgccatcacgatacgggtcagtccggacgagatattcacaattcgcccgccatccgccagcagcggcaataatttttggctgaggaaaaaaacccccttcacatggatgcgataaagcgcatcgaactccgattcggtagcattcagaaaccccatgccgctggcattgccggcattattaaccaggtaatgaaaccgatcggcccccagctccgtcagcgcctcctgaaaggcgctgacaaacccgtcaaaggtgtcggtttcgccggcgctgaagggcagcgcgatcgcccgcgagccctgagcttcaacccgcgcgaccacatcgttcgcctcggcaaaatgcgcgttgtaggtcaataccacgttcacgccgcgctgagccagcgcttcaacggttgcgcgccccaggccgcggctgccgcctgtcaccagggcgatttttgcgctattgttcatgtttcccccttttatctctgctgaaaacatgagcgattataggcctctgaatgccgacgataagaccgcatggcgcgacaggattgttttgccagcaggaacaatgccatggataaactggataccctgaccctgttcgtgcgcatcgtcgaacggggttcgttcagcgccgccgccgcggatctgggtttttcccggccggtggcgactgcagccattaaggcgctggaggctagccttggggcgcgcctgctgcagcgcaccacccggcacgtgcagccgacggcggagggctcgctgtattatcagcgctgcgtgtccatcctggcggccctggaggaggccaaccgcagcgccggggggagcatctccggcaccatccgggtggacgtggcgggcaatctggcgcgaaccctgctgctgcccgcgctgccgcagtttctcgcccgctatccggccattacgttacagataggcgaaagcgagcgcgacgtcgatctggtccgcgaaggggtggattgcgtcattcgcggcggccatcttcccgatagcgagatgatttgccggccgctcgccaggctacaggagatcacctgcgccagcccggcctacctcgcccggtacggcaccccgcatacgattgacgggctggcgggacacgtggcgatcggttttgtttcagcgcgcacgcaccgtaccttgccgctgacttttaccctggatggtcgccagaccgaggtcagtttgccctgtcggctgctgacctccgatgccgacgtcggcgccgaagcgtcaaggcttggctttggcctgtatcaggcacccttatcccgccttgaggccgatctggcatccggagtattaacggaggtgctggctgattttcgccctgcgccgctgccgctctccctgctctaccccagcagccggcagctctctgcccgggtacaggtatttatcgactgggtgacggtgctgatgaaggcgcccctggcgcagcaggcatccggaaggctaaaataatgtttgctattatttgcggctcgtgcgttaatcgttaagtcgatttaccagacgaaaagttattatctaagtacgtgttctcatctccaggcgttatccctgataccaccttcctttgagcagtcccgttagtattttgctttttctgtaaacaggccctgtcagccccctgttggctcgttaaacaagccctccgactgacccaatacccggcttactcctaacaaaaatcagccgcgttaatttccctgaaaacgaccattgtcttttcaacagaacattacccatacaaggtttacattatgattgaacatatccattttagatgcccatgctgccatggctcccagtacagaacgtcccagtttgacgtgacggaaaaaaatccctttggtgcgaaatgcattttctgcaaatcggccatgatgacgttagatactcttcgcccttatcacctgggcgcgctgtccaccgctcaggcccagccataagacggatgaagagggtgaacgcgggcgggaaaattcccccggggattcacctgggggcaagctctgttccttcacctgacgcgatcgtcggtggaatggcgaagaacggcatccggcaacgcttttatcagggtcgtcacattctccccggcgcgggtttccacattaaaatagtccaccgcgcgcagaataagccgcaaacctctgccgctttccgctaacggatcgacatcgaagcgctcatcgccacgcgccagcgccaggcgctcggccggaaagacctctcccgcatcaataaagcgcagcgtcacccggtcttccgttgcgataaattcgacacgaaaaacacgttgccgatcctcatgcaacgcatagcgaatgatattggtagccgtctcacagacggcaagatcgagcgcgaagcgccactcctccccgacgggcagcggcgccatttgttgagccagccacgccgccagcgttgatagcgagctgagttgggcaggaaaattcatgacgttattcacgggcgcgtcacggattgaactgcgaaagggctgaagtgcgatcctcgcaaatacgaaaaatacgatccatcctggtcagggtaaacatattgcgaatgccggggttcagcgcgcacagtgtcatttctcctttaccgttcatcattttcatcagggaaaccagcgttcccaaaccgctgctgtcgataaaatcgattttactgaaatcaacaatcagatcggtgctatcttcgcctatctcctgggcgattgccgccttaaaggctaccgcgacggaagcatccagccgacgcaccgccggcgtcaggatcgtcaccgaggcctgccgttcagtttcaattttcatcactgtcccctgtacgttcaataatcaagagtgaaacatcatcggccatcgcctgggtctcctgcgcgtcgccactgcgccagcggatcaggtgccgggcaaaacgcggcagcagcgcgggcagcggctgcgtcacgctgtcctgcagccacgcttgcaagcgcgcctcgccaaactgttcaccgctccggttttcacattcggtgataccgtcgctgaacaggcacagccgctctcccggcgccagcgaaaaactgacatctgcccacgagagatggtctatcaaccccaccggcgccccgccgctgccgaccgggcggacggtagcgtccgggctaacgataaaaggcgtgggatgcccggcctgacagagtttgcccgcaccggtctgcaggtcgatcacgccatagatcaacgtgaaatagctgacgatctctgtttcgtcactgcaaaaacgaccattgaggatcgccaccacctcggccggcgacgccggctggttgtctgccgtaaaaagaaagcgctcaacggccctgccatgcaaaaactggcgggcgacggcgagcgacatcatcgccgcccccacgccgtgtccggagacatccacgcagtaaaatccgagacgatcgcccagcgggaagacgttaaaaatatcccccgacacccaggccgagggcaggaaaatccagtcggagaaaaatccctgatggcgcagctgatgagccgggagaaccgactgttgaatgcgcgccgccagctccagatcctgttcaatctgtcgcagcgcttcgctcagccgcgcattgcgcgcggcgaggtcagcctcgagggagaggatccgcgccccggcgtgcaaccgcgcccgcagctcgctctgctctaccggtttgctgagaaaatcatcggcccctgcctcaaacccctgcgttaaatcgccagggtcttcgcgggcggtgagcaatatcagataaacatagcgaccaaactggcgacggcgaatttcccggcatagcgtcaggccattcatctccggcatctcccagtcgcttatcaccaggctgacaggctggttttcgaggatcgccagcgcgtcgacaccgttttccgcctcactaacgatataaccccactgcgtcaacattcggcttagcagccgacgataaaccagcgaatcttcaacaatcaggacgtgctgtgccgacatcgcgcctcctaaatcggcaagaaccaggtaaggctgatcgtgccttcacgaaacttgccgctgccgctgtcatgccccgggtagcgggtaccggcatagttggcatactgcacagagaacgatcccggcgtatagcccgcgtagccaaaactgtaactataatcgccattccacggctgctgctgactactgtccggataccagaacgcggtggcgcgcacaaaaaaatgttgtttaaaggtatatccacaccccccaagcagcacatttttgtttttgcggatatcgttactctccagatcgtaataacgcggcacccagctgtagcctgcctggcagataatggcgtcgcctttgttaatcaacagcgcatgctccatgggcttcggcagcgaaaatttatacgccagggtaatcgccccctgctcaaaataggtgtgacgcttgctgcccgaggtccagaagtggttatcgccatagttactgtaaaccaggctgaaggtgttggcatgccagtcgtcgtagccaaaactatagcgaaaatcggcggtatagcggctggtgtcagtcaccggtaaacgggatgtcacgttggcgaaccagaagctgtagggcgagtattgcaggctaagattcagcgtctgattatattttttcttctgttctgcgctgtctgagctgttggggacggtcatccactgctcttttaaacccgaactaaagctcagcgctcccgaaaacaccttgtcattcccggaaaaaagccgtccccagcggctggtaaacacgccggcctgcaccggttcaccatttttatcacgcagcggttgtgcgtcgttcttctctgcgccttccgcacctgcgatggcgcaccatagcgcgcaggccagcatatatttctcccgcatttgcccttccttagttaggtatccagcgtgcggcgacgcggtatttggccatcagccacagtacgcccagcgcggcggcatgaatcaaggtgttctctatccacgcctggcgccacagatcgaaggtaaccagctggcttacggcgagcacgatgtaaacatgcaaaataaaggtgtagagcgaacgctgcccgagcgggatcaggaaccagcctgccagccggttaagggggcgccagcaccaggtcaatagcagataaatggtgaccatcagactgatatcattgaggatccgtaccggaccgaggccgtttttcgccgcccaggtatggtaaaaggcgttaaaatccgccggcgggattacgtgcaacagcagcgcgggcggcataaaaggattggtatggttctgggcgacaaacgcaaggataagcgcgatgaacaccagcgccgccacggcgactttgccgggcggcgtgcgggcgaaagagatcagttccgctttgtaccagccgcagcacatgcccagcacaaagataaattgccaggccagcaggggaaaggcgaattcaaattcgcagggcgtgacccgtatcggccagcgttgccagcagccgtatatcagcagcgaggcgcccagtaaggggtagacgtgacccttttgcagcattcccagaaacagcgggctgagcaataacaaaaaaatatagagtccgaggatctgcgtctgatgcgggccaatctgcagatagaggataatgttaaaccacgtctcttttatttgcggggttagcggatagagcgaccaactggtcccggaaaagcggtcggtaaaatgagtgacttcatagacattaagataaggcaaatatctcagcaaaagaaaagagacaataataataatattaacctgatatattttccatgcgcgaagataaagcccccagctcaccgtcagtaatactgccttttgtaatctgacacgatttagcatccctaacatgaagccggacaggatcacaaagccctcggcaccggtggtcaaaccaaatcgttcccagctgaaaatattaaatatcgacatcacttcggtatgcgccaccaccatcatcacaagagcaataccgcgcataaagtcgatacgcaggtcgcgatccccggtcagagagtaacgccagggcattgatttatgagtttctttttgcgaaatcgctgaagcaacctggctcattagggatcctgccgtctaccctgcaacatttattacaaattatttagatagtgtagaatgggctatcttgcaatgttcgttttataaattccgccggcgtgtatcacactatgttaagtcatcccggtgactatcatttcgcgctgttgaaatttttgcgccaccatctacactcactttactgttatttataagcccctgtgcgttctgcagaacgcccccaatcgataacagacctgtcattcaaacccagcgcggaatcaggatatccttgctatggatttttatttttcccgttttgaacatcgccgaccgcctgaaccgctcagcaccccgcgctgggtgagaatgatttggcaggtattagctgtggccgccctggtgcttggtgccaattatatttactggcgctggaccgcgtccttaaacactgacgccctgtggtatgcgatccctctggtgctggcggaaaccctggcgtggattggcacagttctgttcaccattaatttatggcaggaaaaagatcctccgccaggggtccccccgacggagatcaacgactgtctgcgcgcggatgaaacggtggagtcgaggccgattaaagtcgatctgtttatcgccacctattccgaagacgtggagctggtcaggctgtcgatccgtgacgccatgcagatgacctatcctggtccgctcgattataaagtgcatgtccttgacgacgggcgtcgcccggagatgaaggcggtctgcgagcaggagggggcgaactatatcacccgtcagagcaatatcggctacaaggccggtaacctgcgcaacgggctggaacataccgatggcgactttctgatcatctgtgatgccgatacccgcgttttcccgaccctgctgagccacacgctcggctattttcgcgatccggacgtcgcctgggtgcagaccccacaatggtttttcgatctcccggaaggagaggatctggcgagctggctgcggcgtaaagcaggcggtgcaggctatggcgtgggctggctggcgcagaaaatcgtcggtccggtgaccattggtcgcgatccttttttcaacgatccgcgcatgttttacgacgtgattttacggcgccgcaactgggctaacgccgcgttctgctgtggcgccgcctccgttcaccgacgggaagcggtgatgcaggcggcgctgcgcagctacgtctggagcgttgacgccgaaatcgcgcgtcatacgcgggatattcgtgacccggcaacgcgggaagcgctgcaggacgccatgcgcccccacgttgccttcgatactgaactgacgccctataagttccacgtctcggaagatatttatacctccatcctgctgcacggcgacgctgcccgccgctggcgctcggtaatgcacccgcggattgagtcgaaaatgctctctccgcaggatatgctgacgtggatgatccagcgctttaagtacgccgccggatcgctggatatcctgttccatgacaacatcttcaaccgacgccgctttaaactctcgctgccgcaaacgctgatgtacgcgaccaccttctggtcgtatctggcctgcgtgtggaacaccgtattcctgatctcgcctgttatctatctcttcaccggcattccgccggtgtcggcgtggtctacccctttctatctgcactttttacccttttttattgtctccgaactggcctttatgttcggcacctggggcatttctgcctgggacggccgggcctcttacctctcctttttctcgatgaatctgcgggcgctggacaccgttttgcgcggggagcagatcaaatttcacgttacgccgaaagagcgacagacgggccgttttctctatctcgtcaagccgcaaattgccatcgttttgctcaccctgacggggctgatatggggcggtattcaggtggcgcgcggtcaggttgacgacccctccgggtacgtcatcaacattttctggggcgcggtgaatattgccgccatgctgccactgatcttcgccgccatgtggacgccccccgaagagcaggaggcgagccgatgaggatccgcgacgccctgctatccgcgcgcagctatctcactatcctcattggcttcctgctgggttttgcgattgtcgtgtgggtggaaaaacaaatgcccgcgcgcgtcgagagcagcggcgggatgacgttgagccaggattttccgccgctccctcccccgcgcgagctgacctttgacgaggcgatctgggcgcgggtggcctggcagtattatgtcaacaatacccagccaaacggcctggccaacgcgcacgatggcgaaccctggctcagcctgtggagcgtcggcagctatcttttcgccgtggtcgccgcagagcagctgcatattgtgaccgccgccgaaggtgatgagcgcattgccgccgccctgtttaccctcggtcaactgcccctcaacgcccagggattgcccgccgctcagtaccatgccgacacgctgcagatcctcggcaacccggactcctccgccatcggtatgggacgcctgctcaccgccctgcaaaccctgctctggcgctatcctcagcacgccgccgcggtgcgggatctgtttaatcagtggcgggtcggcgcgctcatcagcaacagccccgccagccaggccgcggcgccgctgcaccactgggcgctggcggcggatgaaccgcgggacagctttggctaccggctgtacgccagccatacgctgcggttgatcgacagcgcggcggggctggcggtgaccaacccgccgcaggggcagcagatgatcgatatcgacggcatcatggtgcccgacgaggggctgcgcacgccctgggggcggcagccttcactgatcagcctgccgtacctgctcaccggccttgagctgggctttgacgcgcagagtgcggagatcgcctggcgcatcatgcaaatccagcagcgccgtcatagcctgagggtcagcaagccgccgatcagcactgactacgccgagcccgcgccggattatgccagcgcgctggcggaccggcagccgcagagcgccttcgccccacgcagcgccgccccggagcaaacggcgatcacctccacccgcaccgcctttgcctggtacgctctgttccgtaatagctggagcgaggcgctgcgccagcaggtgcagacgctgcaggtcccgggcaagggctggcagcgagggttaaatctcaaccgcagcgtcaacgacgttattgacggcgataccaacgcgatcgtgctggaaagcctggcctacatttcccgggggcagatgctgtgtctggcctgcctgagccctgcccctctaccctcgtcctcagcaggagcaacgccatgaagctgacctatttttcccgttttcccctgctggccggactcatggcgctgtggctctcgctctccggcgcgcaggccgcgaccggtctgccggctgcggaatacgccccgcgcagcggggagctgacgccgagagagatgactatcgccagaaacgcctggcaatacttcgtcgccaactttcagcccaccaccgggctggtgaatgcggtaaacaaatacccctccaccaccatgtgggacagcgcctcctatctggccgcgatgaccgcagcccgtgagttggggattattgataaggcggagttcgaccgtcggatgctgaagtttctcgccacgttgaataagctcgatttattccgtaacgaactacccaacaaagcctataacacgataagcggacaaaaggttaactaccagaacaagccgggtgaaatcggcttttcggcgctggatatcggcagaatgctgatctggctgaaggtgatcaaggagcgctatccggaatacagcaacagcatcgataacgtggtgctggggtgggacttcagccatgttgtcgatccctgcggcacgctgtacggggcgtatctggaaaacggccagcccaaatacgttcaggaaggccgtctgggatacgaggagtacggcgcggcgggctttcagctgtggggatttaacacctgtcaggccagccggccgcagccctacgagctggcggagatttactgcgtgctggtcccctatgattcgcgcgacccacggcaaaccagccagcataactatgtggtcagtgaatcctacgtgctgtatggcatggagtttggctttgataaccctggtgaccggaacaacagcccgcgcgagtactcccatccctggatgaaaaacttcgctgaccgggtctaccaggcccaggagaatcgctacgccatcaccgggatcctcaccgcccgctccgagcatcagctcgataaatccccgtactttgtctatgacaccgtgttcagcgacgggtttaactggaacaccataaccgacaaaggccagttcgtaccgaatagcgccgccgtgtcgctcaaagcggcgatggggatgtgggtgctgtggaactcgccctataccgatcgtctgctggacgccattgaaaacgcgaacgaagcgggaaaaggctattacgaggggttgtatgagaacggcgacgggccaatcaatgagtttaccgccaacaacaacggcatcatgctggaagcactgctatttaaaaaggagggaaaactgctgcagttttccagcgacaacccgaaaaaccgcgatttcgccccgtcgctgtgggacaagaagctggtggatctctttgaacccaataacggcccgcgcaatcgcccgttcctgagcaacacccccgccgtcaaaacatggtgcgagcagaccgggaccacgcagcgcaccaaacccgcctgccaggcctgccagtgtgccgcctgcaaggctgacgagcccgttaaacttccgccggtgaccgcgcaatgcttaaaaccatagcccgctggctggccatcgccgtcgtcctttttcttatcgccctggcgctgttttatcgcgtatacacatctgacgctgccgacgaccgacctagtgttgatctcggtcgtagcctgacgtcgacaaaacagcaaagatcgcaggcagtaacgcagggaggagcggcaggacgaccacacaggaagactgggcggcggcgacaa

SEQ ID NO: 183 - DNA, 26515 bp, Unknown
  source: /note="Description of Unknown: MKP2_2161_1 Mutant Bacteria sequence"
taggcctgccgccagcgttcaatctgagccatgatcaaactcttcaatttaagtttgatgctcaaagaattaaacttcgtaatgaattacgtgttcactcttgagacttggtattcatttttcgtccgaggacgttaagaatccatgtcactttgagtgcccacacagattgtctgataaattgttaaagagcagttgcgacgcgctttagcgctctgtcgcgaggtggcgtatattacgctttcctctttcagagtcaacccgtttttcaggatttttctctgcaaccgaaccggctgtttgtgtgaagtgattcacatctgccgtgtcagtgggtgcgcattatagggatcccatttttttgcacaagccttttttcgatctttttttctgaatggtgatttttcacccttttcgccgtgtaattgcacgatttgctcaattttcaccgttttcaggggttgcacagggagataaaagccaccaaagtcttcttacgttcccgtattttgaggtctatatgtctgctcagctgcgcccctacaaagcatttttcccacaaatcggtcttcgcgtcatgattgacgcatccagcgttgtcatcggcgatgtcagaattgccgatgacgtcagcgtctggcctctggtggccattcgcggcgacgtcaactatgtatcgataggtcaacgcagcaatattcaggacggtagcgttctccatgtgacccataagtcctcttataagccggagggaaatccgctgatcattggtgaggatgtaactgttggtcataaagtgatgctgcacggctgcactatcggcaaccgcgtactggttggtatgggttcgatcttattagatggtgtcgtcgttggcgatgacgtcatgattggtgcgggcagtctggttccgcagaataaacagctggaaagcggctacctttactttggcaatccggtcaaacagatccgccccctgacagaggcggaacgggaaggactcaagtattcagcaaataactatgtgaaatggaaaaatgagtacctggatcaggataaccagatccagccctgagcatcttcctgaccatcgcggatcaatgcttctgcctcttcctctagatcccaacgatgttcctggaaggcggccagccactgcgctggcccctctgcgccgaaacgctgctgcaagatttggcctgaaattgcgcaggttaattgcatcccattcaccagcgcgggaaaaaccacgccctgccgttcggcatcccatgattcccggtcaggaaactgaatcgcctgattcatgcattcagttcctgctgcagcgtttcaatgaccggagcgatagccggcagaacgccgtgccatagcagaacagcatgggcggcttgcgccaccagcattcccagcccatcggcacagtggactgcgccatattgctggcaccagtgaagaaacggtgtcggccctttctggtaaaacatgtcatagcaatatacgtcagcgttgacaatagatgccgggatagctggtacatcaccgtctattccactggacgtcgcattgacgatcagatcgaatgtttccccggataaggtatccatctcccttgcgctaacgctcccggtatgggcgaagagagtggctaactcacgggcacgagaataggtgcgattcacgatcgtgacggcgcatcccagcgacagaagcggcaaaagaaccccgcgagatgccccaccagcaccaaccagcaggatccgttggcgtggcttaatgaatcccaggcgttccagatcgctcagaagaccaataccgtcggtgttgtcccccagtaaacggccatcttccaggcgtttcagggtgtttactgctcccgccagcgctgcgcgttctgtcagttcgtcggcacgcgcaaaggcttcctctttaaaaggaacggtgacgttggccccctttcctccttctgcaaagaactgattcagagaagagacaaaatcgtccagcggcgccagtacacgtccataaggatgagtaattcctaactggcgggcaaacagctgatgaatagcaggcgacttgctgtgcgcgatcggattaccaaaaacggcataggtttccatggttcacccctggcggaacagttcacccgtcagggcatcacggatttcagatgggttttgccggccgcccgtggcgccatccaccaccgggaagctgtcgccaaactgagcatggacctctgcggtagtacggcacggtggttgcccggtgagattggcgctggtcgaaaccagtggttttccgtaggcttcgcacaattcgattaccagcggatggttagtcacgcgtacggccagtgaatcaaaacgtccagtcagccagcgcggcgtttcaggacgcgccgggaatacaaacgtcaccggtcccggccagcaagagaagatggcttcccgctgtgagtcacttaaccgtgaatcatcaatatagggcttcagttgctcaaagctggcggcgataaggatcaatcctttctcaacaggacgctgcttcagctccagcaggcgcataacggccgtttcgctgtcagggtcgcagccgacgccaaacacggcttcggtgggataggcgatgacatgttcatttttcaggaccgccacggcatgggcgacggcttcggagggcaggttattgttcactgatttattccgccgggatcggctttccacattgtttactggcacagaagcgtctgagcccctgcgccgtcttcttttctattaacagcgggtaatggcattcagggcattcgcccgccgccggtttaaaattgataacgaactggcaatcaggatagcgatcgcaggagtgaaaggttttaccgaaacgggaacgacgctggaccagatggccttgtccgcactgcgggcaagcgatagccgtctcatcgggtttatcaatcagctcggtatgttcacattccggatagcggctacagccaatgaacatcccaaaacgcccctggcgtaacaccataaccgcaccgcacgatgggcactcttgcccctccagcaccttaacgatatggccgtccgcctggcttttcaggggacgaatatagtcacagtccggataatgcgaacagccgagaaacgggccatgtttcccggaacggatcaccagttcggccccgcactgcgggcagggctcatttttacgcaccgaaaacagtgctgatttggtcataacaactcgatgttgctgcaaaaagattaatgcagcataccttcatttacttcgaagagtaattcttccatttgctgataggcgttttcacagcccggaatattgaacagtaccatcaggatgacccatttcaggtcttccagctcaaattccgccgtatccagcgccagtacgcgctctatcaccatttctcgcgtttcgaggttcaacacctgaatctgctcgaggaagagtaaaaacccccggcaactggcatccagacgctggcactcctcttcggtatatacccgaagagagagcgggtcggaagcgagctgcatgggttcaacgagaccttcctgataatcagccagtttctcgagccacattaacgcgttatagatgtcttcccgctcaaaacccgcatcggtaagatcccgcgtcagtttgtcctgatccacgcgcatttctgcttcgctatggatgtaagtttcaaacaaatacatgagtacgtcgaacatggcttgccctccttaatcggacatagccgccgggtacagctgcgatccagcctgctaactccagttcaagtagctgagctacggttactggcacagattggccggcacgttcagcgacaacgtcaacaggtgttacctcatctcctacgttagccaggagctccggaaatggcaatgctacagacggctgatcgacgcaaatatttatcgaatcagacgtatcagtcagccaggccagctcgttatgccagtattccacaatatcctctggcgaggtcactggcaccgcaccttgcttaattaaccagtgcgggccttccgatcccggattgcctaccgggccaggcagggcgaacacatcccttccctgctccagggcgcagcggacggtgaccagcgatccgcttcgcaacgccgcctcaatcaccagcacgcccaggcttaagccgctgataatccggttgcgcctggggaaatgtgcgggaagcggcggcgtaatgagtggaaattcagataccagcgtaccgccattgtcgatgatctgccgggcgagggttgcatggcgccgcggataaacctgactcagcccattgaccagtaccgcgatagttttaccctccgccgccagcgcgccgcggtgcgcgaccccgtcaatgcctaacgccagcccactggtgatggtaatccctttatgcgccagcgtttcgctgaacagtttcccccagcgggcgccataccaggagtgcgagcgactgccaataacggcaagctgcgcgctgtgaagcagggcgaggccgccgctgaccagcaacgcgccggggtaatcagcgatagcctttaaccgcaatggatagcgcggatcgtcaccccgtaacagatgatgatccggttgttccagccagcgccgcgtctcgtcaagctcatgctcgtcaagccggaaaaataactttgcctgcgccgcggtcatcccgatggcatgcagcgcttcacgatcaacgctggcggctgcgcataagcgctgagcgacctctaccatcctgtcgccatacaagctactgaccttcatcagccgcagccaaatctcgtcgggcgtcatccttaccccctgccataagcggtattgacaatctttgcgattggacagtgagactgtcaattgcagggggttttgtctagaatagagctaataatcttatcaactcctgaatacgactctggaactttatggcagttttgcaagtgttacatattccggacgagcgccttcgcaaagtcgccgagccggtcaaagaagtgaatgcggaaattcagcgtatcgtcgatgatatgttcgacaccatgtacgccgaggaaggcatcggtctggccgcaacccaggtcgatatccatcagcgcattatcgttattgatgtgtcggaaaatcgtgaagagcagctggtattaattaacccggaaatgctggagaaagatggcgaaaccggtattgaagaaggctgcttgtctattcctgaacagcgcgccctggtgccgcgtgcggaaaaagtgaagatccgggcactggatcgcgatggtaagccgtttgaactggaggccgatggcctgctggctatctgtatccagcatgagatggatcacctggtcggcaaactgtttattgactatctgtcaccactcaaacaacagcgcattcgtcagaaggtagagaaactggatcgtttacgttcccgtgcctgataacaaggaataccgtgtcacaatcactacgtatcattttcgccggcacccctgattttgcagcgcgtcatcttgatgcgctgctgtcgtctgaacatcaggttgttggcgtattcactcagcctgatcgccctgctggtcgcggcaaaaaattgatgccaagcccggtaaaagtactggcagaagcccataacttacctgtgtttcagccatcctccctgcgtccgcaagataaccagcggttagtcgccgatctcggcgccgatattatggtggtagtggcgtacggtctgattctgcctaaagcggtgctggagatgccccgtctgggctgtatcaacgttcacggctcgctgctaccgcgctggcgtggcgcagcgcctattcagcgttcactgtgggcgggggatagcgaaactggcgtaaccattatgcagatggacgtcggccttgatacgggggatatgctgtataagctttcctgccccattaccgcagaggataccagcggcagcctgtacgataagctggccgagctcggccctcaggggctgctggcaacgttagcccagctggccaacggcaccgcacggcctgaagtacaagatgaatcgctggtgcgccatgccgaaaagctgagtaaagaagaggctcgtatcgattggtcgctttccgctgcgcagttggaacgctgcatccgcgcgtttaatccgtggccaatgagctggctggaaattgacggacaaccggtaaaagtgtggcgggcatcggtcatcgccgaagccgctcacgccgaaccgggtactatcgtggcagcaaccaaacagggtattcaggtcgccacgggggatgggatcctcagcctggagtcgctacagcctgcgggtaaaaaagcgatgagcgcccaggacttactcaattcccgccgggagtggtttatccctggcacccgtctcgcctgacggtcgtctcttctgaagcccgggttcgccgggcatttttatttttgcgcttatgaaaaagaatataaatttacgcagcctggccgcccaggctatcgaacaagttgttgaaaaagggcagtctttaagcaacgtactgccccctctacagcagaaagtcagcgataaagataaagcgctactgcaggagttgtgctttggtgtactacgtactctaagccagctggagtggcttatcagcaagctaatggcgcgtccgatgaccggcaaacagcgcaccgtgcactttctgatcatggttggtctctatcagttactctacacccgcattcccccgcacgccgcgctggcggaaacggtagaaggcgcggtggccattaaacgcccgcagcttaaagggctgatcaacggcgtgctacgccagttccagcgccagcaggaagcgttgttagccgaatttgctgagcatgaaaaccgctatcttcatcccaaatggctgctgaaacgcctgcagcaggcctggccggagcagtggcaggagatcgtcgatgcgaacaaacagcgcccgccgatgtggctgcgcgttaaccgcaaccatcattcccgggatgagtggcttgccctgcttaacgaggccggtttagagggcttcacccaccctgattatccggacgccgtacgcctggccacccctgccccggtccacgcgttaccaggatttgatgaaggttgggtaaccgttcaggacgcctcggcccagggctgtatgcgctacctgcaaccggaaaatggcgaacgcatcctcgatctctgcgccgcgccgggcgggaagacgacgcatattctggaagtcgccccccagtctcaggtcatggcggtggatattgatgaacagcgtctgtcccgcgtctatgacaacctgaaacggctgggcatgaaagccgaagtcaagcagggcgatggccgcttccctgagcagtggtgtggcaatgagcagttcgatcgtattctgctggatgccccctgctccgcaaccggcgttattcgccgccatccggatatcaaatggctgcgccgggatcgggatatcgccgagttagcccagctgcaggccgagatcctcaatgccacctggacgcacctgaagcctggcggcacgctggtttacgcaacctgttctattctgccggaagagaacagtcagcaaattgccgccttcctcgcgcgaaccccggatgcagaacttcacgccaccggcacgccggcgagccccgggcagcaaaatctgccgggcgtggaagaaggtgatggcttcttttacgctaagctaatcaaacgtcggaactaatgggtcactgcagatgaagattattattctgggcgccggccaggtcggcggcacgctggcggaaaacctcgtcggcgagaacaatgatattacgctggttgataccaatggcgaccgtctgcgcagcctgcaggataagttcgacctgcgtgtcgtccaggggcatggctctcaccctcgcgtactgcgcgaggcgggagccgatgatgccgatatgctggtagcggtcactagttcggacgaaaccaacatggtggcctgccaggtcgcttactcattgttcaatacgccaaaccgcatagcgcgtattcgtgcgcctgattacgttcgtgatgcggaaaagctcttcaactctgaagcggtacccatcgatcacttaatcgctccggaacaactggtcatcgacaacatccaccgtctgatcgaatatcccggcgcgctgcaggtcgtgaacttcgccgaaggaaaagtcagtcttgcggtagtaaaagcctattatggtggcccgctggtggggaatgccttatccactatgcgggagcatatgccgcatatcgatacgcgcgtggccgccattttccgccacgatcgccccatccgcccgcagggttcgacgattgtcgaggccggagatgaagtcttctttattgccgcctcgcagcatattcgcgcggtcatgagcgaactgcagcgactggaaaagccgtataagcgtattatgctggtcggcgggggcaatattggcgcgggtctggcccataagctggaaaaagattacagcgttaagcttatcgaacgtaatcagcagcgagccgctgagctggcggaaaagctgcagcatactatcgtcttctacggggatgcatcggaccaggagctgttggctgaagagcatattgaccaggtggacctgtttattgccgtcactaacgacgacgaagccaatattatgtcggctatgttggccaagcgaatgggcgcgaaaaaagtgatggtgctaatccagcgcagagcctacgtggatctggtccagggtagcgtcatcgatattgcgatttcgcctcagcaggccacaatttccgcactcctcagtcatgtccgtaaagccgatattgtcggcgtctcctccttgcgccgcggcgttgcagaagcgattgaggcagtcgcgcacggcgatgagagcacctcccgggtagtcgggcgttcgatcgatgagatcaaacttccaccgggcacgatcatcggcgccgtcgtgcggggcaatgacgtgatgatcgccaataataatctacggatcgagcagggcgaccatgtgatcatgtttttgaccgataagaagtttatttccgatgtcgaaaggctgttccagccaagtcctttcttcctgtaattcccagggcgccgaacaggcgcctttttattatcccttattattcaaaggttaatattttgcagtaactatctgctgggaatggcaaatgaaaatacatttgttaaacttacaacgtcagctggcacaaggagaataaaatgagttttttaaaagagtttcgcgaattcgcgatgcgcgggaacgttgtcgatttggcagtgggtgtgatcatcggtgcagcattcggtaaaattgtttcatcactggtcgcggatattattatgccgccactcggcctgttgattggcgggatcgattttaaacagtttgccgtcacgctacgtgatgcccagggcgatgtcccggctgtggtgatgcattatggggtattcattcagaacgttttcgatttcatcatcgtcgcgtttgccatcttcatggcgattaaattgatgaataagttaaatcgtaagaaagaagaggctccggcggcaccgccagctccctctaaagaagaagttctgctgagcgaaattcgcgatctgctgaaagaacaaaacaaccgttcttaatcagcagagaaagcagaaggccagtggtaaaaaagcgattcgcttgcttgccactggcctcccgatcaattcttcctgcatgtttatctttacgttgatagcttcctttccctttcttgtttttctctacgcgctgcctgaataacggatcgtggagaagtgcctcaatggcgttatctttaatttgtcctttagtatgctgatagcgactcatagttactccggtatatgtataaactcggcgcgagtgtagatccgcgcgtttaaaaaatcaacgtccgccattgccgttgctggccccttgttcaagggcctcaaggatagaacagtaaacgctgctgtgggcagtgccgcaacaggcatcgttgagccgctgcagagagcggcgcatcgtctgtagctctttaatccgcgcctcaacttcacttaatcgcgcctgaacgatccctttcgactcctgacaggtatgatgctccggatcgatgcggatcgacaataattcgcggatcgcttccagggtgaaacccagttgtcgggcataacgaataaagcgcagccgttgaagatcgttatccgagtacagacgaaatcctccctcggtgcgtatgtcatgatccatcatctgctgcttttcatagtagcggatggtatcaggcgtcacgtcagccagttttgccaattcaccaatacgatacatatttactcctgatttattttttgcagcaacgcatcggcgtactcaccgcgtaaaaagtcggtgttcagacctgcctgacgtaacttcagctcgagcagggcaaggcgtttgctaagttcggcatgacgcggatcgtcctgacggacgccgttcaataagtctgccagagccaacgcctctttgcgttgctccagttccggagggagacatcctgcatttttcagaaggcgatagcctgcccgcaactccgccggcacatgtgaatcgtcatcgagagtcagcggttctccgctgccgggtaaattatcgaactcacctttggtttgggcatcgaggatatgacgttccgcccactgatccagcaaccacattctacggctccaggggatgaacaaaaagagtacagatagtgtagtgaaatggggatggggtagatataaaaaaacccgcctgggcgggtttttttacgttactacagattactctgcagcagcttctgctttcggctcagcacgatcaaccagctcgatgtatgccatcggcgcgttgtcgcctgcacggaagccacacttcagaatgcgagtgtaaccaccggcgcggctcgcgaaacgcgggcccagctcgttaaacagttttgccacgatctcgttatcacgagtgcgggcgaatgccagacgacgattagcaacgctatcagtcttggcaagagtaatcagcggctcaactacgcgacgcagttctttcgctttcggcagggtcgtcttgatgatttcatgacgaaccagcgaacctgccatgttacggaacatagcctggcgatggctgctgttgcggttcagttgacgaccactcttacgatggcgcatgaccttatccttctcagtaaaaccttaacctgtgatccggttactcgtcagcaatgcttgctggtggccagttttccaggcgcatgcccagagacagtccacgggaagccagcacgtctttaatctcagtaagagattttttacccaggttcggcgttttcagcaactcaacctcggtacgctgtaccagatcaccgatatagtggatagcttctgccttgaggcagttagcagagcggacagtcaattccagatcgtcaacagggcgcagcaggatcggatcgaattctggtttctcttctttcacttctggctgacgtacatcacgtaggtcaacaaaagcttccagttgttcagccaggatggttgccgcacgacgaatcgcctcttcaggatcgattgtgccgttggtttccatttcgatgaccagcttgtccaggtcggtacgctgttctacacgcgcagcttcaacattgtaggcaatacgctctacagggctgtagcaggcgtcgaccagcagacggccgattgggcgctcatcttcttccgaatgaattcgggcagaagccggcacataaccgcgaccgcgctgaactttgatacgcatgctaatagcagcgttctcatcagtcaggtggcaaatcacgtgctgcggcttgacgatttcgacatcaccgtcgtgggtaatgtcggctgcggtcacagggccaatgccagatttattcaaagtaaggatgacttcatctttaccctgaactctcaccgccagccctttcaggttgagcaggatttcaaggatgtcttcctgaacgccttctttggtgctgtactcgtgcagtacaccatcaatctcaacctcggtcaccgcgcaacccggcatcgatgagagcagaatacggcgcagtgcgttacccagagtatggccgaagccacgctctaaaggctcaagggtcaccttggcgtgcgtcgaactcacttgctcgatatcgaccaggcgcggttttagaaactctgtcacagaaccctgcattgtgtcctctctttggtactaagctttacttggagtaaagctcgacgatcaggtgttcgttaatgtccgcagacagatcagaacgctccggctgacgcttgaacgtaccttccatcttgccagcatcaacttccagccaggttggcttttcacgctgctcagccagctccagagcggctttcacgcgagattgctttttcgctttctcacgaatgctgacaacgtcattcgctttaacctgataagaagcgatgttaacaacacgaccgtttaccataatcgctttgtggctaaccagctggcgtgcttcagcacgagtggcgccgaagcccatacggtatacaacgttgtccagacgaccttccagcagagccaacaggttttcaccggtgttgcctttcagacgtgctgcttctttatagtagttacggaactgacgctccagcacaccgtacatacggcgaactttttgcttttcacgcaactgcacaccatagtcagacagacgcggcttacgcgcaccgtgctggccaggagcttgttcaattttacacttggtatcgatcgcgcgaacgccagacttaaggaataagtcggtgccctcacgacggctcagcttgagcttaggacccaaatatcttgccattttctttctccaactaacctggaaaacgcagcgttatacgcgacgttttttcggcggacgacaaccgttatgagggatcggagtcacatcagtaatattagtgatgcggaaaccagcggcgttcagtgcacgaatggtagattcgcgacccggacccggacctttgaccataacttccagattcttgatgccgtattcttttacggcttctgcgcaacgctctgctgcaacctgagctgcgaacggagtggatttgcgagaaccacggaaaccggaaccaccggctgttgcccaacccagtgcgttaccctgacgatcagtgatggtaacgatggtgttgttaaaagaagcatggatatgagccacgccgtcagagacttgttttcttacacgcttacgtgcacgaattggtgcctttgccattattcaatcaccccgattatttcttgatcggtttacgcggacccttacgggtacgtgcgttggtcttggtacgctgaccgcgaaccgggagaccacgacgatgacgcaaaccacggtagcaaccaaggtccatcagacgcttgatgctcagggtgatttcacggcgcagatcaccttcaacgacaaatttacctactgcttcacgcagaatatcaatttgttcttcagacagctcactgatcttaacattttcagcgatgcccgtttcagcgcagatggctttagaacgggttttgccgataccgaaaatagcggttaaagcgataacggtatgtttgtgatcaggaatgttaatgcctgctatacgggccactatgcactcctactatttaatatgtacgcaccatgctgaaaagcccgttttcaggatactcaaatggaaacgtacagacatacaaaagattggctggctaatctagccagctcaatccaactttgcaagaaaaatatgcgaaaaaatcagccttggcgctgtttatgcttcggctcggcactgcaaatcacacggatgacaccatcacgcttaacgattttgcagttacggcataatttcttgacggaagcacgaactttcatttttactctccgtaacttctcgggcgaccagttttaacggccgtagcctttcaggttcgccttcttcaatgcagactcatactgactggacatcatcagagtttgcacttgagccataaagtccataatcacgacaacaacgataagcagcgaggtcccaccgaagtagaacggcactttcatcgcgtcacgcatgaactccgggatcaggcagataaaagtaatgtacaacgcaccaaccagagtcaggcgagtcatcactttatcgatatacttcgccgtttgctctcccggacgaattcctggtacaaatgcaccggacttcttcaggttatctgctgtttcacgcgggttgaaaaccaacgccgtgtagaagaaacagaagaagatgattgcagacgcatagagtaacacataaagcggttgcccaggctgcaaatacagcgaaattgttgtcagccagttccaaccagtaccacccccgaaccatgacgtgatggttgccgggaacagtataatactggaagcgaagattgccgggattacccccgccatattcactttcagcggtaaatgtgtgctctgtgcagcatagacacgacgaccctgttgacgtttcgcgtagtttaccacaatgcggcgttgaccacgctcaacgaatacaacaaagaaggtcactgcaaatactaatactgcaaccaacagcaacaggaggaagtgcaggtcgccttgacgcgcttgctcgatagtatgggcgatggccggcgggagtcccgcaacgataccggcgaagataatgatcgagataccgttaccgataccacgttcagtgatctgttcgccgagccacatcaggaacatagtccctgtgaccagactgacaacagcggtgaaatagaatgcaaagcctggattaatcaccaggccttgcataccaggcatattcggcagaccggtagcaataccgatcgactggaatatcgccagcaccagagtaccgtagcgggtgtactggctgatcttacgacgaccagactccccttctttcttcagttccgccagcggttgataaaccaccgtcagcagctgcacgatgatcgatgccgaaatgtacggcataatccccagcgcaaagatagaagcacggctgagagcaccaccagagaacatgttgaacatttcaatgatggtgcctcgctgttgctcaagcagtttggcaagtacagcggcatcaataccagggatcggaataaaagagccaatacggaacactatcagcgcaccgaccacaaacagaagtctgcgtttcagttcgccaaggccacctttggcactttgaaaatctaatcccggttgtttagccatctgctacttattcctcaattttaccgccagcagcttcgatagcagcacgagcacctttagtcacacgcaggccacgaacagttaccggacgagttacctcaccagacaggatcactttcgcgaactcgatctggacaccgataatgttagccgctttcagcgcgttcaggtctactacatcgccttctacgtgagccagatcggagagacggatctctgcggtgatcatcgctttacgagaagtgaagccgaatttcggcagacgacggtacagaggcatctgaccaccctcgaaaccgcgacgtacgccaccgccagaacgagatttctgacctttgtgaccacgaccaccggttttaccgaggccagaaccgataccacgacccaggcgtttacccgcctttttggagccttcggccggagacagagtatttaaacgcatctcttactcctcaactttaaccatgaaggaaaccgcgttgaccataccacgaacagcaggagtatcctcgcgctctacggtgtgaccaatacgacgcagacccaggccaagcagcgttgccttgtgtttcggcagacgaccgattgcactgcgggtttgagtaattttaatagtctttgccatggtttatttccccagaatttcttcaacggatttaccacgcttggcagcgaccatatccggggacttcatgttttccagaccgtcgatagttgcacgaaccacgttaattgggttagtggaaccatacgctttagccagaacgttacgaaccccagcgacttccagaacggcgcgcattgcaccaccggcgatgataccggtaccttcggaagccggctgcatgaatacacgagaacccgtgtgagtacccttaaccgggtgctgcagggtgccgtggttcagcgcgacgttaatcatattgcgacgggctttttccatcgctttctggatcgctgctggaacttcacgcgctttaccgtaaccaaaaccaacgcgaccgttaccatcgcctactacagtcagagctgtgaaggagaaaatacgaccacctttaacggttttagatacgcggtttaccgcgatcagcttttcctgcagttcgccagcttgtttttcgatgtgagccatcttacacctctaccttagaactgaaggccagcttcacgggcagcatctgccagtgcctggacacgaccatgatattggaacccggaacggtcaaaggaaacatctttgatgcctttttccagagcgcgttcagcgacagctttacccacagctgctgcagcgtctttgttaccggtgtacttcagttgttcagcgatagctttttctacagtagaagcagctaccagaacttcagaaccattcggtgcaattacctgtgcgtaaatgtgacgcggggtacgatgtaccaccaggcgagttgcgcccagctcctggagcttgcggcgtgcgcgggtcgcacgacggatacgagcagatttcttatccatagtgttaccttacttcttcttagcctctttggtacgcacgacttcgtcggcgtaacgaacacccttgcctttgtaaggctcaggacgacggtaggcgcgcagatctgctgcaacctggccgatcacctgcttatcagcgcctttcagcacgatttcagtctgagtcggacattctgcagtgatacccgcaggcagctgatgatcaaccgggtgagagaaacctaaagccaggtttactacattccctttgaccgctgcacgataacctacaccaaccagctgcagcttcttagtgaagccttcggtaacaccgataaccattgagttcagcagggcacgcgcggtaccagcctgagcccaaccgtctgcgtaaccatcacgcggaccgaaggtcagtgcattatctgcatgtttaacttcaacagcatcgttgagagtacgagtcagctcgccgtttttacctttgatcgtaataacctgaccgttgatttttacatcaacgccggcaggaacaacgaccggtgctttagcaacacgagacattttttcctccgattaggctacgtagcagataatttcgccaccaagaccagcctggcgcgctgcacgatcagtcataacacctttagaggtagaaacaactgcgatacccagaccggccataactttcggcagctcatcttttttcttatagatgcgcagacctgggcggctgacacgctgaatgctttctacaacagctttgccctggaaatacttgagagtaagttccagttcaggcttggtgtcgccttcaactttaaaatcttcgataaaaccttcttccttcagcacgttggcgattgccactttcagcttggaggaaggcatggtgaccgcagctttgttcgcggcctgaccgttacggatacgggtcagcatatccgcgatcggatcttgcatgctcatctgtctttactcccgtgattcaattggtgacaattaccagctagcctttttcagacccgggatttcaccgcgcatagcggcttcacggaccttaatacggctcaacccgaacttccgcaggaaaccatgcggacgacctgtttgacggcagcggttacgctgacgagacgggctggaatcacgcggcagagtctgcagcttgagaacggcattccaacgatcttcgtcggttgcgttcacatcagagatgatagctttcagttcagcgcgtttagcgaagaatttatcagctaaagccacgcgctttacttcgcgtgctttcattgattgcttagccattaagtaaccctaccttacttgcggaacgggaagtcaaaggcagccagcagagcacggccttcttcgtcagatttcgcagtagtggtaatggtaatatccaaaccacgaacgcggtcgactttatcgtagtcgatttctgggaagatgatctgctcacggacacccatgctgtagttgccacgaccgtcgaaagacttagcggacaggccgcggaagtcacgaatacgcggtacagcaatagtgatcaggcgctcaaagaactcccacatgcgttcgccacgcagagttactttacagccgatcggatagccctgacggattttgaagcctgcaactgatttgcgtgctttggtgatcagcggtttttgaccggagattgctgccaggtcagctgctgcgttatccagcagtttcttgtcagcgatcgcttcaccaacacccatgttcagggtgatcttctcgacccgagggacttgcatgacagaattgtagttaaactcagtcatgagtttcttaactacttcgtctttgtagtaatcatgcagtttcgccatcgtactactccaaattacttgatagtttcgctgttagacttgaagaaacggacttttttaccgtcttcgaatctaaagcctacacggtcagccttgccggttgccgcattgaagattgcaacgttagaaacctgaattgcagcttctttttcaacgatgccgcctggttggttcagagccggaaccggcttctggtgtttcttaaccaggttgataccttcaacaatgaccttgccggaagacaggacattcttaactttaccgcgcttacctttatctttaccggttaacacgataacttcgtcatcacgacggattttcgctgccatgattcgctccttagagtacttctggtgccagagagataattttcatgaacttctcggtacgaagttcacgagttaccggcccaaaaatacgcgtaccgataggctgctcgctgttattgttcagaataacgcatgcattaccatcgaagcgaatgacagaaccgtccgggcgacgaacacccttcttggtgcgcaccactaccgccttcagcacatcaccttttttgaccttaccacgcggaattgcttctttgatggtgatcttgatgatgtcgcctacgcctgcgtagcgacggtgcgagccacccagaaccttgatacacattacgcgacgtgcaccggagttgtcggcgacgttcagcatagtctgttcttggatcattttagtgctccgctaatgtcaactactactgagacccgaaaattagggtcgttaaaaagccccatatcgagggcgcggcattataacaccacaaaccagatatgggtagaaaaaataaacggctcatcgctgagccgtttatccgtatcgagaatgcgtactctattacagaaccgctttctctacaacgcgaaccagcgtccaggacttagtcttggacagcggacggcattcgcggatttcaaccttgtcgccgataccgcattcgttgttctcgtcatgtacgtgcagtttggtcgtacgtttgatgaatttaccgtaaaccgggtgtttcaccatacgttcgatagcaacaacaatggatttctccattttgtcgctaactacgcgaccttgcagagtacggattttatcggtcattacgcacccgccttctgagtcagtaaagtcttaacgcgtgcaacatcacgacgcacttgcttcagcagatgagtctgttgcagctggccacttgcagcctgcatgcgcaggttgaactgctcacgcagcaggttcagcagctcagcgttcagctcttcaacgcttttttcacgcagctcttttgctttcattacatcaccgtcttagttacaaaggtggttttgatcggcagtttcgctgctgccaggccgaatgcttcacgggccagctcttccggtacaccgtccatttcatacaggactttacccggctgaatcaaggcaacccagtactccacgttacctttacctttacccatacgaacttccagcggcttctcggtgatcggtttgtccgggaatacacggatccagatcttaccttgacgcttaactgcacgggtcatagcacgacgtgctgcttcgatctgacgtgcagtcagacgaccacggccaacagctttcagaccgaaagtgccgaagctaacatccgtaccctgcgccagaccacggttgcggcctttgtgcactttacggaattttgtacgctttggttgtaacatcagcgacgctccttatttacggcctttacgctgctgctttttaggttgagcagccggttccggttgttcaacagcagccataccacccaggatctcacctttgaagatccataccttaacgccgattacaccgtaagtggtgtgcgcttcagaggtgttgtagtcgatgtcagcacgcagagtgtgcagcggtacgcgaccttcacggtaccattcggtacgtgcgatttccgcgccgcccagacggccgctaacttcaactttgatacctttagcgcccagacgcattgcgttctgtacagcacgcttcatcgcacgacggaacataacgcgacgttccagctgagaagtgatgctgtcagcaaccagttttgcgtccagttcaggtttacgaacttcggcgatattgatctgtgcaggtacgccagcgatatccgctacgaccttgcgcagtttttctacgtcttcgcctttcttaccgataacgatacccgggcgagcggtgtgaatggtcacacggatgctcttagccggacgctcgataacgatgcgagatacagacgctttagccagttctttagtcaggaactgacgtactttaaaatcgctgtccaggttgtcagcgaattctttggtgttcgcgaaccaggtagagttccatggtttgacaatacccaggcgaataccattaggatgtactttctgacccattgctagtctccagagtctcagcgatcggacacaaccacagtgatgtggctggtgcgcttcaggatgcgatctgcacgacctttagcacgcggcataatgcgcttcatgctcgggccttcgtctacgaaaattttcgcaactttcagatcatcaatgtcagcgccatcgttgtgttcagcgttagcaatggcagattccagtaccttcttgaccagtacagcagcttttttgttggtgtaggtcagaatatccagggcctgcgacactttcttaccgcgaatcaggtcagctacaaggcgaaccttctgagcagaagaacgagcatggcgatgttgagctaaagtttccatctcttcctcctaccttatttcttcttcgcttttttatcagcagcgtggccgcgataagtacgagtcggtgcgaattcacccagtttgtgaccgaccatttcgtcggaaacaaatactggaacgtgctgacgaccattatggacagcgatggtcaaaccgatcatgttaggaaagatcgttgaacgacgggaccaagtgcgcaggggcttcttgtctccgctttccaccgctttctctaccttcttcagcaagtgcaggtcaataaaaggacctttcttgagagaacgtggcatggcttatcctctaaaattatttgctacggcgacgtacgatgaatttatcagtacgcttgttgctgcgggtcttcttacctttggtctgcaggccccacggggataccgggtgcttaccaaagttacgaccttcaccaccaccatgtgggtggtctactgggttcatcgcagtaccgcgaacggtaggacgaacaccacgccagcgtgcagcacctgctttacccagaacgcgcagcatatgctcagcattgccaacttcgcccagagtcgcgcggcagtctgcttcgactttacgcatttcaccagaacgcagacgcagggtgacataagcaccgtcacgagcaacgatctgaacgtaagtaccagcggaacgagccagctgaccgcctttacctggtttcatttctacgttatgaacggtagaaccaaccgggatattgcgcatcggcagggtgttgcctgctttgattgcagcatcaacgccagactgaatctggtcgccagctttcaggcctttcggggccaggatgtaacggcgctcgccgtctttgtacagaaccagcgcgatgttcgcggagcggttcggatcgtactcaagacgttcaacaactgccgggataccatctttgttgcgtttgaagtcaacaatacggtaagcctgcttgtggccaccaccgatatgacgggtggtgatacggccattgttgttacgaccaccggatttgctgtttttttccagcaacggagcaaaaggtttgcccttgtgcagctctgggttaaccactttaacgacgtggcgacgacccggagatgtcggtttacatttaacaactgccattgtattactcctccgacttactcagcgccgccaacgaagtccagattctggccttctttcagggtgacgtaagcttttttccagtcgctacgacgaccgatacgctgtccgtgacgtttaactttccctttaacaaccagggtgttaacgacttcgacttcgacttcaaacagtttctgcacagcagctttgatttctgctttggtcgcgtctttagcaactttgagaacgatggtgtttgttttttccatcgcagtagacgctttttcagaaacgtgcggtgcgcgcagcaccttcagcagacgttcttcacgaatcatgccagcatctcctcaacttgcttaacagcatcagcagtcattacgactttgtcgaaggcgatcaggctaaccgggtcgataccgttcgcatcacgtacgtcaaccttatgcaggttacgtgcggccaggaacaggttctcgtccagctcaccggtgatgatcagcacatcttccagagccatgtctttcagtttctgtgccagcagcttagttttcggcgcttcaacagagaacttctcgacaacgatcagacgatcctgacgtaccagttcggacagaatgcttttcagcgcgccgcggtacatcttcttgttaactttttgactgtggtcctgcggacgagcagcgaaggtcacgccaccggaacgccagatcgggctcttgatagaaccagaacgcgcacggccggtacctttctggcgccacggttttttaccggagccagtgatttcagcacgagtcttctgagcacgagtgccctgacgcgcaccggctgcataagcaacaacaacctggtgaaccagcgcttcgttgaaatcacgaccgaaggtagtttcggaaacagtcagcgcgctctgcgcgtctttcaatactaattccattgctatctcctcacgccttcacagctggtttaacgatcaggtcgctaccggtcgcacccgggacagcacctttaaccagcagcaggttgcgctcagcgtcaacacgtactacgtccaggctctgaacggttacacgctcattacccagctgacctgccattttcttgcctttgaacactttgcccggagtctggttctgaccgatagaacccggaacgcggtgggacaaggagttaccgtgagtagcgtcctgggtacggaagttccagcgcttaacggtaccagcaaaacctttacctttagaggtaccggttacgtcaacttttttaacgtcagcaaacagttcaacgctaatgttctgacctacggtgaattcttcgccgtcagccagacggaattcccacagaccacggccagcttcaacgccagctttagcgaagtgacccgcttccggcttggttacacggttagcttttttagcaccggtggtaacctggattgcgcggtagccatcgttagccaggtctttaacctgagtaacacggtttgcttcaacttcgattacggttactgggatagaaacgccatcttcagtgaagatgcgggtcatgcccacttttttaccgactaaaccaatcattgtttcaacctctcaatcgctcgatgacctgattaacccaggctgatctgcacgtctacaccggcagccagatccagacgcatcagagcatcaacggttttttcagttggctcaacgatgtcaaccagacgcttgtgagtgcgaatttcgtactggtcacgcgcgtctttgttgacgtgcggggagatcagaacggtaaagcgctctttgcgggtcggcagcgggatcggaccacggacttgcgcaccagtgcgcttagcagtctcgacgatttccgcggttgattgatcgatcagacgatgatcaaacgctttcaggcggatacggattctttggttctgcatgagaccagagctccaattattttatagacgaaatgattactcctcatacccattacgattgatgggagagtgtaaccgttcttacatagtcccccgattggggacattgtttgataacccaaatgcgattaccagggttcatattgaaccggccgtcaactttgacaggcccgcgcattatacgcaaattctggcgcgacgcaagtgctgtttagaaaatcatcaccaggatttgcgcgccttcgcattagcgcactgtacggggctgcaatgcggagtaagagggcggattgtgggctccattcccggaaaatgccttttgtgctgaacgggagaggatgagcatagtgacgcaatgttcatcgatcattgcggggtcaactatgctcgccgccctccccttcttgctgtgctatagcggtttgaccgtggcattatgccaccaggatctgcgccacggtctgttgcccgaccgttacacctgtcccctgctgtggagtggtttacttttttatctctgtctggcgccgcaccagctgcatgatgccgtctggggggcgatagcgggctatctctctttggctgcgatttactggctataccgcggtatccgcggctatgaagggttgggttatggagatataaaatatcttgccgccctcggcgcctggcatggctggcgattgctgccgcagttagtcctggttgcctcgctactcgccggcatagcgtgggcaggagcaggtttatacgccagttgcggcaggaagagcaaatggggaagaagcaacccgctgccgtttgggccattcctggcggccgcgggtttttggtgcgggtggcagacgctggctagtctgacactttgatctgcgactgcaggtaattttgcagaccgattttgccaatcaaatcgagttcggtttccagccagtcgatatggccttcttcatccgccaggatctcaatcatcatatcgcggctgacgtagtcatggacgctgtcggcataggcaatagcctcacgcaaattttgcgccccttccagctccagcctcaaatcggaccgcagcatctcttccacatcttcaccgatgccaagtttgccgagatcctgcagattagggataccttcgagaaaaagaatacgctcgatatacttatcggcgtgcttcatttcgtcgatggattcgtggtactcaatatcgttgaggcgcatcaggccccaatttttaaacattctcgcatgaagaaagtactgattaattgcgactagctcatttcccaataatttattgagataacttatgattttgacatcacctttcattatatagtccctccgcttccactcattgaagcgtagtccggcctatagggatgtcaaaagagaagcgtggacttcaggcgatttctttgaattccggcatggtggttaattcatcttccatcacttcacgcgcggcacgaacacacttaccgcattgatttcccacgggaacaaacttacgtaattgctgaaaagattgcggttgaaactggcgcacaacctgacgaatttttttatcgctgacgccattgcacaaacaaacgtacatagaaactcccgttcaatttatgcacaaatattaaatgagaatggttatgattacaatagaccatttgctcattatccgccgcaacgcacgatatgaatagccagcaaaaatccgtttttcgctgaatgacagacagcaaaaagggcgccgaaacgccctttttaattcaaagctaacgaattagcccagaactttagctacaacgcccgcgccaacggtacggccgccttcacggattgcgaaacgcagaccgtcgtccatcgcgatcgggtggatcagggtaacaaccattttgatgttgtcgcccggcattaccatctctacgccttccggcagttcgatggtgccag

SEQ ID NO: 184 - DNA, 26295 bp, Unknown
  source: /note="Description of Unknown: MKP2_2161_1 Mutant Bacteria sequence"
cagcccaggccggattgttcgggttatggttcaggaaatcacgccacagcacttcggcaatgtcagccatacccatcggggcccccgggtggccggatttggctttctgtacagcgtccatgctcagggcgcgcagcgcgttggcgcattggcggcgagtggtatttgtcgttttcatcagtctttatccccgcggattacaacatctgctgaatctgttgttccagtttcacctgatcgacagcaaacagtcggatcccttccgctagtttttccactgccatgggatcctgatgatgctgccagaggaactccgcctgcgtcatcgggctgggacgggtttccgtcacgcagccgggagtcaactggcgggtcagcactccttcgctggccgccagctcgtccagcagtgccggagagatggtcaggcgatcgcagcccgccagcgcctggatctgctcaattcgacggaagctggcacccattaccaccgtgtcatagccatgggatttgtaatactgataaatctggcgcacagagcccacgcccggatcgctgtccacctgataggctgactgcggctggtgcttctgataccagtcgtagatgcggcccacaaagggcgagatgagaaagacgcccgcttcggcgcacgcccgggcctgagcgaaagagaacagcagcgtcaggttgcagtttataccgctctgctccagctcttcggcagcgcgaatgccctcccaggtggcggcgagcttaattaaaatccgctcgggaccaatgccatttttctcatataactggatgagcttgcgcgccttcgcgacgcacatcccgcgatcccaggcaaagcgggcatccacttcggtggagatacgcccgggcacatggcgcagcacctcgctgccgatatccactgccacctgatcgcaggcgttaatcaattgcgtttctgcgctgcctccctggcggcgtgccttgccaatcgcatcggcaatcagcggctgatactgcggcagctgcgcggccttcagcaccagcgaggggttggtggtcgcatcctggggtgcaaactttttaatcgattcaatatcgccggtatcagcaacaaccgtggtgtatttttttagttcgtctaactggctcatcatctgttccttatcttacgactgcggagattaatctctggcatgctggtgttcgtaataatcaatacgttccactttgggcgcggatccgccgccttcatattcggactcaagccacgcctgaataatttttttgcccagctcagcgccaatcacccgcgcgccaagggtaataatctgcgcgttgttacttttacgcgctcgctcggcggagaaggtatcgtgacactgtgcggcgcggaccccggggactttattggccacaatactcatcccaatgccggtaccgcagatcaggatcccacgctcgtgttcgccctgtttaatcgacatcgccaccgcatgggcaacatccggataaacggtactcccctggcgtttatcgctgctgtaatccgcgacgttaattcccaacccattcaaataagcgacgatggaatcgcgaaaagcataggcggcatcatccgcaccaatagcgattgttttcatggttatttccttaatttaacagtacgtcttaatgacaattcgggtaaaacgaaatttggtcgccaggctgaataatttgtggtggttcgccgtaaaggtgtaccgtcccgggtaattcagcgatatctgcgccatcaaaatttagcgtgatatggccaagctgtcgtaaatttgccgttgccacacggcctaccgcggtcacccgataatttttatcatttaatttcatttgctgaccaggcgataactcggcggtcagttcgctggcctggtgtacagcgcaataactcgcaatatcgtcgggaacggcatcggagaataaaataagccgcagctcctgcagagagtactcaacatattccccgacggcggtaatccgtaatgaatacaacggcacgctcatactatttgtgtcctttggcggcaggggaagataatgtcacgctctcttcacttttcacctctttcagcggttcagcggctggcgcacgctttttcagccgtttatcaaaccaggcgaccagtatcggcgcggtgatcatggtgataatgctcgccgtcgccagctgcgcggtggcggcatccacgtacatcgccagcgaaggatccgcctgggcaaccatcgccggcgtcagcgccgagctggcggcggtggttcccagcgcggcgcccagcgcgcttttcttcttcaaaaacaggttgtagataaagtagaacacaatcccggttagcgcggagataatccccaacaggatcccggacagcccggcggtgaacaccgtattgatactggagttggcgccgatggcgaacgacataataatgatcaccagcggctgcgccgcagcgcataactgtttaaagcgttcgtccagattgccccacagcatgccaatcagcagtgggatcagcatcgacagcagcgcggcgaagggaatattggccaggccgctgacgcccagccccatcatggtaacaaacggaccatccttgatgcagaatacggagatcgccccggcatcactggcatcgccatagttgctgcacaatgcgatatagagggagctgttcgagctggtcaggcaggcaatcagcgccagggtcgatattccgagaaaaccgctcgggccaaacaacgttcccgcaacccataccgccagtgccccggccagacatttgagaaacagcagcacggcgcctttatagagcggcaacccggcctgacggatattgatcgaggttccgcaaatgagcaaaaatatgcccatcatggcgctggaaccgactttaaataaggcggtggtcggcccgccaatgctgagcacctggggcgcgaaagtattaattaatatagccaccagcagtggaataataattaacccaccgggcaccttattcattttttcaagtatattaatattcatagggtaactcttaaattaagatttaacagagataacgacgcaatactaccctgacgaccattacgtcgtttattagttattagattactgggttattgctgtgcttcctgataaattcggtcaacaatgatgctaataatatcttccggtccggttagccctcctttcccgacgcaaattaagccggcataatcgccgccaatgatccgcaccatatcggtttgcgggatgacatagtcaatcatttctattccggtggcgcccagctcttttagtacattgaccatggtgtcaccaccggtcatatacaatcctttaatttcacccgacgcacagttaagcacctcgcgcacaatactgcccaatccgtggttaatattttgcgcagcctcaccgtgggccagaccaaatcgctgctcctcttcctgaaggtttagcaaccgcccggtcaaggcggactcaaaaacaaagagcgcgttgtgctgcgccggaacacactgtcgggcatgctgcaccacgcgattgacttcaatctcagcggcgtttttccggtcaaccaacagctcggcatccaccgggatatggcagacccgggcatcattagcgatcaaatactggagctgttttttggttactggcgttgcgctgccggcaacgatcaaaatcgagccgcgctggccgtccgctgtcaggctcgcgggcgcgctgctccgcgcttcgcgcatcaggccgcgacgaaccgccagccgttcggtaaagggccccggatcgacggccagcacgttccagttcagggccactaccgccccggcgatggcatcgacatcgtcgacggttatcgcatcgaccactatcacccgcacgccgcgctgttgttgttcctgtaaatcctgctggatttgcccttcgcctttcatcaccgatgtcagcgcgatatgcccgacctgatgatgggtctgcgccgccaacagtcccggcacccacgactcggtgaccggggtacgtacatcgcgagccacatcggtccgcgacagggctaccgaatcaatcaccgagtaaccgccgacgagaatacgccgtgactgcggcatcgccggcaccacaaccgccaccgtctcctgcggcagttgttccagcatggcgtcgatttcaaatccgatgccgccgcgcagcgtggtatcaatccgcttggtgaagtaatgcgcgccgcgagcctgcagctgtttcaccgcagcgctcactttgtgctgggcctccgctttcggcaatgggcggctgtcgctgctgaccaccatcgccggatactctacctcattgcgggcgaaggattcggtatcgaaaaacgcggcggtttttaaaccactgcgtgccagcagcaccccgacggtagttgccccggtcagatcgtcagccacgatcccaagctttccgccttccccttgcggccagaccatctcaatgcaggctggcgtcacgccggagacgtagatcccttcgtgtataaattccgccagcgggccgcttttaccggtgggatgcaggttaatggtgggaattccccgcttcggatagagtccgcagcgcaacgtgccgccgcagtcgatgaccattaaaccaatctcttccgccggcggttcgccattcttgaatacatcaatggaaggccagccggtcagttcgctcaggcggtcgacgaccgggggacggatccccccggtgatgtacgcaatctttttcccctgacctggcgtgatagtcagcggcccgccccagcccttacagcccttgctaatcaacagatgtttttccatttctctgtcctcgtgattcgcatgaacctcagcgattattgatgcttcattttccagtaacgggccgccaccagcgtcgactccagcatactgacggtacccgccttaccggtaccggcgatatcaaacgccgtcccatggtcgacggagctgcgcataaacggcaggccgaaggtaatggtgatcgaacgttcaaagtcgagggttttgcaggcaatatgcccctgatcgtgatacagcgagagaatggcgtcgtagcgcccctgtttgccgagatggaacacggaatcggccggaaccggcccgatagcgttgatccccatctcctgggccgctttcaccgccgggatcagattgtcagcctcttcgtgaccaaacagaccattgtcggaaccatgcgggttcagggcggccacggcaatgcgcggatttttgatgttcagggcggtaaattcatggtggatctgctgaacgcaggccagcactcgcgctttgttggcatagtcacaggctgcttttagcgccatatgacggctcacgaagaagacgcgcaggttgtggacgtggaacatggtcagaccgtaatcagattgggtttccacctgatagatttcggtatggcccgggagcttacatcctgccagcttgatggcttccttatgaattggtgcagtagagaccacgtcgatcagccccgctttgcccagctcgatcgacttcatcacatagtccagcgacatttgccccgccagtttctgcaccttgccccattcgatactgtcgcaatcgtagtcgccagtttccagaacatccaacgtcccccagctaaaacgggcctcctgcggatgggcaattttatggatagcaaaatcgcagcccatgattttcatcgcccggctgataatcggtaccgagccgatcaggaacggtttgcactcgtcatacacgcttttgtccatcatggtggccacggtgatctccgggccgatccctgccggatcgccaatggtaatcgccacaacgggttttttctctgctgacatcatgcgcctctcattttttcagttgactgttcatatgttcactatcaaatcatatgctcaaaacattacctgatgaatgagccgccatgagtgatgaagatcacataaaaaaattcatagatttttttcatcgaaaaatgtgatctaacatatgttcatgcagtgataaaaagttcaacctcaatacagggtatggccccgttcctggcaagtatttgattttattaagaggagaagcaatgatgaccccgatatggttaggaaccagctggaaaatgaacaagccgctgtcccaggccatggcctggtgcgaaacgctggcagcgcggatgccggagggctgtcaccccgctattcagcccttcgtcattccccccttcaccgcgatccaacccgtcagccattttctgcaaacgcatcagttaccgcttctgaccggcgcgcagaatatgcatgaagcggatcagggcgcctggaccggggaaatctcggcggccatgttggcagaaaccggcgccacgcttgttgagctgggacattcagaacgacgtgccgcctttaatgaaagcgatgccgcgattaatcgaaaagtgcatagcgccttaggtcatggcctgcgcccgctgatctgtattggcgatagcgccgaggagaaacgctggcaggtgtcgcgtgaaagcgtggtgcggcagatgaagatcgccctgtatggcctgagccaccagcaggcgctgcggaccctgattgcgtatgaaccggtgtgggccattggcgaacatggtacgcccgcctcaccgcaggaggcgggcgtcattcatcaggcgctacgtcaggcgctttgcgagcggtttggtcacgagacgggaacccgtatcccgctgctctatggcggcagcgtaacgctgcaaaacgcggtggaattgctgcgccagcaggagatcaatggcttgtttatcggccgcgcggcctgggacgcgcaaggctattgcgacattgttcaacgcgttacacaggaatttattttgcaggcgcagtaatataaaagggacaccagagatggaaattccaggccatgattgaacaagactcagattacgccctgctcactgaaattgcggtggcttattacgatcaggaacaaacgcaggaagagatcgccaaacgattcggcatttcgcgtatcaaagtcgggcgcctgctgaaaaaagcgcgccaggaagggattgttgagatcagcgtcaaataccatccggtcttcagctcccagattgagcagcagtttatttcgcactttggcattaagcgcgcgctaattgccctggatcaccatgatgaagatgaacagcgccagcaggtggcggccctggtcagtaactaccttgccggggtgttaaaaaacgatatgaccgtcaccgttggtcaggggcgcaatgtggccgcggtggcgaatcacgttggcgtgtttcctgagcgccactgccgctttatctgcggcatcggcggaaccaagcgtgacaatcagctgattgacgccgaccacatcagccggaatctggcgcgcaaatttaacggcttcagtgaaacgctttatgccccggcatatgtggaaaccccggagctgcgcgcggcctttatgcaaaaccgcctgattaaggccacgctcgaacaggccagcaaagctgacgtggcgatcatcggcctcggcgatatgaatgaaaacagctttatggtgcagctcggctggtttacgccgcaggaaattgccaccgcgcgtcaggaacagggggtggtgggcgatctggcggggtacagctttttcaatattcagggcaaacccgtcgatacggtgatgaatgaccgggtcattggcttaagtctcgaacagctgcgggccattccctgcgtcatcgctatcgcctccgaaagtacgaaagcgacggcgatcctgggggcattacgcaccggggttatcgatgtgctggctaccagcgcctcgaacgcccgttcggtcattaatatgcaaaaggcgctataaataagccgcggcgcaggcggcggatcagcgttgaccgccgtcgtgctggcctttgcccttccctttttcggctcgccgctgcacaaaatcttcaatgatgccgacaacccagttgagaggtttccacagcaccaccagcagcagcaacgggccgtatattcgcacaccgcccgtcgcgacctgaccggtcaacagcagagctaagatatccagcagcaggcacaacgcgctgccagtgccgaggaacagacatagcaggaagaggatcggtcggctatcggcgtgtagcggtaaagcgcgctggctccagacgccaacgataatggccgcgatcaacatgatcgcttcgataaccagcggattatgcatggtctgactcctgtcatgacgtgacatccttgtcagcagcgctgccggcggccgtgggctgcgccctagctaccggcaggcggcttcagtttacagcgcgttttcctgcagcagcttatcgataaaggcaggcaccacttcgcttgccagcccgtagtgcttctcggcaaactcgctgcccccctggctgggctccaggttcagttcaacggtatgggcgccgtgcagtcgcgcctcgtgcacaaagccagccgccggatagacatggccggaggtgccgatggcgataaaaatatctgcgtcggccagcgcgctgtagatctcatccatccccagcggcatttcgccaaaccagaccacgtgcggacgcagcgccgccgggaactggcagcagtggcacttgtcctcggcggtgacgtcgccggtccactccagcacctggccgctccacgaacagcgcacctttagcagctcgccgtgcatatggatcacccggcggttgccggcgcgctcgtgcagattatcaatattctgggtgaccagcagaaaatggtcgcccagcagatcctccagacgcgccagcgccagatgcgccgcgttcggcttgatttccggactctgcagctgacgacgacgggcgttgtagaacgcctgcaccagcgccggatcgcgggcgaagccttccggcgtcgccacatcttccacccgatgctcttcccacaggccatcggccgcgcggaaggttttgatccccgactctgccgagatgcccgcgccggttaacaccaccactctcggttttgccatcgcttcaggcttcatcctgtcctccctaaagaaaatccgctgacgcagacggtcacgcaaccgacgtttattgcgacgaaaacggctcaatcgatgtaaacggcgcgactgcatagctacctctgtgattaatgggtcaggtgaaggaaggccgcaccgcgcattcccccggcatcgccgtggcgcgcgcgctcaatgcgcggaaccctggcgaccggcagaagatggcgcggcaatcgttgcgccagcccttcgctaatggccgtaaagttagataatccaccgccgagcaccagcaaatccgggtcgacaatggtcagtatattccccagacacaccgccagcagatcgagatagcgctcaacgtgcgcctgcgcgcgcggatcgtgctgctgccactgcgccacaatctccggcgaggagagcggttgctgataaaaatgttcgtacagccaggcgaaaccgcgaccggagagataattttcaatacagcccagctggccgcagccgcagcgcagcagcggaaaatcgcgcccaaccacctccagggcatccaccggcaggcgaatatgaccgaactcgccggtgatatagctatgtccggtaatcgatttaccgttcaacaccaggccgccgcccacgccggtgccgaggatcaatcccatcaccagcgggtattgcgtaaactcatcgtcccacgcttccgacagcgcgaaacagttggcgtcattatcgagacgcacatcgcgccccaaccgcgcgctgaggtcagcgcgcagcggccggccgctggcggctggcacgttagcggcatacagcgtgccgtccgccgtttccggcattcccggaataccgatcccgaccgaaccctgctggtcgaagcgctcatcggcctcgcggaccagcgcctctaccgcctggagaaaatcctcataactacttttcggcgtagcgacgcgtttttcccactgcagtcgccgctcctgattaaatacgcccagcgctatcttgctgccgccaatgtcaaatccataatacatttcagcaattcctcttgtgtcgtcagccaggccgacgatgacgataaattactggccactcagcaccctcgccgggtcgatgcggctggcgcggcgggcgggataccagctggccagcaaactcagcaacagtgctgtcaccagcacataaaagacgtccagccagtgcaattctgacggcaggaagtcaataaaatagatgtcgccggagaggaatttatgcccaatcaggtattcgatgccgttgatgatcgacgtcaggttcaacgcgcagatcacgccgatcaccaccccaaacaggctgcctaccgatccggctaataaaccataccacacgaaaatcgcgcgaattaagccgtcttttgcgccaagcgtgcgcagcaccgcaatatcgccgcttttgtctttgaccgccatcaccagcgtcgagacgatgttaaagcaggccacgccgatcaccagcaccatcgccaggtacataatggcgcggatcatctggatgtcgcgatacatatagccataggtgccgatccagctcttgatgtagacgtagctgttggtcacctcgccggcgtcgcgtaccagcttgttagcatggaaaacgtcggtgaccttgatggcgatgccggtcacgctgctgcccatctccagatactgctgcgcatcctgcatcgggatcatggcaaaactatgatcgagctggccactcagctgtaaaattccggttacatgcagcctgacgcgttttggctgcagcagctgatggtcggcgtcggcattagggatcatgatcgacacccagtccccctgcttcacgtgcagggcatcggcgacccctttgcccaggatcacttgctgttcgccagccttgaatccggcccacgcgttattctgcacaaaggtaggcagcgcgctgagctggctctcctgctgcgggtcgacgcctttcacctggatggcgcgcatattgctgccgctctccaccaggccggtgaagttaatatagggcgctgccgcgacaatccccttcaccttctgcaccttcgccagcgcttcctgccagttattccacggctgattcacgggttcgatttcgccgtgcggtaccaccgccagcacgcggttattcagctcgcgctcaaagccgttcatcgcgctgaggccgacgatcagcaccgccacccccagcgcaatgccgatggtggagatcaccgagatcagcgacaccatgccgccgcgccgccggccgcggctgaaacgcaatgcaatcagtaacgataacggagacgccattactcggcccccatcagggtcaggtcggcggtcagacggccatcgcgcatctccagctggcggctcatgcgcttcgccagctgcaggtcgtgggtcaccaccagaaacgcggtgcgctgcgcgacgttcagttcgcccagcagctggaagatgctgtcggcgttgcgagcgtcgaggttaccggttggctcgtccgccagcaccagccgcggtttattcaccagcgcgcgggcaatcgccacccgctggcgctcgccgccggagagctccgacggacggtgatggctgcggtgttcaagcccgaccgcctgcagcatcgctttcgcctggcgttcaatatccgccggcttctttttgccaatcagcagcggcatcgccacgttttccagtgcgctaaagtccggcagcagatggtggaactgatagataaagcccagctcgcggttacgcaggtcggcgcgcgcggcggtggatagcttgctcatcggctgaccggagaaaatcacgtcgccagaggtgggcgtatccaggccgccgagcagatgcagcagcgtacttttgccagagccggaggtgccgacgatagccatcatctcgccttcaccaatgctgaagctgacattgtgcaggacatcggtttgcacattgccttcctgatagcgtttgcacaggttgtcgcattgcagcaggatcttattcataacgtaaagcctcagcgggttgggtggcggcagcgcgccaggaagggtacaacgtagacaacagggccagcaccatcgccaccagggcgataacaatgacctgcagcggctcaatcgccaccggcagcgccgcgccgtcaaggaaggcgccgatgatcggcattaaattattcagctggctggccaacagggcgccaagcaccgctcccagcagcgcgccgacgatcccggcgctggccccctgcaccataaagacggccataatctgccgcggcgtcagcccctgggtctggaggatcgccacttcgccctgcttctccatcaccatcatccccagcgaggtaataatgttgaaggccgcgacggcgacgatcaggctcagcagcaggcccatcatatttttctccatgcgcaccgcctggaacagttcgcccttgcgctcgcgccagtcctgccactgagttcccggcggcagcgtctgttgactcagggtgtcgacctgcagcggtttatccagccacaggcgccagccggtgatattccccagcggatagcgcatcagacgggaggcgtcgtcgatgttggtcagcatctgatagccatcgacttcgctgttggcggcgaaggtgccgatgaccgtgaacagacgctggctcggcacgcggcccatcggcgtaaactgactcgcggaaggaaccatcacgcgaattttatcgccgcgattaacccccagctggcccgccaactgctcgccgagaataacgttatatttgcccgcctgcagatcgctctgtttgacgttcaccaggtatggagtcaggggatcgttctgcgccggatcaatgcccagcataaccccgaccgccacgctgcgcgcgctctgcagcaccacgtcgccggtggtgatcggcgctacgcgggttaccccattaagtttcgcttcgcgctccggcagttgctgagggttcaccgaaccctgtttggcgctaagaatggcctgtggcatcagccccaggatgttgttttgcagctcgcgttcaaagccgttcatcaccgacaggactgtcaccagcgccattacgccaagcgtaataccgatagttgagagccaggagacgaaacgaccgaagcggtcggctgcgcgcccgcgcatatagcgtaggccgataaagagtgcggcaggttggtacatgtcatccatctggttgctgatagccgatgcccgagtatataagcgattagaggcagcgtaaacgactgatacatgacgactttattagcaataatcctaaaaaccaagtaaatacaaacggatagataagtacttacttatttatctttacgcttatcgacagcgctgacctttcttcacccaatacgcgatggcaattcgggttggcgaatccagaccaatcgcggataatctcactattgaatatcagcgagttgccctccatatcggcagagcgaatccctaagagatcatgaaaccgtctatgcctgaacaatatcgatactcattgccggtcaaagccggcgatcagcgccagcttggcgagttgaccggcgcagcctgcgccaccctggtggcggagatggccgaacgccacagcggcccggtggtgctggtggcgcctgacatgcaaaacgcgctgcgtctgaacgacgagatcaggcagtttaccgacagcatggtgatggggctggcggactgggaaacgctcccttacgacagcttctcgccgcatcaggacatcatctcctcccgtcttgccaccctttaccagttacccaccatgcagcgcggcgtactgatcgtcccggtcagcaccctgatgcagcgcgtctgtccgcacagcttccttcacggccacgcgctggtgatgaaaaagggccagcgcctgtcgcgcgatgcgctgcgcgatcagttggagggggccggctaccgccatgtcgatcaggtgatggagcacggcgaatatgctacccgcggcgcgctgctcgacctgttcccgatgggtagcgatcagccctaccgccttgatttctttgacgatgaaatcgacagcctgcgcctgttcgacgttgacagccagcgcacgctggaggaagtggcggccattaacctgctgccggcgcacgagttccccaccgaccagaccgctattgagctgttccgcagccagtggcgcgaccgctttgaggtgaagcgcgatgccgaacacatctatcagcaggtcagtaaagggacgctacctgccggtatcgaatactggcaaccgctgttcttcagcgagccgctgccgccgttattcagctatttcccggccagcacgctgatcgtcaacaccggcgatctcgaggccagcgcggaacgattccagaatgaagcccgcgcccgctttgaaaaccgcggcgtcgacccgatgcgcccgctcctgccgcctgagctgctgtggctgcgcagcgatgagctattcagcgaactgaaaaaatggccgcgcgtgcagctgaaaaccgaacgtctggcggacaaagcggcaaatactaatctgggctaccagacgctgccggacctcgccgtccaggcgcagaacaaagcgccgctggataatctgcgccgcttcctcgagtcctttaccggtccggtgatcttctcggtggaaagcgaaggccgccgtgaagcgctgagcgaaatgctggcgcggattaaagttgcgccaaaacatgtgctgcgtctggaggaagccaccggcaacggccgctatctgatgattggcgccgccgagcacgggtttatcgacagccagcgcggcctggcactgatttgcgagagcgacctgctcggcgagcgggtggcgcgccgtcgtcaggattcgcgacgcaccattaaccctgacactctgattcgcaacctcgccgaactgcatatcggccagccggtcgttcacctggaacacggcgtgggccgctacgcgggcatgactaccctggaagccggcggcatcaccggcgaatatctgatgctgacctacgccaacgatgccaagctatacgttccggtatcgtccctgcatcttatcagccgctacgccggcggggcggaagaaaacgcccccctgcacaagctgggcggcgatgcctggacccgggcgcgacaaaaagcggctgagaaagtacgcgacgtggcggccgagctgctggatatctatgcccagcgcgcggcgaaggcgggttttgcctttaaacacgaccgcgaacagtatcagctattctgcgacggcttcccatttgaaaccacgccggatcaggcgcaggcgatcaacgccgtcctcagcgatatgtgccagccgctggctatggaccgcctggtgtgcggcgatgtgggcttcggcaagaccgaagtggccatgcgcgccgccttcctcgccgtggagaaccacaagcaggtggcggtgctggtgccgaccaccctgctggctcagcagcactatgacaatttccgcgatcgtttcgccaactggccggtacgcatcgaaatgctctcccgcttccgcagcgctaaagagcaggcgcagatcctcgagcaggccgcggaaggcaaaatcgatatcttgatcggcacccacaagctgctgcagagcgaggtgaagctgcgcgatctcgggctgctgatcgtcgacgaagagcaccggtttggcgtgcggcataaagagcgcatcaaagcgatgcgcgccgatgtcgatatcctgaccctcaccgccacgccgatcccgcggacgctgaacatggcgatgagcgggatgcgcgatctgtcgatcatcgccacgccgccggcgcgacgcctggcggtgaagaccttcgttcgcgaatatgacgccctggtggtgcgcgaggcgatcctgcgcgaaacgctgcgcggcggccaggtctactatctgtttaatgacgttgagaacatccagaaagccgccgacaagttggcggagctggtgccggaggcgcggatcgccatcggtcacggtcagatgagggagcgcgaactggagcgggtgatgaatgacttccatcatcaacgcttcaatgtgctggtgtgcaccaccatcatcgaaaccgggatcgacattcccaccgccaacaccatcatcatcgaacgcgccgaccattttggcctcgcccagctgcaccagctgcgcggccgcgttggccgttcgcatcaccaggcctatgcctggctgctgacgccgcatccgaaagcgatgaccaccgatgcgcaaaagcgcctcgaggccattgcgtcgctggaagatctcggcgccggctttgcgctggcaacccacgatctggagattcgcggggccggggaactgcttggggaagatcagagcggtcagatggaaaccatcggtttctccctgtatatggagctgctggagaacgcagtcgatgcgctgaaagccgggcgtgaaccctcgctggaagatctcaccagtcagcagacggaggttgaactgcgcatgccttccctgctgcctgatgatttcatccctgacgtcaatacgcgcctgtcattctataagcgtattgccagcgccaaaaacgaacaggatctggaggagatcaaagtcgagctgatcgatcgttttggccgcctgcccgatgccgcccgcaacctgctggatatcgcccgtctgcgtcagcaggcgcaaaagttagggatccgcaagctggaaagcaacgaaaaaggcggcgtgatcgaatttaacgagaaaaacaacgtcaatccggtgtggctgatcggcctgctgcaaaagcagccccagcacttccgcctggacggtcccacgcgcctgaagttcatgcaggacctggaggagcgtaaaacgcggatggactgggttcgccagtttatgcgccagctggaagagaacgccgtcgcctgactggcaggagatacggccccgctgccgtatctcccttcccacatatctggcaatctttacaaacattttgcaatccgcctggatttccccacacagactcacgccataatctcatctgcttttcgtataaaaataaccacttacatattttggagttatggtaatgagaaaccgtttccccgtgacgctttggctgacgctagtcgcgttagtcgccgcgctggccctccccgcgcgcgctaacacctggccccttcccccgccgggcagccggctggggggtccgaatcagtttcatgtggtacaggatgacggcggttcgctggaagcgattgccaagaagtacaatgtcggcttcctggccctgctgcaggccaatcccggggttgacccctatgttccgcgcgccggcagcgtgctgaccatccccctgcagacgctgctgcccgatgcgccgcgcgaagggctggtgattaacctcgccgaactgcgcctctactattacccgccgggcaagaatgaagtgaccgtctacccaatcggcatcggccagctgggtgggaccaccatcacaccgacgatggtcacaaccgtgtccgacaaacgggccaatccgacctggacacctaccgccaacattcgcgcgcgctacaaggctatggggattgagctgccggcggtagtgcctgctggtcctgacaatccgatgggccatcacgccatccgcctcgccgcctatggcggagtctatctcctgcacggcaccaatgccgatttcggcatcggtatgcgcgtcagttccggctgcattcgtctgcgcgataacgatatcaaggcgctgtacaacactatctcgccgggcacgaaggtgaacattatcaacacgccgatcaaggcgtcggtcgagccggatggccgccgtctggttgaggtccatcagccgctgtctgagcatatcgatgacgacccgcagaccctgcccattacgcttaatgcggccatgactgcgttcaaacaggcgccgcagaccgacgggacggtgatggagcgcgcgatgaattaccgctcgggcatgccgattgacgtcacccgtcaagctgactcaggaccgcagtcgttgtagtcttacgctgcacaaaacaaaaaacccgcctgatggcgggttttttgttggcaagggtcaaacaggggtacaacagggtcttactcatcgctgtccggtgaagggggccgggcagcgacgcatcgggcttacttgtagataacggcggtaccgtgaagggtattcggaccggttaccgaagtaatacgatatgaagtggcgcccatctcatccgctttctgcgccagctggtcttccagcgagcccaggttagtcccggcagaagcagagatggtgcctactttatgctgtcctgcaggggtggactgcacctctacagcggcaaagctggcgaaagaaagggaacttaaaacggcggcaatagccagagtattaacggttttcatgattattatacctgtgcagatgaattttatagtagggtcgcaagcattaacttaacgatcgataggtaaataataatgtgatctatgtcacacgtcaatgcatttttataacgatcgtttaactatttataaaatgcttaaatttcatacatatatgaattatttatttttaaaccgacagcgctggccccggcgatcgtttatttttataatggcctttcaccaaaccaacataggtacaacggcaccatgacaactgacgttcaaagttgcgccaaaaaaagccgtggccgaccgaaggtgttcgacagggatgcggcgctggacaaagccatgacactcttctggcagcacggctatgaggcgacctcgctcgccgatctggtcgaggcgacaggagcaaaagcccccaccctgtatgcggaatttgtgaataaagaaggcctattccgcgcagtgttggatcgttacatttcccgctttgccgcgaagcacgaagccgtgctgtttgccgagggaaaatccgtcgatcgcgcgttgcgtgactacttcacggcggtcgccacctgctttaccagcaaagagacgccggccggctgctttatcatcaatacctccgccgcgctggccgcctcctcgacggatatcgccaataccatcaaatcccgccatgcgatgcaggagcaggcgctaacccagtttctgcagcagcggcaggcgcagggcgaactgcccgcgggccgcgatgtcgcgcagctggcgcaatttcttaactgcgttctgcaggggatgtcgattagcgcccgggaaggcgcggatttcgacaagctgatgcaaatcaccgacaccactctccgtctctggccgcaggtcctcgagtcctgatgcgccctgcttccggcggtattctgccgccggatccgctctcctgttggctttatccccacaaaatagattgatttttattaccttttctcgcgcaagataaacgcaaatgatattgattgcgatattcattatgtgcaaaatccttttttgagtttttccagatgtttcgcattgtaacgaataccggccgacgccggcccataacaacgacaaagcaacttgctcataaaaggaatggatatgaaaaagcgcctctgggtgctccaccctctgctgctggccagcacgctgcctgcgctggcggctcagtctgatgaagacagcatcatcgttagcgcaaaccgcacccatcgcaccgtggccgaaatggcccaaaccacctgggtcattgagggccaggagattgagcagcaggtccagggcgggaaagagttcaaagacgtgctggcgcagctgatccccggcatcgacgtcagcagccaggggcggaccaactatgggatgaacatgcgcgggcgcgcgatcgtcgtgctgattgacggcgtccgactcaactcctcacgcaccgacagccgccagctcgacgccatcgatccattcaacatcgaacatatcgaagtgatctccggagcgacctcgctgtacggcgggggcagtaccggcgggcttatcaacatcgttaccaaaaaggggcagcaggatcgtcaggtcgatcttgaggtgggcagcaagagcggttttgcgaacagcaacgatcatgatgagcgcgtcgcggcggccgtcagcggcggaacagaccacgcatccggccgcttgtcggtagcctatcagcgtttcggcggctggtacgacggcaataacgatgcgctgatcctcgataatacccaaacggggctccagcactctgaccgcctcgacgtaatggggacggggacgattgagatcgatgataaccgccagctgcagctggtcacccagtattataaaagccagggcgatgatgactacggtctctggctcgggaagaacatgtccgcggtcaccagcggcggcaaagcgtataccaccgacgggctcaattccgaccgtatccccggcaccgaacgccatctgatcagcctccagtactccgatgccgactttttcggccagaatctggtgagccaggtgtactatcgcgatgagtccctcaccttctatccgttcccgacgctcacgaaaggtcaggtcagtagcttctcctcgtcgcagcaggataccgatcagtatggggccaagctgaccctcaacagtcaaccgctggcggggtgggatctcacctggggtctcgacgccgatcatgagacctttaatgccaaccagatgttcttcgatctgccacaatcgatggcctccggcgggttgcacaacgaatcgatctacacaaccggccgctacccgggatacagtatttccaatgtcgcgccattcctgcagtccagctacgatctgaacgatatctttaccgtcagcggcggggtacgctaccagtggaccgaaaaccgggtcgacgactttgtcggctacgcccagcagcaggatatcgccaacggcaaagcgcgctccgccgacgccatcaaaggcggcaaaaccgattatgacaatttcctgtttaacgccgggatcgtggcccacctgaccgagcgtcaacaaacctggtttaacttctcgcagggtgtcgagctaccggaccctggtaaatactatggcatcggtaaatatggcgctgcggtgaatggtcatctgccgctgatctccagcgtcaacgtcgatgactcgccgctgcaggggatcaaagttaactcgtatgagctgggctggcgctacaccggcgataacctgcgcacccagctggcggcgtactactcgacctcggataagaccattgtcgtcaaccgcaccgacatgaccatcgacgttcagtccgacaaacggcgtatttacggcgttgagggggcggtcgattactttattccggatagcgactggagcgtcggcggtaactttaacgtgctgaaatcccaggtgcagaccgacggccgctggcaaaaatgggacgtcaccctcgcctcgccgtctaaagccaccgcctgggtgggctgggcgccggatccgtggagcctgcgcgtgcagagtcagcaggtatttgacctcagcgatgccgccggtaacaagctggaaggctataacaccgtcgattttatcggtagttacgcgctgccggtggggaaactgaccttcagtatcgaaaacctgcttaacgaagactatgtcactatctggggccagcgcgcgccgctgctctacagcccaacctacggcagttcatcgctgtatgagtacaaaggtcgtggccgcacctttggtctgaactacgccttaaccttctgataaaaaaagcccctcagcctgagcgattgaggggctaatcactacacaaatctgtttttagattttgttgttcaggaccagctggccgttgttgtccagcgggatctggctgccgggatcgtgatccatgcggattttcccctgctgatcgcctatcttataggtcacatcgtagccgagcattttatcggatttgtcatacaccgttttgcagcgctgctgggtggtggtgtaggtatcgttgtcctgcatcgcgccctggatctggttgcctgcatagccgccgcccagcgcacctacgaccgtcgccacgctgcgtccgtgaccgccgccaaactggtggccaatcaccccgcccgccaccgcgcccagcaccgaaccggcgatgcggttttcatcctgtaccggacgacgatgagtcaccgtgacattgcggcattcctgacgcggcgttttcacggtttctttaatcggtgtactggagaccacttgcgcatactgcgggccgcgatccaacacgttgagaccagcgacagctgcaacgcccagcgcggcagccacgcctatccctatacccgccaacatagatttattcacgggagttcctcctttgttgctgttgatacaattttgcaaccggagccgggagggcgcaaatcagatagcggatgaaaagtgcgagaattcgctgcaaatcaaagggattcagaggattccgagcgggatctctgcggtttcagcagaaaagcccggaggcgccctcagagcgcgcctccgggtcgcgacagcgattagtgcagcttcaggcgcgggcgaatgatgcggttgatgcgcccgaccagcatcatcaggccggtcttgaagtaaccatgcagagcaatctggtgcatacggtacagggagatgtacacgaagcgcgcaatgcgcccttccaccatcatcgaaccgcgcatcaggttacccatcaggctgccgacggtggagtaatttgacagcgacaccagcgagccatggtctttataggtgtatgccttcagcggtttgcctttcatctgcgccaggatgttgttcagcgcgcaggtagccatctggtgcgccgcctgggcccgcggaggcacaaagccgccttccggacgggcgcaggaggcgcagtcgccgatggcgaaaatatccgcatcgcgggtagtctgcagcgtcggctcgaccaccaactgattgatacggttggtttcgaggccgccgatctctttcatgaaatctggcgctttgatccccgccgcccagaccattagatccgcctcaatatattcgccatctttagtgtgcaggccgcccgcatccgcgctggtgaccatggtctgcgtcagaacccgtacgcccagcttagtcagctcattatgcgctgccccggaaatgcgcggcggcagcgcaggcagaatgcgctcgcccgcctcgaccagcgtgacgttcagcgcttcgttggtcagccctttgtagccgtagctgtgcagctgtttcaccgcattgtgcaactcagcggagagctccacgccggtggcgccgccgccgacgatggcgatatttactttaccgttagcgccgaggttagcagagtatttaaggaacaggttgagcatttcctgatggaagcgacgcgcctggtgcgggttgtcgaggaaaatgcagttctcttttacaccaggggtattaaagtcattcgaggtactgcccaacgccatgaccagcgtgtcgtacggcagtttacgctcagccaccagcagctcgcctttttcattgcgcagctcgccgagggtgatggttttcccttcgcggttgatatcaaccaccgagcccagctggaactggaaaccgtggttgcgggcatgggccagatagctcagcgcatcaacgccttcatccagagaaccggtggccacttcgtgcagcagcggcttccacagatggctgtggttacggtccaccagggtgattttcgctttcttatggcgccctaactttctccccagctgagttgccagttccagtccgccagcgccgccacccacaattacgatttttttcaatggcgtagtcatgtgtacccctaaaattattaaccaattgttaaataaaagttattgaaatagcctttatttaacaacaagttacgttaatgaaaccattcagcactgtcgagaataccatgaacggtgcattggtcataccaaaattgatgtgcatcaagttttgtcgcgtattttttcagcgaaaccaataagtgtagacatgaaaaaacccgcgtggtgaacccgacgcgggtttgggaacaagggaaaagcagttagccgagggttttaaacgctttcagccgctgcagatgcggcgagatatttttaaacttatgggtctgctcttcatcccagataatttcataatagtggtgcaggagatcggcggaacgctggctgtccaacgcctcgtcctggcgggaaagcaccaccaggcagcgatcgcggttcttctcgcggaagttggtcacgcacttggtggcgatgtcagcatactcttccggtcggtcgattttgccttccatgttctcatgcggaaacaggtttggattgaacaccgcctggcggatatcgcacagaaaaccaatccgctccgcccagtagccgccaaggccgacgccgcagatcagcggccggtcatcggcagtgagctgcagcattttatcgacctctttcagcaaatgctgcatatcgtgcttgggatgccgcgtgctgtagctaatcaaccgcacgtccgggtcgataaactgcagctgcatcaccttctcatggttaccggggctgttcgagtcaaaaccgtgtaaatagataatcatcgcatcctcaccagacaacaacgccccgtagagcgttacgcggacttcgcctcttgccagcgcgcatgaagctgctccagctgggcactcaccgttttccaacgggctgaatcccttaactcctgacgggaaaaggaacctttatgatacaatttcgtaacacgctctgctttgatcggcgacaggttatccagcacactgaccgcgcctttacgattattgcagacgaggatcatatcgcaaccggcgtcgagcgatgcctgaccgcgttcggcatagctgcccatgatcgccgccccttccatcgacagatcgtcggagaaaatcaccccgtcaaagcccagttcgccgcgcagcaccgttttcagccagtacgccgagccgctggccggacgcggatcgagctccgggtaaatcacatgcgccggcataatggcgtccagacgctgctcggcgataaggcttttgaacaccgccatatcatggtcgcggataaccgatgccgcccgcggatcgaacggcgtctctttgtgcgaatcggcagtcaccgccccgtgtcccgggaagtgtttgccggtggttttcatgcccgcggcgtgcatcccgtcaatgaagtgacgcgccatcgtcagcgctttctgcggatcttcatgataagaacgttcgccgattgcggcgctgatatggccgacgtccagcactggcgcaaaactaatatcgatatccatggcgatcatttcgctggccatcagccagccggcttcggcggccagtttgcccccctcttccatccccagcagcgcggcgaaagactgggccgccggtaaacgggtaaacccttcgcggaaacgctgaacccgccccccttcctgatcgaccgccaccaccaggtggttccgggaggcgtcgcggatctggcgcaccagctcgcgcagctgcgccggatcgtgataatttcgggtaaagaggatcaaccctcccaccagcggatgcgccagaatttctcgctcttctgcatccagctcatacccttcgacatccaacatcactgggcccacactgacctctcttatcctttacgttcgttgtctaactgacaccatgtttcatctgccagcgtgataaattgccggtccccgctctgccgccagcgcatttcataccagcccgccatcagcagcagtacccacgggcgccagagtgcaacctgccgccaaagcagctgcgcgtcgatggccgcccgccgggcatacgcttctaccagccgacggcgctcgccaggcgtgatccacaccgcggccagctccagcgcgatatcgccatcgccggcatattcccagtcgatcagcctcaggccggactcatcactgtctcttatacaacaccacgctaccacgagaccaacagggaactcataagccgtccacctcctgacaaaaaaaaaatcaacaaaagaaagaccaaggcacagatacacacga

SEQ ID NO: 185 - DNA, 24528 bp, Unknown
  source: /note="Description of Unknown: MKP2_2161_1 Mutant Bacteria sequence"
tttacgggcttcttgccctaacaggatcccggtcatctcaaaattggcgttagtgttagacatatattcaagcctatctcttatctggagatacagctactgtccggtgtttcagggggctacatcataatggtgaactaacaagaattatggtgagtgaacctataatatcaaacaaacgtttaagaatacgcgatgataatttcgctaaattctgttgtacacggaaaatcataacttcatggctaaaaataaaagacatatcagtactatccaatggcacaccacgcaacgtaggaataactgatacatatctaaaaccattaataagaaattctctaagccaatcattacgtatcgaactttcactagtttctaaagcgacaatgaattgtgttcttttatcaaaatgctttgttacttcttttggatttaaagatattacaggaatatcgttaatgtgatttttgaggtgatcttttgatgtgcttgaaacaaaactagttacattaaaacctaagtttgattcactatttattgctttccacgcttctactgcgttatttccatcaccaattattattgtttcacgcttccataatccaaaaaaattcaaacactttttagtgagcatacgaaatgtagggacaaaaaataatacgaaaatccatgtaactgccaaaatataacgggagaaatcccaataagcaaatgataacactgcaatttcaattattgcaaaaataactaaggtgcgtaatatttcttttaattcgaaccagaatgtcttcctgtaaaaataatgccttaggcgaatggaataccacgccacacaacatatgcctaaacaagtgtggagaataacccaatcattaatattgctattagcaataatatgtccgccatcattcataaaagatttcacaaaaaagattgcgaatacaatagcaaccgtaaaaccagtgaaatcagatatcgctaataaaatacttgtccaaaaatttcgagctagacgagacatatatcctcaccgagtaaattatttcccaagtaatataaaataatattacttatcaactctttttgtataaaaacaaataataacagaagtaatgatagtagtaactagtatataatttgtttgttatttttaaaggcggaccatttttgatcaacgaactgggttatttcttgcttaaacctttcctcagaaaagcgaattgcattttctctgcaatgttgtggattaaatacatcgatatttttttcaaattcctgaacagcatttacaagagacttaatttcttgtttataaaaaaatacaccagtagctttattaaccccgcatggacgaactgtttccaatgctccacccttgccaaaagctattacaggagttccacacgcttgcgcttcaactggcgtaatgccgaaatcttcttcagctgcaaatacgaacccttttgctttttgcatatactcttgcatcactgaatttggttgatatcctaatagttcaatattacttgaagcttttgccttaatctttgacatctctgaaccatcacctattactacaagctttttatcaggcatttgtgagaacgcctcaactatcaaatccattcttttataaggaaccattctggatgctgtaaaataataatcatccttgttttcacataacccgaatctattaacatcaaccggtggataaattacttttgattcacgtccatatacttttctgattcttctagatataaactcagaattagcaatgaaatgatctactccatttgatgtacggcaatcccataaacgtattttatgtaataaccatcgagcaaccattcctttcatacctttatccaaacccgcctctttaatatattggtgttgtaaatcccaggcatatctaattggcgaatgtatgtaagatatatgtaattggtcaggacctgttatgataccttttgcaacagcatgactgctagataatataatatcatgttttgaaacatcaagttgctctatagctaatggcatgaatggtagatacttttggtatttaactttagaaaaagggaatttttgtataaagctagtagttgctttctttcccttgaaattaactctatcctcatcggatagaaaatcaacaattgaatacaattcactttcaggaaacacttctaaaaattctttaattactttttctgaacctgcgtacgtgaccaaccagtcagcaacaattccaatattcaaattatgcatgaattaatccttaattgtgaaaatattcaatttttattctaaaaagtcaataactcaatctattacaatataaacatgttacattcataaactaaaaaaactttgtgagtcaataacctttctttaacaatgagtgttgttacaaaaatttatgcaaaacaacaaaatgaagtcattttttttgatctcattattttttgttctcgttatagtgatgcggcattaagaaatataaaaaatgcattttatataatacatttaatcgtgccttattactttgccatcataaattcagctgaagcttttggttccaaattatttttgaagaaaccaaaattatgctctttgtttttaatatctgttccatcatcaataagatcgtaccaccaaagccccttaatataagatcgttttttgactaggctagtatattctttaataaaatttgcagactgtattaaatccattcctccaggcccatcataattcgtcacccctgcttcagttatatatacatctatgctcctccctgtttttttagtaaagtaagtatggaatgcatctatacgattaagattaccctgtggtgtacgtaacagcggattaccattcataaatgaatatgtgtgcaatgatacaccatcaatataattcaaaattcctaagtttactagttgctcaaaccatttccaatcattaacatcaatatatcttgctcttaaatcgagaggatttatagaacccgcaagaatgatggcattcgggtcattcctttttattacttcactagttttttttactaaattataatagacattggccgaaggaacttgatttcggtatttaaccatgccagtagctatcgtccattcattccatatctcataatatttaacttttcctttataacgatgcgatacccatcccgcataattagcaaatgcttgaatgtcacgttcagttgtaggataacctccgttattatacaacttattaccataatcaagaataacgagtggattcaaaccatccctgtcagcattaagtaaagcataatctgtttttttcaaaaatttagaaacagaataaactccttcactgccttctgttttcgaccatggataatcatcgcgaaaagatgtaaaacctaattctttgattaatgaaatatatgtttcgggagttgaactatatgattgaaaatgagtaccaattccaatttccaacgatgaagcaacaggagagtttaaactgagaattatagatactgaaaataataacttattcatagtattttttagcattgtaatacctataatttaatagtaaatgctgtctctagttcgttcttgacattatttatggttttttgccaagtaaatttcttaacttgttttaatccttcctcaactaatttttgcctcaacgctatgtcataataaattttttcaattgccaagcttatatctccgtgatttataggatcaactaataatgcagcatcaccagcaatctcaggtaaagatgtgacattagaggtaattaccggagttccacaagccattgcttctataacgggtaaaccaaaaccttcatacagagatgggaaaagaagcatatttgctcctttatataattgagctaatgtttcattatcaactcgccccatgaattttattcgattcgatatatttaatttttttgcatgatttaatagttcctcacttctctcgccagtaaaataaagcatgacagcctctggaatatttgcagaacagaaagcattcaacactgcaatttcatttttatgcttcttccgattaccaacacttaaaatataattttctttaagcccgttaacctctaaattaaattcttttgaaacaccattccctactacctttactttatcttgattaattttagcccattcacatattcgtttctttgaaaactctgaaacggttaatataactcgtgctttccggcatgctctttttaatactaaattgtaatacaaccgtttaagaacacttgagttaaaatcaatgtctatgtgattaagatcatgaattgttatggctgtacgattaagatggaaaaaaggagcattataccctggtgtgaaataataacctctattaaacataagatatagagtaacaaaaaaaacatcgaaagggcttgttggtttaatagctacttttatcctatttaaagcaggtataccatcttgaatctccttcgcaaaacgccctataccatgttcaccaatccaacgagaatcaaaattaactatttttttcataatcactcagcttctttatattgtaaattacttgctctgctgttaaatattacacccaatgcaaaccccataagaggatactctggcgtggtcatcgaaattccgaataaacaaagtataataagagtcatagaaaggaatcgagaaatagcagaattatttaaaatattagactgataatataaccatcccaataaatatatacctaatatatatcctcctgtagcaataatataaagatacatgctatcaccaggattgtaagtccctgatcccagttttgagccaaccccgattgtacctagtccagcaccgaacgttaagctgccaaattttaatattgactcgacaccatctggccacgtagtggttaaacgtgcatttaaagatcctaataacatagtagttgcaggatcattattcatttcaaaggaatagttcgtggacataatggtgaaaaacgtgacaacaattgcaaatataagagtacttctccataaaagtttaacaggtaaaattttcataaatacgtaaaacagcaatatcaaatgcaatgcaaatgttgtctttgatattgttattattgacaccaacaaactaagaataaaacacacaagaataaagaatttattttttgttgatgcaacaatataaaccaacaatattaaaatatttgatgaagcttgaagcgaacttttaaaaaaacccgcatatcttgtatatccaccagtcgttcccatttgagcagatgacacatccatgcctgcaatctcatatgaaacatcataccaaggataattgaatataatattacaaaatacaccaatacatgaaacataaaaaacaaaataaattatattattagttttattattttgtacactttcaaatataatcctagctgagtgatacccaaggaatatgggtataattccccaaaaagcaacaaaacctgctgcaagttcaacatgtactatactcactaataatatgtatatgatggaaattgaggctattaatccgttttttgttatttttcttttgtaaataatatttaaaacagaaaccaggatagtaattaaaattaacaatttaggtatagaaaataaaagctcagcacctaacaaatggaacaaccagcgtaatggtcctgcgaaaaactcaaatagtaaaaataaaagtaatgagaagtttattaatcttgattcaaatgattgcaatgtcatattaaactctcatttaggctattttttataatgatttatatattgtttggcaatattatctggatcaaatagctgtttgacatcatctgctaaatcttgatgaagtgtatatctttgaaagatatctaattcatgctcgatatcatttatgatggaaacatttggcattatctgagccaattcaatcattgctcccatagaagttgtgataacaaactttcctgccaatgcacattcaacaactgtacggccaaaaggttcattccacttcaacggtagaataacaatgtcaaccagttccaagaattccgccaaatccatataacccaaaacctcaacggagctttcaatggcatcttttttaagtaaattgctatcatttccagcctgaaaattccctgcggcataaaacttcagttcatttacgtctttatattgtctagctactttacaatatacatcaaaccctttttcaaccgacaatcgaccaataaaaccgatccttattttatcgctctcattttttttcggcacatacggagtaactgagttatatataaaatccgaagtggcttttttaaaaaagccacaatccttatgtaaattagtaatatatttactaatgccaatataattatctactttgttactttttatttttttaaaccaactccaaaatagaactgataaagaacttggtgacattactttaccacttttaaacagtgtactgttcggatggaataaataataatcacgagaagtatgtacaagcttaaccttcgctttttttacagcatcccatgctgataccgaaaacccacatatattatttgtgtgaactatatctggtttaaattgcgcgatctgtacgcttaccatttttttcatttcaaaattataacaatcaatgaaatgccagatggcctttttaaattttgatgttgttgtgttggggaaaccccaataaatattcttaagaggaagataagtgacctcaactccattgacaaaatctgtttttatttcttttttatcatgaagtgttattacctttacttcattctctaatttaactaattgttcagctaataattgaactgatatttctgcacctccgactctataaggataataaagagagtttaaaatcattattctcataaacaaatcactttcattaaagttagaatcaaccatcagtacaatttgtgaatactgtactgatggtttgtgctttactctttattggagtaagaatagccataatggctataaccatacccataataactgcttgctttctttaccactccatttaatatacagcctttaatcattactccgctctgttcaaagcgctttgcactgacttctatttcttttactgtattttgttcaaatcttgcgactaaaagagtagtacctgcataattgccaataatagctgcatctgttactgccaaaatcggcggagtatctacaattactaaatcataattgtcactcgcccatgaaagaagattctggaatcttgaatgcattaataattctgctgggttgggcggcaccatccctctggatatgaaatcaaagccagctgttttaatttgtttcacgcaattttttatatctacttttcctgctaaataatccgaaagaccgttttcgttagatacattgaataacttatgcgtataaccttttcttaagtcagcatcaaggaagagaacttttttacctgtttgagaaataattgctgctaaatttgaacttacgaaagtcttgcctgcatttgggctagcccctgaaatcataagtatattattcctcgcttccatcatagcaaaatgtaaacttgttcttaatcccctgatggcttcaattgcgaggtcagctggattttggatggccagaaactcgtcatactccagactctttttcttattagattttaaaccctttgtgatattctttgcaaatgtctcagaaactggaatactagcatatacattaatgcctagtacctccaattgctctggcgattcaattccacggcgcaagaaaactctcaaagcaataattgccactgaaacaatcaggccaaatataataccacctataactattaatatttttttaggtgctactggtcttggttgtgttacagcttcatcaataactcttacatttccaatagcacttgacttagcaatattcaattcttgttgacgatttaataactgcatatacacagcgcgaccagaatcaacatcacgacttagtcgtaacacctcttgttgtgtttctggcatggccgatactcttttattgagcttggctttctcttcaagaagcgtcactcttttctccataagagccttataagtaggatgctctttcgtgaaatgttgtgatacctctgattcacgtatggttagttcattaagctgattatcaacattgactatttgatccaaaactgcttttgcttcaagcgataaatctacagaatctttctgttgcctgtatttatttaatttatcttctgaaatatctaaatcatgacgtacttgtggtaactgcctatttaaaaactctaggcttttagcatcttgagctgcttgtctgtcaatattttgcatcaaataattattactgatgctatctaatattttcctaatctgtacaggatcatctcctgtcaatgacaatgtaagcattccagtatctttaccttgatcgcttactgtcaacacatcccttaaatcattaatagcttttagcttgcttagatattcaaccgtaaatgaagtacctggctttgcttgaatttcatctacctttaacgaaatgttatttttctcaaataactctccaacttttacttcagcttcaaatgaatcggtctgaatagtgaatttatttgcgtcaataactgttagcgttaattctggtatgtcatcatcggttttaggtaaatataatcttgatacatttataatacctggtttatctcctgagagacgtgaaaatcctctccccaaaatcggaaaataattttgtttaattttggcttgcagattcaaatcgtcaaccgttttccctaaaatcattcttgattggagaagagtgatctcaggtgcagattgtggctgactatccggaagcatttggctcaaattgctcaatatggcattcgcctgcttttgttcaacttggattagagaatcagcttgatagatcggagttgaaaataatgaatagactaaagcaatcaaagtaaaaaaagcagttactgatataattagtttacgatgatcgataagttcaccatataaacgactcaaatctatttcatctgcatctttgttttctggcttatttttaagtgatgacatgtattaaaccccggttgttatacgctcagttttttggcccagatatcaccggactgtttaattaattcaaaaatcaaagtaaatacctcttcacttttgcgatacgggtcaggtatatccttatattctgcccaatggccaaacagcatcgttttccctctaacttcaggtgcaatttgacttattttctctatgtgttccttctccatagctaatatgagatcgtattttcttcctaaagtacttgtgaattgttttgcacaatgatttgataaggatatgccataattttgtgctatacgagaagcagtaggatcagcttcatgccctaccaaggctccagttcctgccgaatctatttttttgttaggtagcaaactttgtaaatatcgctctcccattggagagcgacaaatattaccagtacaaacaacaagaatcgagtcaaacataatcaattccaatttttaatataacggacagtttcagtcatatcatgaacacctgttatggttggaacaagttgtgatataacgcgattccaccttacaataggcgctgcagtaacataaactatatcataaggttctaattgaaattcagtgcctaataccatggctgatgcgtcttgcgcattgagttgatagatattagctattttaccgccattattattttttaattgacgtataacaaatatcccagttgcatcactcatcgcctgtgatattccctcagcccttccgacagcctccataagggtcataccactgcgatccattttgagtgttgtttgcttaccaacttcccccatgacaaatacttttaaatcatcgtttcgaggaataaaaagtatatcacccggatacaataaatggttctgtgttaggtcgcctttttgcattaaagcatataatgaaatttttatgtcttttccattatgtgttaatactacattccgccaatccgcctccggtgctaaaccgccagcggcattaattgcatccattatcgtaaggggaatatttgttataggttgttgtccagactttgcaacttcccccgttacgtataccttttgtgaacggaacgctgcaatgcttacgtcgacttgtgggctttctatgtaagtagttagacgacttgcgatttcctgacgtacttgtgataaagttttacctgcaactttaatcttacctatatacgggtaaaatatcgtgccatctgagttcacccagttgcctgtatcacttgcactccggtactgcccagctggcgtagtcaattcaggatggtcccaaacagtcaccattaacacatcgcctacaccaattcgatactcatagttgccaagcagtctatctaaatcgggatttgattttgctaacactgcttcgggtcgtaattgatcaaccaacccaggtgtcatcggataaacgttaacgagtttatccaggtcgtagtcgctatccggaagttcgactacgttcttacgcagactgtttaatccttgaccagggataatcgtacaacccgataaaaacccaattgccaatgctaatgccgaaaatctaacaagttttttcttcataatgtcacatcatcagtaaatcaaaatttgccaattcctgagcagctgtcatagccgttacttccctgccggcttgtggagagataaaagctgactgcgtcctgcagggctaccaccctctctcccctgttttcagcattcagccttataaactaaacggtatttctatccctgcgctggctccaacgtcgtcgctgtcgctattgttagcattggtgtaccagagggaggtattcaaacgaaccgaccgataaacatctccgctccagcccagctgtacacctttcagagtatccgcatgagggaacgctttgttgatcgactgattctcagggttaaccttcgcgtatactaagcgcgagctccagcgctggttatcctccgtaataagctcaacttttcctgcgataagctgaccatccccgcccattgcgtcacccagcggatagccctgctgatagtagccatccttatagatatgatgggtataactgtaattggttcggctcatattggtacgcgtgtcatgcgcttccacgtaccagttaaccgcatctttgccccacccatggtgtccttcaacaccgccaaggaacatatttgctgaaggcaaaaaaccagactcatcctcgccgatcatctgcccgtagaagctcaccggccagccaagagtcggctcgagtttgaacttaaaatcgaacccagcaagttggttccccggttcattgggatcgtttgcggcggtattatccttgcctgttaaaccatcccagaagttgctgagtgattcagggcgcccttgccccccccattgcataatgcgcgacgcacctaattccagtgactggaatggtgagaaagtgaaacgaccgccgataattttggcatggggcactgcggtatattgattcatctggctggcagagatctgatactgccatggccccacccagcgcagccaccaggtctctggcgccgcctgctcggctcgctgcatcaggaaaccggtcatcggtcgcattgcatccccgcgaatcaggctaccttcatagccaggcccccaccactgtggtacctggccaaaagagagccactggttccagaacttcaccgcgccgtatgcgccgttggcgttgaagcgcgatccgttgctgatccgctctcccccttcaacgttgccctggagatggatatcccaccactcgccgctgttgttgaatgccaggcctaacgagttatccgctggctgcgtctgaccaaacccctgcggagtgcccggctgatcggttgaagtgtagccggtgacccggaaatccgcttttaaggcagacagtcgctggttgatacgcgccagcaccacttgctcagaagagtaggaaggtttggcctttttcagcgcccgggcgatctcttcctggctcagcggccacgtcgacaggctcagatggatgaccccgcgatcggaaagccaggccaggtcgttacgcaagtcgttgtcatttaccactaacccggccgcgtaagcctgggctcccagtgaggaaagcaaacccaacgtcacggcaatgcgcgcaatttttatcattgtacaagatccattttcagccccgctgtcgtatctcaatgagaatgaggggaataccaagatagaaagcgctcgcggcaccagctgacttcgctgtgcaacaccggcgaggcaagtacatttaccctaagctgcttgttagccttataacatccactcagctcacaatgtaggcgaattttaccctacaggctatcgatgagacaggaaagttaatgtccaggcgatatcagcagccgctcctggccaacttctgaggatatccgtagaaaattgatagatatctattgagggcgatcatcctgaccgggacgattttacagccgttgaagagaacctctgtgcagcagcaagcggcttcagcgacgctaccgcccctggcttaacagctaccagcgcactgactacctgaacgacttaattttttatcgacctgtggatgaataattggtcaggccattatttttggcggcgttaagtttacgggatttcggtcacaattgggagtgttgttaccgaatatctgccaattaatgccgcctgtcgttctactgacaaaaaataagcgggtcaccaattaagattattcactgacttccagggttagaaatcttcccggtactgctacatcatcacatatgtagctaactgactgtaaaaaaacgtcttttcccatagctcatcttcatgcaaaaatcagatgatggcgttatagtcaactacaatttctaatagtttccagtatctggatattcattgaatgtgcatcaggtaacgtctcagcgcatttaagaaacgtctgatcaaagctatatccagacaaatatgcattaacaatgtagtagcacttcattatttcataaatatgaattatcaattaccgggtatatagtagattattttcttatttgtctaattaaccggcgaaaacttaatttcccctgtaaaacaaatggcgattaccaggcctgcttatgcaggtcctctctggtaaaaggtttatccagcggcccaattgcggtggcgatttgccccagcagggtctgtgtcggcgctttactgccgctatgcaacagtatcagtgggaccattactaggcatgcaattccaccccagggtactgtcttataatcgcagtcagaagtgcgtttttgcagcagcaggaacaaagcgctgccggcagcgcccagcagcaggccggcgatcacttccgagacggaatgcgcatggatgaccagccgcgaatagcccaccacggcggccagaacatagccggtaataatggccgctttacgcagaccggcggagaaacgggcgctgagcagccacaggaagataggccagaaggccgcggagagcgcggagtggccgctgaagccggtgtaatccagctcgcgaatacccagaccccagcccataaaggccagtttggaggcgcagacgatagcgccggtgatgccgaacagcaaactccactgccacgccagcaaccgcgacgttttacgcagcatcaggacaataaacagcgccgctgcgctgggcagcaaaacggtgctatcgccaaaaaatgagatgagttgccagttcatatacctgtgatccttcgatgatgtccactgccgtgctcagggattatccgtaatgtctgtaccagctcgcatgccaattcatttcacatttttatgcatgcaagtgagatgtttaaagcggaaacatgatcgcagtcaagttttatttttggctgtcgttgaccgctttcccttcgctttaggaattgtcgcactaagtgactattcataaagcattattgccgctactccgaccattgcaccacagaggccagagacaaactaccagaagtctccgaagccatacgtttctttacaatcgttataacattcacgttatgaataatttctgcataacgttatgagcggcaggacgaatgcttcagccttgccgctcggtttcaggctggcgctcaggccagcagttttttaatgctttcgcggaatttggcgccttctttcaggttacgcattccgtaggtaacgaaggcctgcatgtagcccattttcttcccgcagtcgtagctttcgccggtcatcagcatcgcgtcgacggactgcttcttcgccagttcggcaatggcgtcggtcagctggatacggccccatgcgcccggctcggtacgttccagttcggcccagatatccgccgacagcacgtagcgccccaccgccatcagatcggagtccagggtctgcggttcgtccggtttttcaataaactcgacgatacgcgccacctggccttcagccaccatcggctctttggtctggatgacggagtattcggagagatcgcccggcatacgtttcgccagcacctggctgcggccggtctcgttaaagcgggcgatcatagcggcgaggttatagcgcagcgggtcagcggtgccgccgtcaaggatgatatccggcaggaccaccacaaacgggttgtcgccgactaccgggcgggcgcagaggatggagtggcccaggcccagcggctgcgcctgacgcacgttcatgatggtcacgcccggcgggcaaatggcctgcacttccgccagcagctggcgcttcacgcgctgttcaagcagggcttccagctcgtaggaggtgtcgaagtggttttccaccgcgttcttcgaggagtgcgtcaccagaacaatctctttgatcccggcggcgacgatttcgtcaacgatgtactgaatcattggcttatcaacgatcggcagcatctcctttggaattgcctttgtggccggcagcatatgcatgcctagtcctgcgaccggaataaccgctttcaaattcgccatattcatcttcacctgtttggttgcaaaacacgcggttttgaaaaattgtacatgtcacaaatccattgaaactgataatacacggatactgcccaggcatctgcccgccaaattcttaaattcactgtcacgtaaaagaatacacacaactcccttttatcaacagttagaagtgagaataatcttattctcgttcaggttattcagcggctcgttcctttgcgccgcgcgatgtggctgagaggcccgtccatcggagtctgttggccgccggacccgccgcaccgcgcgtatgcccggaaagaatagatatagataataaatttcgccaggcaatatatttcagcataaacagccggatatgacgacatattagcctgaatccgcggcggtgaaccgcgatccgccctattctgcactcacttcataatatgaattatgccggttttgtgagcgggcttcgcgcttcgcttctgctctgcgcatccgcgctcaccgtgacgaaccgcgggaggaagcccttttgccgccctcgctgaaacgcagcggaaaaagttctgatatcggcaagcttattccatggtcgccgccatggtgttattttttcactgttcttttccggaacataattcttatcggttcgcttaatccactggaaatatatccatccacggcagggcgatatccgcgtcgttattgcattttagactcatcttatccatgatcgtggtaacacataccgcagtcgtacaggttttaatacatatggaatggattgccgatccgtcaatctgggcaggtctcgtcacgctggtggttatcgaactggtgttgggtatcgataacctggtctttatcgctatcctcgccgagaaactccctcccgcccagcgcgaccgcgcgcggatcactggcctgatgctggcgatggtcatgcgtctcctgcttctggtctctatctcctggctggtcaccctgaccaaaccgctgattgtttttcacgacttcagctttagcgctcgcgatttgattatgctgtttggcggcctgtttctgctgtttaaagcgaccgtcgagcttaatgagcggctggaggggaaagacagcgataaccccacccagcgcaaaggggcgaaattctgggccgtcgtggcgcagatcgtggtgctcgacgccatcttctcgcttgactcggtgatcaccgccgtcggcatggtcgatcacctggcggtgatgatggccgccgtggttatcgccatcagcctgatgctgatggccagcaaggcgctgacgcgcttcgttaacagccacccgaccatcgtgatcctctgtctgagcttcctgctgatgatcggcttcagtctgattgctgaaggcttcagctttattattccgaaaggctatctatatgcggccattggcttctcggtaatgattgaagcccttaaccagctggcgcagtttaaccgccgtcgcttcctctccgccaatatgacgctgcgtcagcgcactaccgaagcggtgatgaatctgctgagcgggcagaaagaaaaagctgaactggatgctgacacggcgtcgctggtcgccgatcaggatcaacatccactgtttaatccgcaggaaagactgatgattgagcgggtgctgaaccttaatcagcgcagcgtcagcagtattatgacgtcgcgccatgatatcgagcgcatcaaccttagcgcgccggaggaagagatccgcagcctggtggagaaaaatcagcatacccggctggtggtcaccggcgggaaggataatgaagatctgctgggggtggtgcatgttattgacctgctccagccgtccctgcgtcaggagccgctggatctgcaggcgctggtgcgtcaaccgctggtcttcccggaggggctgccgctcctctcggcgctcgagcagttccgccaggcccgcacccattttgcctttgtggtcgatgagtttggctccgtcgaggggattgtgaccctcagcgacgtgatggagaccatcgccggtaatctgcccaatgaggtggaggagatcgatgcccggcacgatattcagcatcatcaggacggttcgtggacggtcaatggccatatgccgctggaggacctggtgcagtacgttccgctgccgctggatgataaacgtgagtatcacaccgttgccggtctgttgatggagtatttgcagcatgtgccgcaggtgggggaaaccattgagattgacggctataccctgcgcacgctgcaggtcgacagccatcgggtgcagaaggtgcagatcgtcccgccggtaaagcaggatgagctggattatgaggtgtaatcgtcaggcataaaacggcccggggtatcccgggccgtaaaattgatagccagatatcctgtttaatgcctgatggcgcttcgcttatcaggcctacgggatggcgaactaatcgggggatgacacccaccgtataatccaggccgggtcaggcgtagccgccacactgccgatggcgcttcgcttatcaggcctacgggatggcgaactaatcggggtatgacacccaccgtataatccaggccgggtcaggcgtagctgccacactgcctgatggcgctgcgcttaccaggcctacgggatggcgagctaatcgggggatgacacccaccgtataatccaggccgggtcaggcgtagccgccacactgcctgatggcgcttcgcttatcaggcctacgggatggcgaattaatcgggggatgactcccaccgtataatccaggccgggtcaggcgcagccgccacccggcatcatcgtgacatcaaacgttgacgataagcacacagcccggaaacttccgggccgcggtggtaggaattacagcttatcaagcagctttttggcatcgttgccgtctttgctgcctttattacgctcaacccagtcgttgaggcgctgcttcgcttcatcctgcagctgtttgcgcaggatctgatcgacctgcagactgtagctcagcgactgccactcgccgtagatgcgcagcgggatagcggtctgtttcaggcggtcgataagcttgccctcccctttccagccgccgagcacgcgcacgttgaagcgcatatcgcagttctctttctgcagatcgagctgtccttcgccggtcatcgccatcacgtcggactgcccctgcaggcggttcagcgtcaccagcccgttatccagcgtcagccggctgctcacggaatccaggcgggtggcattgtcgtaattttcctgcgcccgcacgttggtgctgcgctccacggcctgctgcaccagctgctggaagttcagcccttcggtgcgggtatcggccatctggagctgagcctgtccctgccagtggcgacggaaatcatcggcgtcaatgcgcgttccggaaaattcgccgctcagcgacagcttgccggtcaggtttaaggaatagttaaaggctttgatcagcgaaccgatctcaacattccgcagcgccggctggaacgtcgccagcggcgtgtcgccgcgggcatccagggtgccagggagagagagctgcccgccgtcaagattgccctgcattttgctgaccgtcagcagcccctgctggttgctgatttcgctctgcacctgggtgaagttcagaccgcgccactgcagctggtcggcgctcagggccattcggccgttgaggccgcgccggctctggtaatcttcgcgctcatcactgtcggcgatcaccgggcgcagcggccgtgtctgactctggccctgctgactggcgctactgtccgtcgccggcgacctttgcgccagcagactatcgagatcgagagtggtggcgtgcagatccaatgaccagtccgggcgatcccccagcaccacgctgccgctgccggtaacggtgctgcggttagccatcagattcaggttgtcaaaacgcagggtcttgtcatcttcctgccagctggcctgcagacttccctgaccattaatgccgtccggtgggagctcggcgccgcgcagctgccagctaagctgggtaaagtcggcttttaaggagtgcggataatcgccgccctgcacggtggcggagaagttcagcgccaggtcgcgctggtcgcggttcacccggccggagaaatccacggtggcccggtgattctcatcctgctccatctgcagacggatatcgcgcacggtcacctgctcgccgttctcatgctggaagaagagcacgctgtcggccacctgcagctgacgcacatcgtaggaccatccgcgatcctccggggccagcggcagggtgttgtcatgcggcaccaccggcgctgagctgtcgcgaaccgcctcggttttcggggtcagctggatcaccgcgcccttgagcatcacctgcttcacctgcagctgatgcgagagcagcggcagcagcgccacgtcgaggcgcatattgtcggcgcggatcaccggctcttcggcgcctcgggcggtcagcgtcatccgtccgctgagaatgctgagctgcggccagacgtgccagcgcagcgggccatcaaggtcaagctgataaccgctgcgctctgccacctcatgcaccatataggcgcgaaaatcgttgggattgaccagcaataccaacgaggtaagcccggcgacaatgaccgccagcaggatcatcagcgttgtcagtattcgtctcatggcaccctcagcaacaccccgttgacgttatcaatccttgtcgattcggctcgccaccgcaccctgctggtcgcgatatttggcgtcttcacggcggttatacggccgggccgccgggcccgataacggttcaaagctcagcgcgccgatgggcatccccgggcgcagcgccagcggcagcttgccggagttgtaaaactcaagcacgatgcagccggaccagcctggatcgatacggtgcgcggtaacgtgcaccatcagccccaggcgcgccagcgaggagcgtccgtccagccagcctaccaggtcggcaggcagggtgacagactcgtaggtcaccgccagcgccagttcgcccggatgcaggaaaaaggcctccccttccggcaggacgatctcttcgctcatcacgcggtccagcgcggcgctgacctcggccttcgggccgcttaaatcgataaacggcgccgtgtggccacggaaggtgcggaatttattacccagccgtacatcaaccgtcgcgccattaatacgctcaacgggcggacgcggattgatggcgagtcgcccttcatccaaccaggcttcgatatctcggtcacacagacgcatgggctttctccttataaggctgcttcccgcacgcttcgcggcggagagggcaacagggctactctttgcacgttacacaattcggccaggttattcaaagaactgactgattttggccttcagaatatcaatagcgatgcggtttttgccgccgcgcggcacgatgatgtcggcatactgcttcgacggttcaataaactgcaggaacatcgggcgcacggttttctgatactgggccatcaccgagtccatggagcggccgcgctcgttaacgtcgcgcttaatacggcgcatcaggcaaatatcgagaggggtgtcgacgaaaatagagaagttgagctcgttacgcaggcgcgcgtcggtcagcagcaggatcccttcaaggataatcaccttcttcggctcgacgtgaatggtgttcggcgtgcgggtatgctcgacgtagctatagaccggcagttcaatcggctggccgcttttcagcatctgcaaatgctggaacaacagactgtggtccattgagctcgggtggtcatagttggttttgacgcgctcttccatcgacagatggctttgatctttgtaatagctgtcttccggaatgacgccaatatgttcgtcgccaacttgttcacgcaattcgcgatagagagtactggcgataagacttttgccagaagccgatgcgccggcgatgcctacaatgacgcactgatgggacatatcagtcataaatttttgcgacctgattaacctggatagagatggagggtggcggcggaccgccaaacgcggcaattatagggatttcagcgtcccgataccagtggtatgcgccccgggcggctattccgccgccggcgcccagtcatcggtataccagatatgcaacagcgcgtaggatcgcatcggctgccagcggcgggcatagcgggcgatggcggccggggtcattcccggaaagcgctgtttaatcaggtaatcatccggcaaaaagatatctttcgcctgccagccgcgcagggcaaagtagtttgccgtccagcggccaatcccgggcagagtctgcagttgacgcagcccggcgtcaatatccgccggcgccgtcaggggcagctcgccgctgagcgccgcccgggcgaggtggatcagcgcctccgcgcggcgcagcggcatccccagcgccttcagcgcctgcggatcggcccgggacagggcctctggcgtcgggaacaagacgtatccaggcgcctctgcaagcggttcgccccagccagccgccactttggcggtgagccgggcggccatcgccacgctcaccagctggcccagcaccgcgcgcaccgcctgctcgaaggcatccagcgcccccggcaggcgcagccccggccgcgcctgcgccagatcgcccagcgtgcgagcgacctgccgcgggtcgcaggctaaatcaaacagctggccaattcgcgcatagcagatctccgctaccggctgcagtcccggggaaagggtcacccgcaggccctgcgcctcttcgtccggcgccagatgaatcagcccgcggtggccttccacgccaaagctgcggctgtagcccccatcgtgaaaacgctcgacgccggcaaccgcgcgcgcctgcagaaaaccaaccatccacgcccagtcatagggcggggtccagggtaacagcaccataagctctcctttatatagcgtttcaatgatagtcgcccttgaccgtcagcgccttgcttttaaattccgtttgtcggcatggcgacgatccgctaaagtcgccccccttcttcaccggcatggggattttgcagacgatgtttattggttttgactacggcaccgccaactgttcggtggccgtgatgcgggaaaataccccccagctgttaacgctggaaaacgacagcgccctgctgccctccatgctctgcgcgccgacgcgcgaagcggtcagcgagtggctctatcgccatcatgatgtccccacccacagcgacgaaaaccaggcgctgctgcgtcgggccatcgccgccaaccgcgacgaagacatcgaggtgctgcgcaacagcgtgcagttcggtctcgcctcgctgcagcagtatgttgaagatccgcaagaggtctacttcgttaaatcgcccaaatccttcctcggcgccagcgggctgaagccgcagcaggtggccctgtttgaagacctggtctgcgccatgatgctgcatattaagttgcaggccgaaagccagctgcccgagcagatcgaccaggcggtgattggccgaccgattaacttccagggcctcggcggcgatgaggcgaacgcccaggcgcaggggatccttgagcgggccgcccaccgcgccggtttccgcgatgtggtctttcagtttgaaccggtggccgccgggctcgatttcgaagcgaccctcagtgaagaaaagcgggtgctggtcgtcgatatcggcggcgggaccaccgactgctccctgctgctgatgggcccgcaatggcgggagcgcgccgaccgccagcagagcctgctcggccacagcggctgccgcatcggcggtaacgatctcgacattgccctggccttcaaatgcctgatgccccttctcggcatgggtggcgaaacggagaaaggcaccgcgctgccgatcctcccgtggtggaacgcggtggcgatcaacgacgtgccggcgcagagcgatttctacagcaccgccaacggccgcctgctgaacgatctgctgcgcagcgcccgggatgccgacaaggtggctctactgctgaaggtctggcgccagcgtctcagctatcgtctggtgcgcagcgccgaagagagcaaaatcgccctctccagcgccgccagcgtcgaaaccgcgctgccgtttattcaggacgatctggccaccgccatcgcccagcagggtctggaagccgcgctggatcagcccctgacccgcattatggaacaggtgcggctcgcgctcgacagcagccagaccaccccggatgtgatctatcttaccggcggcagcgcccgttcgccgctgatcaaaaaggcgctggccgctcagctgccgggtattccgctggccggcggcgatgattttggctcggtgaccgccgggctggcccgctgggcgcaggtagttttccgctagccctcgcccggcgctgccgcgcagcaggtctgtcctgatcctggcgctgcagattacgctggaatattcctggtctcccacgcaaaatggcctgttcgtccggacaggcctgtccactctcccccgcttccgggggcgtattatccataccgtagccagacgtctgcggtcagtaatctttgcatgccgcaagggggcgtgattgaaaagggtgtctgcgatcttcgcggcggtccggcgttgccggccgcggctcctggcaggctggctgctcagctgtggattactcttgctgctggtcgccccgcaggcgcaggcggcgacgcgccaggtggggattgatattccggttcagtggtacgccgacgacagcggccagatgaccctcgatcgttttgccgccctgcccgcagaccagctcgccaccacccggcagatcccctcctttggttattcgcgaaaaacctggtggctgcgcagcgagctgccgggcacgtggtttgccggggagccgcgttggctgcagctgggccccactttcgtcgaccatctgaccatttactaccggccactgggcagcgatggcccgtggacgcagcgcatctttggcgatcgcgacggcgcccgcggaagcgatctgcattatcgggaaagggtgctgatactgcccccgccgccaaccgccgccggctatgagctggtctttcgcctgcagagcaccagcaccctgatcc
